United States Patent Application Publication US 2023/0272434 A1 - sequence listing, part 6

SEQ ID NO: 8759 - protein, 822 aa, Takifugu bimaculatus
MSPIQPVEHQMETRPPTWSQIEGTVKRARTASAPGPNGVPYRLYKNTPDVLRHLWKLMKMAWEKGIIPKAWRRAGGILIPKEKNSSTIDQFRQINLLNVEGKIFFSVVAQRLSAFLQQNSFVDTSVQKAGISGFSGCLEHTNIIWHQIQIAKKDKKDLHVVFLDLANAFGSVPHEVLWTAFTFFQVPEGITRLVKAYFQDLQFCVTAQASTTAWQHLEVGIMAGCTISPLAFTMAMELIIRASRWVVGGERLKNGLRLPPIRAYMDDMTTITTTRACTKRLLEKLQKNIQWARMEIKPSKSGSISIVKGQLANERFHINNEPVPTILEKPIKSLGRWYSAELKDSKQVEQLKQDTISGLRQINSTALPGKLKLWCFQFGLLPRLMWPMSIYEVTLSHANRLERLVNAQVRKWLGLPRCLSSIGLYGSGVLSLPISSLVEEYKCAKARLEMTLTESRDPFVRGAAQTIATGRKWKPSAAVAEAKTSLRHRDIVGHVQHGRNGLGMEATTPTLQKATPAERRHMVVEEVRHQEEAARCAKAVSQAQQGRWMKWEGVERRRITWSELWSMESSRLSFTIRAVYDVLPSPTNLHLWYGEEPACPQCAAPASLKHILVGCKISLTQGRYTWRHNQVLKCLAAELEKRRVKINSISPNSQPVAPWKMSFVRGGEKRGSKPAPPEAGALTVARDWEMRVDLSQRLIFPSEVAVTNLRPDLVLWSKSCRRVFIVELTVPWEEAIGEAYERKRLRYANLAAEAEGRGWSVKVWPVEVGCRGFVSRTTTKLLKEMGIRGHAQWRAVKELAATAEQSSHWLWLKRRDILWAAK

SEQ ID NO: 8760 - protein, 1194 aa, Takifugu bimaculatus
MLHVFSQWFIVLCCGTVKEMQEWVSFLSSILNRAVIFEDLKKKQKTLESTRVGVEDDSLADHTVTNLATETTMNQKLSMAGNGATAMAGCKLQSCICGWKKITSEKGLKIHQGRKKCLRELSEGPRIDHYFLRGRANKSIEAQWQDNHHGLQGIRTPDEAQPCMDPPMDGITEPIQPQPAVERKLEGRKPQILWPKSCQKEEWETINIDLVHLLEGLKGGVEKKLDKIGEIIYSYGAERFGVKSGNLKLQKEPTHLKSRRQREIERLVKERRCLRKQWKKAAEAERKGLEALQGDLKQRLVTLRRAECLRKQHKKKERARTSFYRDPYKFVKALFVKEKFGTLKAPIRELEEHLRNTYSDHQRHVPACIPDDMPPIQPVEHQMETRPLTWSEIEGTVKRARAASAPGPNGVPYRLYKNTPDVLRHLWKLMKMAWEKGIIPEAWRRAGGILIPKEKNSSTIDQFRQINLLNVEGKIFFSVVAQRLSAFLQQNNFVDTSVQKAGISGFSGCLEHTNIIWHQIQMAKKDKKDLHVVFLDLANAFGSVPHEVLWTAFTFFQVPEGITRLVKAYFQDLQFCVTAQASTTAWQHLEVGIMAGCTISPLAFTMAMELIIRASRWVVGGERLKNGLRLPPIRAYMDDMTTITTTRACTKRLLEKLQKNIQWARMEIKPSKSGSISIVKGQLANERFHINNEPVPTILEKPIKSLGRWYSAELKDSKQVEQLKQNTISGLRQINSTALPGKLKLWCFQFGLLPRLMWPISIYEVTLSHANRLERLVNAQVRKWLGLPRCLSSIGLYGSGVLSLPISSLVEEYKCAKARLEMTLTESRDPFVRGAAPTLATGRKWKPSAAVAEAKTSLRHRDIVGHVQHGRNGLGMEATTPTWQKATPAERRHMVVEEVHHQEEAARCAKAVSQAQQGRWMKWEGVERRRITWSELWSMEASRLSFTIRAVYDVLPSPTNLHLWYGEEPACPQCAAPASLKHILVGCKISLTQGRYTWRHNQVLKCLAAELEKRRVKINSMPPNSQPVAPWKMSFVRGGEKRGSKPAPPEAGALTVARDWEMRVDLSQRLIFPSEVAVTNLRPDLVLWSKSCRRVFIVELTVPWEEAIGEAYERKRLRYANLAAEAEGRGWSVKVWPVEVGCRGFVSRTTTKLLKEMGIRGQAQRRAVKELATTAEQSSHWLWLKRRDILWAAK

SEQ ID NO: 8761 - protein, 1026 aa, Erpetoichthys calabaricus
MSPEPIQPQIAVEWKMKGRKPQILWPKSCQKKEWETTDTDVVHLLEGLKGCVERKLDKIGEIIYSYGTDRFGAKSTNLRTQKDPSVNLKSRRQQEIERLVKERRKLRKQWNKATELERKGLEALQGEIRQRIATLRRAECLRKKHKKKERMRTCFYRDPHKFVKDLFVKEKTGTLKAPIEELEEHLRKTYSNNKRHVPARIPDDMPPIQPPEHQLELRPPTWSKVERTVKRARAASAPGSNGIPYRLYKNAPGILKYLWKLMKVVWEKGVIPKAWRRAGGILIPKEKNSSTIDQFRQISLLNVEGKIFFSVVAQRLSAFLQKNNFVDTSVQKAGIRGFSGCLEHQNVIWHQIQTAKKEKKDLHVVFLDLANAFGSVPHEILWTASNFFQVPEGITRLVKAYFQDLQFCVTTQTRTTAWQHLEIGIMAGCTISPLAFTMAMELIIRASRWVVGGERSKAGLRFPPIRAYMDDMTTITTTNACTKRLLNKLQENIKWARMEFKPSKSRSISIVKGQLTNERFQVNNEPIPTVLEKPIKSLGRWYSAELKDSKQVEQLRQDTINGLNKINNTALPGKLKLWCFQFGLLPRLMWPISIYEVTLSQANRLERLVNAQVRKWLGLPRCLTSIGLYGNGALSLPISSLVEEYKSAKSRLEMTLTKSRDSVVRGAAPTLATGRKWKPSAVVAEAKAALRHRDVVGHVQHGRGGFGFEAVTPAWQKATPMERRQMVVEEVRCQEEAARCAKAVSQAQQGRWMKWDGVERRKITWSKMWSMEANRVSFIIRATYDVLPSPTNLHLWHGKDPACPLCAIPATLKHILVGYKTSLTQGRYTWRHNQVLRCLAAEIENKRININAMPLEAQSIIRQRTTFMREGEKQRTKPLLQDNGPLNPARDWELRVDLNQRLTFPPEIATTNLRPDLVLWSKSCRRVFIVEMTVPWEDAIDEAFERKRLRYASLAAEAERRGWNVKVWPVEVGCRGFVASSTTRLLKEVGIRGQAQRKAIKELATVAERSSHWLWLKRRDLTWAAN

SEQ ID NO: 8762 - protein, 1122 aa, Takifugu bimaculatus
MNQKLSMAGNGATAMAGCKLQSCICGWKKITSEKGLKIHQGRKKCLRELSEGPRIDHYFLRGRANKSIEAQWQDNHHSPQGIRTPDEAQPGMDPPMDVSTEPIQPQPAVERKLEGRKPQILWPKSCQKEEWETINIDLVHLLEGLKGGVEKKLDKIGEIIYSYGAERFGVKSGNLKLQKEPAHLKSRRQREIERLVKERRCLRKQWKKAAEAERKGLEALQGDLKQRLATLRRAECLRKQHKKKERARTSFYRDPYKFVKALFVKEKFGTLKAPIRELEEHLRNTYSDHQRHVPACIPDDMPPIQPVEHQMETRPPTWSEIEGTVKRVRAASAPGPNGVPYRLYKNMPDVLRHLWKLMKMAWEKGIIPKAWRRAGGILIPKEKNSSTIDQFRQINLLNVEGKIFFSVVAQRLSAFLQQNNFVDTSVQKAGISGFSGCLEHTNIIWHQIQMAKKDKKDLHVVFLDLANAFGSVPHEVLWTAFTFFQVPEGITRLVKAYFQDLQFCVTAQASTTAWQHLEVGIMAGCTISPLAFTMAMELIIRASRWVVGGERLKNGLRLPPIRAYMDDMTTITTTRACTKRLLEKLQKNIQWARMEIKPSKSGSISIVKGQLANERFHINNEPVPTILEKPIKSLGRWYSAELKDSKQVEQLKQDIISGLRQINSTALPGKLKLWCFQFGLLPRLMWPISIYEVTLSHANRLERLVNAQVRKWLRLPRCLSSIGLYGSGVLSLPISSLVEEYKCAKARLEMTLTESQDPFVRGAAPTLATGRKWKPSAAVAEAKTSLRHRDIVGHVQHGRNGLGMEATTPTWQKAIPAERRHMVVEEVCHQEEAARCAKAVSQAQQGRWMKWEGVERRRITWSELWSMEASRLSFTIRAVYDVLPSPTNLHLWYGEEPACPQCAAPASLKHILVGCKISLTQGRCTLRHNQVLKCLAAELEKRRVKINSMPPNSQPVAPWKMSFVRGGEKRGSKPAPLEAGALTVARDWEMRVDLSQRLIFPSEVAVTNLRPDLVLWSKSCRRVFIVELTVPWEEAIGEAYERKRLRYANLAAEAEGRGWSVKVWPVEVGCRGFVSRTTTKLLKEMGIRGQAQRRAVKELTATAEQSSHWLWLKRRDISWAAK

SEQ ID NO: 8763 - protein, 967 aa, Erpetoichthys calabaricus
MSPEPIQPQIAGEWKMKGRKPQILWPKSCQKKEWETTDTDLVHLLEGLKGCVERKLDKIGEIIYSYGTDRFGAKSTNLMTQKDPSVILKSRRQQEIERLVKERRKLRKQWKKATELERKGLEALQGKIRQRIATLRRAECLRKKHKKKERMRTCFYRDPHKFVKDLFVKEKTGTLKAPIEELEEHLRKTYSDNKRHVPARIPDDMPPIQPPEHQLELRPPTWSEVERTVKRARAASAPGPNGIPYRLYKNAAGVLKYLWKLMKVVWEKGVIPKAWRRAGGILIPKEKNSSTIDQFRQISLLNVEGKIFFSVVAQRLSAFLQKNNFVDTSVQKAGIRGFSGCLEHQNVIWHQIQTAKKETKDLYVVFLDLAIAFGSVPHEILWTAFNFFQVPEGITRLVKAYFQDLQFCVTTQTRTTAWQHLEIGIMVGCTISPLVFTMAMELIIRASRWVVGGERSKAGLRFPPIRAYMDDMTTITTTNACTKRLLNKLQENIKWARMEFKRSKSRSISIVKGQLTNERFQVNNEPIPTVLEKPIKSLGRWYSAELKDSKQVEQLRQDTINGLNKINNTALPGKLKLWCFQFGLLPRLMWLISIYEVTLSQANRLERLVNAQVRKWLGLPRCLTSIGLYGNGALSLPISSLVEEYKCAKSRLEMTLTESRDSVVRGAAPTLATGRKWKPSAVVAEAKAALRHRDVVGHVQHGRGGFGFEAVTPAWQKATPMERRQMVVEEVRRQEEAARCAKAVSQAQQGRWMKWDGVERRKITWSEMWSMEANRLSFIIKATYDVLPSPTNLHLWHGKDPACPLCAIPATLKHILVGCKTSLTQGRYTWRHNQVLRCLAAEIENKRININAMPLEAQSIIRQRTTFMWEGEKQRTKPLLQDNGPLNPARDWELRVDLNQRLTFSPEIATTNLRPDLVLWSKSCRRVFIVEMTVPWEDAIDEAFERKRLRYASLAAEAEGRGWNVKV

SEQ ID NO: 8764 - protein, 1031 aa, Takifugu flavidus
MDPPVDVITEPIQPQPAVERKLEGRKPQILWPKSCQKEEWETINIDLVHLLEGLKGGVEKKLDKIGEIIYSYGAERFGVKSGNLKLQKEPAHLKSRRQREIERLVKERRCLRKQWKKATEAERKGLEALQGDLKQRLATLRRAECLRKQHKKKERARTSFYRDPYKFVKALFVKEKFGTLKAPIRELEEHLRNTYSDHQRHVPACIPDDMPPIQPVEHQMETRPPTWSEIEGTVKRARAASAPGPNGVPYRLYKNTPDVLRHLWKLMKIAWEKGIIPKAWRRAGGILIPKEKNSSTIDQFRQINLLNVEGKIFFSVVAQRLSAFLQQNNFVDTSVQKAGISGFSGCLEHTNIIWHQIQMAKKDKKDLHVVFLDLANAFGSVPHEVLWTAFTFFQVPEGITRLVKAYFQDLQFCLTAQASTTAWQHLEVGIMAGCTISPLAFTMAMELIIRASRWVVGGERLKNGLRLPPIRAYMDDMTTITTTRACTKRLLEKLQKNIQWARMEIKPSKSGSISIVKGQLANERFHINNEPVPTILEKPIKSLGRWYSAELKDSKQVEQLKQDTISGLRQINSTALPGKLKLWCFQFGLLPRLMWPISIYEVTLSHANRLERLVNAQVRKWLGLPRCLSSVGLYGSGALSLPISSLVEEYKCAKARLEMTLTESRDPFVRGAAPTLATGRKWKPSAAVAEAKTSLRHRDIVGHVQHGRNGLGMEATTPTWQKATPAERRHMVVEEVRHQEEAARCAKAVSQAQQGRWMKWEGVERRRITWSELWSMEASRLSFTIRAVYDVLPSPTNLHLWYGEEPACPQCAAPASLKHILVGCKISLTQGRYTWRHNQVLKCLAAELEKRRVKINSMPPNSQPVAPWKMSFVRGGEKRGSKPAPPEAGALTVARDWEMRVDLSQRLIFPSEVAVTNLRPDLVLWSKSCRRVFIVELTVPWEEAIGEAYERKRLRYANLAAEAEGRGWSVKVWPVEVGCRGFVSRTTTKLLKEMGIRGQAQRRAVKELAATAEQSSHWLWLKRRDISWAAK

SEQ ID NO: 8765 - protein, 822 aa, Takifugu flavidus
MPPIQPVEHQMETRPPTWSEIEGTVKRARTASAPGPNGVPYRLYKNTPDVLRHLWKLMKMAWEKGIIPKAWRRAGGILIPKEKNSSTIDQFRQINLLNVEGKIFFSVVAQRLSAFLQQNSFVDTSVQKAGISGFSGCLEHTNIIWHQIQMAKKDKKDLHVVFLDLANAFGSVPHEVLWTAFTFFQVPEGITRLVKAYFQDLQFCVTAQASTTAWQHLEVGIMAGCTISPLAFTMAMELIIRASRWVVGGERLKNGLRLPPIRAYMDDMTTITTTRACTKRLLEKLQKNIQWARMDIKPSKSGSISIVKGQLANERFHINNEPVPPILEKPIKSLGRWYSAELKDSKQVEQLKQDTISGLRQINSTALPGKLKLWCFQFGLLPRLMWPMSIYEVTLSHANRLERLVNAQVRKWLGLPRCLSSIGLYGSGVLSLPISSLVEEYKCAKARLEMTLTESRDPFVRGAAQTIATGRKWKPSAAVAEAKTSLRHRDIVGHVQHGRNGLGMEATTPTLQKATPAERRHMVVEEVRHQEEAARCAKAVSQAQQGRWMKWEGVERRRITWSELWSMESSRLSFTIRAVYDVLPSPTNLHLWYGEEPACPQCAAPASLKHILVGCKISLTQGRYTWRHNQVLKCLAAELEKRRVKINSISPNSQPVAPWKMSFVRGGEKRGSKPAPPEAGALTVARDWEMRVDLSQRLIFPSEVAVTNLRPDLVLWSKSCRCVFIVELTVPWEEAIGEAYERKRLRYANLAAEAEGRGWSVKVWPVEVGCRGFVSRTTTKLLKEMGIRGHAQWRAVKELAATAEQSSHWLWLKRRDISWAAK

SEQ ID NO: 8766 - protein, 1181 aa, Symphodus melops
MTIFYPTLATKTSRGITPLESARAGAQDDSSVDHTVTDHGTEMTTTLMTSTVTNEETALAGHKLQSCTCGWKKITSEKGLKIHQGRKRCLKQLQKGPRIDHYFLRGRSNQSIETQWQDAHHSPQGIRTPEEAQPVTNPLMESCTEQSSEPTQPQLAIERKMEGRKPLIMWPKFCQNKEWENTDIDLVHLLEGLKGGVERKLDKMGEIIYTYGAERFGVKSSTQKEPSTKPMSRRQQEIERLVKERRGLKKQWKKATRTERNGLEELQADIKQRLATLRRAECLRRQRKKKERVRTAFYRDPYRFVKDIFAKEKTGTLKVPIRELEEHLKKIYSDNQRHEPVIIPDDMPPIQPPMHQMDSKPPTWSEVESAIKRARTSSAPGPNGVPYRLYKNTPGVRKYLWKLMKVAWEKCIIPKAWRRAGGTLIPKEKNSSTIDQFRQINLLNVEGKLFFSVVAKRLSVFLQRNNFVDTSVQKAGIGGFSGCLEHANTIWHQVQTAKKEKRDLHVVFLDLANAFGSVPHEVLWAAFDFFQIPEDITRLVRTYFQDLQFCVTAQSVTTTWQRLEVGIMAGCTISPLAFTMAMELIIRASRWVVGGERLKSGLRLPPIRAYMDDMTTITTTKACTRRLLDKLQTNIRWARMEIKPSKSRSISLIKGQLSNERFHINDEPIPTIQEKPIKSLGRWYNANLKDTNQVEQLKQDTICGLKQINNTALPGKLKLWCFQFGLLPRLMWPLSMYEITLSHVNRLEQLVNAQVRKWLGLPKCLSTIGLYGNGALSLPISSLVEEYKCAKTRLEMTLTDSRDPFVRGATITLATGRKWRPVTAVAQAKAALRHRDIVGKVQQGRQGLGLGTTTPTWQKATPSERRQLVVEEVRHQEEAVRRATAVSQVKQGRWMKWEGVERRKITWSEMWSMEANRVSFIIRATYDTLPSPTNLHLWFGEDPACPQCAAPATLKHILVGCKTSLNQGRYTWCHNQVLKCLAAELEKKRVTTNTMPRKHLPLTTFSKTAFVREGEKQLIKSLNHSSPLDAARDWEMSVDLGQRLTFPPEIAMTNLRPDLVLWSTSCRRVFIIELTVPWEEAIDEAYERKSLRYANLAADAEDRGWSVKVRPVEVGCRGFVASSTTRLLKEVGIRGQTQRKAIKELASVAERSSHWLWMKRKETVWAAKRPQGAPSVTHARV

SEQ ID NO: 8767 - protein, 913 aa, Oryzias melastigma
MERVGLEELQGDIKRRLAKLRRAEQLRRQRKRKERTRSLFYNNPYSFVKGLFEQEKSGRLITPIKELEEHLKQVYSDDRKHESVTIPSDIPPIHAPKYQMDIRPPTLSEVEKIVRKARAASAPGPNGIPYRLYKNTPRVLNYLWRLMKVVWQKGEIPKAWRRAGGILIPKEKDSSTIGQFRQISLLNVEGKIFFSVLAQRLLTYLQRNNFVDTSVQKAGVQGFSGCLEHTNIIWHQIQTAKKERRDLHVVFLDLANAFGSVPHNILWTAFDYFSVPYKVTELIRNYFQDLQFCVTYENMTTNWQHLEIGIMAGCTISPLAFVMAMEIVIRASRWVVGGEKINSDLRLPPIRAYMDDMTLITTTKPCTRRLLQKLQENIQWARMEFKPGKSRSISVVKGQVVNEQFYIRDEPIPTILEKPIKSLGRWYNADLKDTQQVEQLRQNTADCLKKIDNTSLPGKLKLWCYQFGLLPRLIWPLTMYEVSLSHANRLERLVNSYVRKWLGVPNCLSSVGLYSDGVLSLPVPSLVEEFKCAKVRLDMSLSDSKDPVVRGAAPVLATGRKWTPGTAVLQAKSALRHRDIVGHVQGDRRGFGFGTVAPLWQKASATERRDMVVDEVRQQEEAARRIQAVAQAKQGGWVRWEGVEKRKLTWSELWNMESNRLSFIIRATYDVLPSPANLHLWLGKDPACPLCTSAATLKHILVGCKICLTQGRYTWRHNQVLRCLANTLECKRVHINAQPCHSQNRRPPPPFICEGGRPRSIPPYPELTPLNAARDWQMQVDLDRRLVFPSEIATTTLRPDLVLWSNSCRVVYIIELTVPWEDSLDEAYERKKLRYSDLAAEAEDRKWKVRVRPVEVGCRGFVASSTAKLLREVGIRGRAHRQAIKELTNTTERASQWLWLKRSDMAWTAKTTK

SEQ ID NO: 8768 - protein, 1117 aa, Takifugu bimaculatus
MNQKLSMAGNGATAMAGCKLQSCICGWKKITSEKGLKIHQGRKKCLRELREGPRIDHYFLRGRANKSIEAQWQDNHHSPQGIRTPDEAQPGMDPPVDVITEPIQPQPAVERKLEGRKPQILWPKSCQKEEWETVNIDLVHLLEGLKGGVEKKLDKIGEIIYSYGAERFGVKSGNLKLRKEPAHLKSRRQREIERLVKERRCLRKQWKKATEAERKGLEALQGDLKQRLATLRRAECLRKQHKKKERARTSFYRDPYKFVKALFVKEKFGTLKAPIRELEEHLRNTYSDHQRHVPACIPDDMPPIQPVEHQMETRPPTWSEIEGTVKRARAASAPGPNGVPYRLYKNTPDVLRHLWKLIKIAWEKGIIPKAWRRAGGILIPKEKNSSTIDQFRQINLLNVEGKIFFSVVAQRLSAFLQQNNFVDTSVQKAGISGFSGCLEHTNIIWHQIQMAKKDKKDLHVVFLDLANAFGSVPHEVLWTAFTFFQVPEGITRLVKAYFQDLQFCLTAQDSTTAWQHLEVGIISPLAFTMAMELIIRASRWVVGGERLKNGLRLPPIRAYMDDMTTITTTKACTKRLLEKLQKNIQWARMEIKPSKSGSISIVKGQLANERFHINNEPVPTILEKPIKSLGRWYSAELKDSKQVEQLKQDTISGLRQINSTALPGKLKLWCFQFGLLPRLMWPISIYEVTLSHANRLERLVNAQVRKWLGLPRCLSSVGLYGSGALSLPISSLVEEYKCAKARLEMTLTESRDPFVRGAAPTLATGRKWKPSVAVAEAKTSLRHRDIVGHVQHGRNGLGMEATTPTWQKATPAERRHMVVEEVRHQEEAARCAKAVSQAQQGRWMKWEGVERRRITWSELWSMEASRLSFTIRAVYDVLPSPTNLHLWYGEEPACPQCAAPASLKHILVGCKISLTQGRYTWRHNQVLKCLAAELEKRRVKINSMPPNSQPVAPWKMSFVRGGEKRGSKPAPPEASALTVARDWEMRVDLSQRLIFPSEVAVTNLRPDLVLWSKSCRCVFIVELTVPREEAIGEAYERKRLRYANLAAEAEGRGWSVKVWPVEVGCRGFVSRTTTKLLKEMGIRGQAQRRAVKELAATAEQSSHWLWLKRRDISWAAK

SEQ ID NO: 8769 - protein, 1187 aa, Oryzias latipes
MNSTVTTGMDGISTLGRRELQSCICGWSKLTTVRGLKIHQGLKKCLSKLSKGPRIDQHFLRRRPNQSSEAQRQEKPHSPQGISTPTEAQHRIDPQTGSSPEFSQAELEQVFCPEANLQNPVLSQKPIQSQPATGPSSDPSQPQPATEASPEPSEQSDPSLALSQPFPPSAIERRMEGRKPQIQWPKSSEKRKWETVDQDLALLLEQLKGPAVRKLENMGSIIYNYGAERFGTKNKRQRQAKESPIQSKSRRQREVERLVKERRQLRKQWKNATEVERVGLENLQDDIKKQLTKLRRSEYLRRQRKRKEKTRSLFYSNLYSFVKGLFEQEKSGRFITPIKELENHLKKTYSDPQKHEPVIIPKDIPPLHAPKHQMDTRPPTLSEVEKTVRKARAASAPGPNGIPYRLYKNTLKVITYLWRLMKVVWKKGDIPKPWRRAGGILIPKEKDSSAISQFRQINLLNVECKIFFSVLAQRLSTFLQRNNFVDSSVQKAGIQGFSGCLEHVNIIWHQIQTAKKEKRDLHVVFLDLANAFGSVPHNILWTAFNYFNVPLQITKLVRTYFHDLQFCVTHENSTTVWQHLEIGIMAGCTISPLAFVMAMELVIRASRWVVGGEKTNSGLRLPPIRAYMDDMTIITTTKPCTKRLLQKLQENIQWARMEFKPTKSRTISIIKGQLVREQFYINEQPIPTILEKPIKSLGRWYNADLKDNKQVEQLWQNTASCLKKIDNTSLPGKLKLWCYEFGLLPRLMWPLTMYEVSISHVHRLERLVNSYLRKWLGVPNCLSSVGLYNDGVLSLPVSSLVEEFKCAKVRLDMSLSDSRDPMVRSAAPVLATGKKWTPAVAVLQAKSALHHRDIVGHVQQGRGGFGLGVVKPLWQKASAAERRTMVVEEVRQLEEAGRRSTAVAQAKQGRWVRWEGVERRKLTWSELWSMESNRLSFLLRATYDVLPSPTNLQLWLGKDPSCPLCSATATLKHILVGCGTSLTQGRYTWRHNQVLKCLANTLECRRVFINAQPSSNLDVRRHPPPFVREGEKPRSNPSLPELTPLNAAGDWQMRVDLNQRLIFPSEIAATTLRPDLVLWSNSCRLAYIIELTVPWDDSLDEAYERKKLRYSNLAAEAEDRGWNIRVRPVEVGCRGFVASTTTNLLREVGVRGRAHRQALKELTNTAERASIWLWLRRSDITWTKMTN

SEQ ID NO: 8770 - protein, 914 aa, Macroramphosus scolopax
MEREGIEVLQVELKQQLTKLRRAEHLRRQRKKKERTRIHFFSNPYSFVKGLFQQEKCGSLKVPIKDLEEHLSKTYSDDRKHEPVTIPIDMPPIHAPEHQMDTRPPTWSEVEKTVKKARSTSAPGPNGIPYMLYKNAPGALRYLWKLMKVAWKKGVIPRAWRRAGGILIPKEKDSSSIGQFRQISLLNVEGKIFFSVVAQRLSTFLQRNNFVDTSVQKAGIQGFSGCLEHANMIWHQIQAAKKEKRDLHVVFLDLANAFGSVPHKILWTAFNYFGVPNHITELVKSYFHDLQFCVTAEGNTTAWQHLEIGIMAGCTISPLAFVMAMELVIRGSRWVVGGERTKSGLRLPPIRAYMDDMTVITTTKPCTRRLLQKLQENIQWARMDFKPSKSRSISIVKGQLTGERFHISGEPIPTLLEKPIKSLGRWYNADLRDTQQIEQLRQDTANGLRQINNTALPGKLKLWCFQFGLLPRLQWPLTMYEVSICHANRLERLVNSHVRKWLGLPRCFSSVGLYSDGALSLPISSVVEEFKCAKVRLEMSLTDSRDPVVRGAPPTLATGRKWNPATAVLQAKSALLHRDVVGHVQQGRAGFGLGTITPLWRKASTTERRTMVAEEVRRQEEATRRSKAVAQAKQGRWMKWEGVEKKKLTWSELWGMESNRLSFIVRATYDVLPSPINLQLWFGNDPACPLCTTPATLKHIMVGCKTSLTQGRYTWRHNQVLRCLADKLENKRVSINALPTNNQDRRQHPPLFVREGEKQRARTSHPDLGPLNAARDWQMQVDLDRRLVFPPEIAMTTLRPDLVLWSNTCKLVYIIELTVPWEDAVEEAYERKKLRYSNLAAEAEDRGWKARVRPVEVGCRGFVASSTAKLLREVGIKGQAHRQTIKELANTAERTSHWLWLKRSDTIWAAKASA

SEQ ID NO: 8771 - protein, 921 aa, Macroramphosus scolopax
MEGRKDLILWPKSNQKREWETIDSDLVLLLEQQKGPVERKLDNVGAVIYSYGAKRFGVKHKAQRQQKGPQNQPKSRRQREIERLVKERRQLRKLWRKATEMEREGIEVLQVELKQQLTKLRRAEHLRRQRKKKERTRIHFFSNPYSFVKGLFQQEKCGSLKVPIKDLEEHLSKTYSDDRKHEPVTIPIDMPPIHAPEHQMDTRPPTWSEVEKTVKKARSTSAPGPNGIPYMLYKNAPGALRYLWKLMKVAWKKGVIPRAWRRAGGILIPKEKDSSSIGQFRQISLLNVEGKIFFSVVAQRLSTFLQRNNFVDTSVQKAGIQGFSGCLEHANMIWHQIQAAKKEKRDLHVVFLDLANAFGSVPHKILWTAFNYFGVPNHITELVKSYFHDLQFCVTAEGNTTAWQHLEIGIMAGCTISPLAFVMAMELVIRGSRWVVGGERTKSGLRLPPIRAYMDDMTVITTTKPCTRRLLQKLQENIQWARMDFKPSKSRSISIVKGQLTGERFHISGEPIPTLLEKPIKSLGRWYNADLRDTQQIEQLRQDTANGLRQINNTALPGKLKLWCFQFGLLPRLQWPLTMYEVSICHANRLERLVNSHVRKWLGLPRCFSSVGLYSDGALSLPISSVVEEFKCAKVRLEMSLTDSRDPVVRGAPPTLATGRKWNPATAVLQAKSALLHRDVVGHVQQGRAGFGLGTITPLWRKASTTERRTMVAEEVRRQEEATRRSKAVAQAKQGRWMKWEGVEKKKLTWSELWGMESNRLSFIVRATYDVLPSPINLQLWFGNDPACPLCTTPATLKHIMVGCKTSLTQGRYTWRHNQVLRCLADKLENKRVSINALPTNNQDRRQHPPLFVREGEKQRARTSHPDLGPLNAARDWQMQVDLDRRLVFPPEIAMTTLRPDLVLWSNTCKLVYIIELTVPW

SEQ ID NO: 8772 - protein, 805 aa, Takifugu bimaculatus
MPPIQPVEHQMETRPPTWSEIEGTVKRARAASAPGPNGVPYRLYKNTPDVLRHLWKLMKMAWEKGIIPKAWRRAGGILIPKEKNSSTIDQFRQISLLNVEGKIFFSVYSVQKAGISGFSGCLQHTNIIWHQIQMAKKDKKDLHVVFLDLANAFGSVPHEVLWTAFTFFQVPEGITRLVKAYFQDLQFCVTAQASTTAWQHLEVGIMAGCTISPLAFTMAMELIIRASRWVVGGERLKNGLRLPPIRAYMDDMTTITTTMACTKRLLEKLQKNIQWARMEIKPSKSGSISIVKGQLANVRFHINEPVPPILEKPIKSLGCWYSAELKDSKQVEQLKQDTISGLRQINSTALPGKLKLWCFQFGLLPRLMWPISIYEVTLSHANRLERLVNAQVRKWLGLPRCLSSIGLYGSGVLSLPISSLVEEYKCAKARLEMTLTESRDPFVRGAAPTLATGRKWKPSAAVAEAKTSLRHRDIVGHVQHGRNGLGMEATTPTWQKATPAERRHMVVEEVRHQEEAARCAKAVSQAQQGRWMKWEGVERRRITWSELWSMEASRLSFTIRAMYDVLPSPTNLHLWYGEEPACPQCAAPASLKHILVGCKISLTQGRYTWRHNQVLKCLAAELEKRRVKINSMPPNSQPVAPWKMSFVRGGEKRGSKPAPLEAGALTVARDWEMRVDLSQRLIFPSEVAVTNLRPDLVLWSKSCRRVFIVELTVPWEEAIGEAYERKRLRYVNLAAEAEGRGWSVKVWPVEVGCRGFVSRTTTKLLKEMGIRGQAQRRAVKELAATAEQSSHWLWLKRRDISWAAK

SEQ ID NO: 8773 - protein, 962 aa, Sminthurinus signatus
MNYEGDSGVSIHISARHPEIHRQIVAAKYETNQRPKPLSPSHNNTNEEIEKIHNQLFNLLDNTKQVNENEVTPEKVDDLFKDFQSILLIYQTVTPGPKHPSQRFYNIRKNSQFHQQQQQPGYNASSNPVRASKRKQKQKRDKFDHQLTQHLFYSGQRKKLVRKLMGNTKHECKIPLEILEKEFNARWGEENSKFIPRTKISDETQKEIDDQYLIDITPQEMEDAIKKLSFDSSAGPDKILPKTLKDLNKNICEFMALLLTWMTKIDHFPIELRTAETIPIYKKGSLDDPANFRPITMSSVIRRAFEKVIDSRLESYVSYCEAQQGFIHAPGTLINSTKLNGCLKDAKKNQKDCCAAILDIKQAFDRVGHTHIKQQLAAEPLPSLLRNFLVTLQTKNYTQIKTKQGKTKPIEIKCGIMQGSLVSPKTFNICVDPVLRELTEENIKNTYGYKLTSPAKSLSALGFVDDTSTIGNSKNSTTILTEIAVNKFAEIGLELNYEKSNIINIEKGKLKRDEINVFGHSIKSVEEDETIRYLGINFKDEITFDKNKVIQELRKSIDTLVSCSVLNKDQKMLILNTYIWPTLIYPFQTAPLHKLSDNFLEDIDIIIRSATKQILEIKRETPTPLIYSTRKFKGLGVFRSKWEALIQNFNACLLLSKVDDDIIMHVRNLEEEMDMCLNRLQLDQNFITELKTEINNPPQTITTEKKKIKKPARKIRDHLQVEEFKKLEAMPYHGKGVSLFREQPKYNKWVSTKGKLTNSEWTIGIKMVANGTDVRAHPGKAMDMQLCRYSETCKKIETLQHVLGNCPHGELIRIAGHNKVRTILADALRKNKFEVYEEIGCTDTKGDEKRADIIAINPKTRDAAMFDPTIRFEQSLSQPEEVNTEKQEWYKDSIPVYMEKLNLKSLKIIGLLVGARGTITTLFVNTCQEYGISNTVIEEISTIALRRSCQIYQNHVNLKKSN

SEQ ID NO: 8774 - protein, 1068 aa, Amphibalanus amphitrite
MACAFSEAVVSGPPSSGSQSAGSCGGCTSLSARKAAILCSACGTRWRTACAGLKVKEAQTLPVWHCRNCRSDHVNLGLQLSQHTITQGTRPSPSPEGSTPTELHSRLAKLRDSCPVVKRIPKAARASVADALSSIIDTALSESSLETWSRFLSFAFVVLRAPNKGRRSSIVSAIKQQINDINANHQSCPPPARLTSMTSTLPGRETGDDSVARRVHGKCADKDIKGALRILTSTEEFTQASPEVLSVLQQKHPPVPADEVLPPAPNTSDLPILTVTEEQVQAAIRTMPPGSAAGLDGIRPMHLKQLTSAEATEPGRRLLKSITNLINMTLRGAVPDHARDSFFGATLCALRKKDGGLRPIAIGSVYRRLASRMAAHHMASIIGPELRPVQLGVGTPLGCEAAVHATREVLTSDVSVPTAVIKVDISNAFNTVRRDQMLNAVRTRCPEVYPLAYQAYSAPSPLHFGDHVILSSCGVQQGDPLGPAFFALVVDGCARSLKSPLNLWYLDDATIAGPVETVEEDLRTLCTELPKLGLELNKSKCELTTIGGTPAEGQSVISTISSVLAGIKTTPPEQLTLLGSPLHEAGLGDSVRSAHTTIKLLCSRLRLLDRHTALFFLSKYVAAPRVQYLLRSSPAYRETAELSRIDSTVRLTLQEVGNVALPDEAWEQAALPQRHGGLGVRSVHALALPCYLSSLTAAAPLVLSICPSTFTGPEPAALQPATEQFMAATGIETVPERPAASLQKTWDDIASTVTANRLIAGANQIHRARLGAACMPHTAAWLQAPPIPSLGLYIDDETIRIAVALRLGLPICEPHQCKLCGCPVDRLGHHGLSCKKSAGRFPRHAALNDVIKRALASAGVPSVLEPVGLDRGDGRRPDGLTTFPFSAGRSLTWDATCVDTFAESHVVKCAVDPGAAAAAAENLKRMRYASLADRYIFTPVAVETTGVVGEAGSKLLRDIGGRISAATKDPREVSWLLQRVSIAIIRGNSAAILATAPPDAGPHHVGCVAGRASGPAEESDSAVDAEVAPPASSSKSSVFGQLIENGRKLAPSDFEVPWGEIFGAKPKH

SEQ ID NO: 8775 - protein, 1068 aa, Amphibalanus amphitrite
MACAFSEADVSGPPSLGSQSAGSCGGCTSLSARKAAILCSACGTRWHTACAGLKVKEAQTLPVWHCRNCRSDHVNLGLQLSQHTITQGTRPSPSPDGSTPTELHSRLAKLRDSCPVVKRIPKAARASVADALSSIIDTALSESSLETWSRFLSFAFVVLRAPNKGRRSSIVSAIKQQINDINANHQSCPPPARLTSMTSTQPGRETGDDSVARRVHGKCADKDIKGALRILTSTEEFTQASPEVLSVLQQKHPPVPADEVLPPAPNTSDLPILTVTEEQVQAAIRTMPPGSAAGLDGIRPMHLKQLTSAEATEPGRRLLKSITNLINMTLRGAVPDHARDSFFGATLCALRKKDGGLRPIAIGSVYRRLASRMAAHHMASIIGPELRPVQLGVGTPLGCEAAVHATREVLTSDVSVPTAVIKVDISNAFNTVRRDQMLNAVRTRCPEVYPLAYQAYSAPSPLHFGDHVIMSSCGVQQGDPLGPAFFALVVDGCARSLKSPLNLWYLDDATIAGPVETVEEDLRTLCTELPKLGLELNKSKCELTTIGGTPAEGHSVISTISSVLAGIKTTPPEQLTLLGSPLHEAGLGDSVRSAHTTIKLLCSRLRLLDRHTALFFLSKYVAAPRVQYLLRSSPAYREPAELSRIDSTVRLTLQEVGNVALTDEAWEQAALPQRHGGLGVCSVHALALPCYLSSLTAAAPLVLSICPSTFTGPEPAALQPATEQFMAATGIETVPERPAASLQKTWDDIASTVTANRLIAGANQIHRARLGAACMPHTAAWLQAPPIPSLGLYIDDETIRIAVALRLGLPICEPHQCKLCGCPVDRLGHHGLSCKKSAGRFPRHAALNDVIKRALASAGVPSVLEPVGLDRGDGRRPDGLTTFPFSTGRSLTWDATCVDTFAESHVVKCAVDPGAAAAAAENLKRMRYASLADRYIFTPVAVETTGVVGEAGSKLLRDIGGRISAATKDPREVSWLLQRVSIAIIRGNSAAILATAPPEAGPHHVGCVAGRASGPAEESDLAVDAEVAPPASSSKSSVFGQLIENGRKLAPSDFEVPWGEIFGAKPKH

SEQ ID NO: 8776 - protein, 1103 aa, Amphibalanus amphitrite
MQTDRPPPRDDHEWSFSWTVREIRQRHSVHNSKESMACAFSEADVSGPPSLGSQSAGSCGGCTSLSARKAAILCSACGTRWHTACAGLKVKEAQTLPVWHCRNCRSDHVNLGLQLSQHTITQGTRPSPSPDGSTPTELHSRLAKLRDSCPVVKRIPKAARASVADALSSIIDTALSESSLETWSRFLSFAFVVLRAPNKGRRSSIVSAIKQQINDINANHQSCPPPARLTSMTSTQPGRETGDDSVARRVHGKCADKDIKGALRILTSTEEFTQASPEVLSVLQQKHPPVPADEVLPPAPNTSDLPILTVTEEQVQAAIRTMPPGSAAGLDGMRPMHLKQLTSAEATEPGRRLLKSITNLINMTLRGAVPDHARDSFFGATLCALRKKDGGLRPIAIGSVYRRLASRMAAHHMASIIGPELRPVQLGVGTPLGCEAAVHATREVLTSDVSVPTAVIKVDISNAFNTVRRDQMLNAVRTRCPEVYPLAYQAYSAPSPLHFGDHVIMSSCGVQQGDPLGPAFFALVVDGCARSLKSPLNLWYLDDATIAGPVETVEEDLRTLCTELPKLGLELNKSKCELTTIGGTPAEGQSVISTISSVLAGIKTTPPEQLTLLGSPLHEAGLGDSVRAAHTTIKLLCSRLRLLDRHTALFFLSKYVAAPRVQYLLRSSPAYREPAELSRIDSTVRLTLQEVGNVALTDEAWEQAALPQRHGGLGVRSVHALALPCYLSSLTAAAPLVLSICPSTFTGPEPAALQPATEQFMAATGIETVPERPAASLQKTWDDIASTVTANRLIAGANQIHRARLGAACMPHTAAWLQAPPIPSLGLYIDDETIRIAVALRLGLPICEPHQCKLCGCPVDRLGHHGLSCKKSAGRFPRHAALNDVIKRALASAGVPSVLEPVGLDRGDGRRPDGLTTFPFSAGRSLTWDATCVDTFAESHVVKCAVDPGAAADAAENLKRMRYASLADRYIFTPVAVETTGVVGEAGSKLLRDIGGRISAATKDPREVSWLLQRVSIAIIRGNSAAILATAPPEAGPHHIGCVAGRASGPAEESDSAVDAEVAPPASSSKSSVFGQLIENGRKLAPSDFEVPWGEIFGAKPKH

SEQ ID NO: 8777 - protein, 1773 aa, Amphibalanus amphitrite
MSHRYPCGACSRGVGSGSVQCHQCSRWFHGRCAVLNRSNLLRLAKLHTEWRCTTCQNTPVAQPCDPQRPTSNGENSPQPPRDASTPASSPSPTPTSQPARDASPPASAPSPTPTSQPARDASPPASSPSPTPTSQPARDASPPASSPSLVPVSQPPHDARDQPSTQSPAECVACSIRSRRKTTITCGSCRQLWHTSCAKVPARKSHHLPVWHCPACLGRESAQLSDAFNGREVPDTGVVEGLATLRRSTKLISRIPKGVRPLVADALCSALEDALKLRTICAWWTFLSFAFFALRTPGKGDNNVSAAASIRQQLSSPNQTMTPNVLPEPPTNDSAREHQKPATDALARRILGKCADGDIRAALRLLTSDDAVAEPDAEVIAELMLKHPAAPKDELLPPPPAPSDPGPLTVTPEEVEAAINSMPPGSSAGLDGIRPLHLRQLISREAAESGRRLLHSLTVLTNLVLAGEVPDCARDALFSASLCALRKKSGGLRPIAVGSVYRRLPSRIGARFVADSLGAELRPVQLGVGTPLGCEAAVHATRSFIEASRQSAAPHVLVKLDVSNAFNTVRRDVFLTRIRERCPEVYYLAYQAYSSPSPLIIGGQTIASACGVQQGDPLGPAAFAIAIDSCARAVSAPLNIWYLDDATLAGPASAVAADIATLPTALAAAGLSLNASKCEVAFIGAEDSDHRHAAIGAICSALPDVKETELTNLSLLGSPLTDGSIGAAGEAASAMVQRLCTRLRELDSHTAVFFLAHHVSAPRLTYLLRSAPAFKAPHVLQATDEMVRSTLEAVCNVAINPAAWEQASLPVKFGGLGIRSVEALALPAYIASVNAARPLIRSICPSVTDELSDTLETAVSAFLHRTGVDRQQLPDGELVSSQRAWDTVACTVVQSRLLVPANQIDRARLIAAGQPHTAAWIQAVPVPSLGLHLDDETVRVAVALRLGAPVCEPHRCRLCARPVTPLGHHGLSCQKSAGRHSRHAHLNDVVRRALSGAGFPAILEPVGLDRGDGRRPDGITVFPFREGKCLTWDATCVDTFADHIAVESALKPGAAARQAEERKRQRYADLARRYSFVPVALETTGVYGPAAAAFVQDLGRRLATCTGERRETEWLRQRLSVAIARGNAASVLATAPQSGIEQAGQTRRAASTAGSNPGTTRRWPRSHAVTAATPSASCAPEVETSGKRSTRATPPKADSPTEINLGNSCYRRGLVNLGNTCFMNTVLQALFHSDQLRGEVLAARPSPSRPHLAALQRVFAFLAFSERPVYSPGEFQRTALPPCFERGRQHDCSEFLRCFLDALHEEERSPAASPAAPVAVPPPVPPAAAAARTRDDSSVPGAVAMERPRSRRRHRSCDTARAGGRSPPVQLSDLASDDVVMAEPAGDRAERTAAEGEPSESPDTGGTQQTDPDGQAQGEVVREHGTGDAGAEEPPAGLVRRLLTGRAETTFTCLTCGGASRHENSVTDLHLALPESVTRSLTAAAAGAGGAETAPAFGPAPRPVGWRGTPPTDNQTEIELTVSQLLLDYLTPERLCGDNQYYCTKCTGLRDAERQLRLLSPPANLVVSLMRFAVDRRTGARRKVLTPVELTEWLTVPLATGPPAQYRLYAVIVHAGHSLDAGHYFSFCRASGGGGTDGMDDTGWWRLDDTSAVPVPAATALGRPRRSTEAAYTLLYRLTDAAVAGAAGGLSALAALPGPLRAAVERDNAVFRRERQSRTAGALPMVHDGRPPPGAGCGGDSGPGVPRMRQPTTRRSGPSRRTATTASTARRRP

SEQ ID NO: 8778 - protein, 1799 aa, Amphibalanus amphitrite
MTRRLTSKHVTYPCGACSRGVGSGSVQCHQCSRWFHGRCAALNRSNLLRLAKLHTKWRCTTCQNTPVAQPCDPQRPTSNGENSPQPPRDASTPASSPSPTPTSQPARDASPPASSPSPTPTSQPAQDASRPASSPSPTPTSQPARDASPPASSPSPTPTSQPARDASPPASSPSLVPASQPPHDARDQPSTQSPAECVACSIRSRRKTTITCGSCRQLWHTSCAKVPARKSHHLPVWHCPACLGRESAQLSDAFNGREVPDTGVVEGLATLRRSTKLISRIPKGVRPLVADALCSALEDALKLRTICAWWTFLSFAFFALRTPGKGDSNVSAAASIRQQLSSPNQTMTPNLLPEPPTNDSAREHHKPATDALARRILGKCADGDIRAALRLLTSDDTVAEPDAEVIAELMLKHPAAPKDELLPPPPAPSDPGPLTATPEEVEAAINSMPPGSSAGLDGIRPLHLRQLISREAAESGRRLLHSLTVLTNLVLAGEVPDCARDALFSASLCALRKKSGGLRPIAVGSVYRRLPSRIGARFVAASLGAELRPVQLGVGTPLGCEAAVHATRSFIEASRQSAAPHVLVKLDVSNAFNTVRRDVFLTRIRERCPEVYYLAYQAYSSPSPLIIGGQTIASACGVQQGDPLGPAAFAIAIDSCARAASAPLNIWYLDDATLAGPASAVAADIATLPTALAAAGLSLNAAKCEVAFIGAEDSDQRDAAISAICSALPDVKETELTNLSLLGSPLTDGSIGAAGEAASAMVQRLCTRLRELDSHTAVFFLAHHVSAPRLTYLLRSAPTFKAPHVLQATDEMVRSTLEAVCNVAINPAAWEQASLPVKFGGLGIRSVEALALPAYIASVNAARPLIRSICPSVTDELSDTLETAVSAFLHRTGVDRQQLPDGELVSSQRAWDTVACTVVQSRLLVPANQIDRARLIAAGQPHTAAWIQAVPVPSLGLHLDDETVRVAVALRLGAPVCEPHRCRLCARPVTPLGHHGLSCQKSAGRHSRHAHLNDVVRRALSGAGFPAILEPVGLDRGDGRRPDGITVFPFREGKCLTWDATCVDTFADHIAVESALKPGAAARQAEERKRQRYADLARRYSFVPVALETTGVYGPAAAAFVQDLGRRLATCTGERRETEWLRQRLSVAIARGNAASVLATAPQSGIEQAGQTRRAASTAGSNPGTTRRWPRSHAVTAATPSASCAPEVETSGKRSTRATPPKADSPTEINLGNSCYRRGLVNLGNTCYMNTVLQALFHSDQLRGEVLAARPSPSRPRLAALQRVFAFLAFSERPVYSPGEFQRTALPPCFERGRQHDCSEFLRCFLDALHEEERSPAASPAAPVAVSPPVPPAAAAARARDDSSVPGAAAMERPRSRRRHRSCDTARAGGRSPLVQLSDLASDDVVMADPAGDRAERTAAEGEPTESPDTGGTQQTDPDGQAQGEVVREHGTGDAGAEEPPAGLVRRLLTGRAETTFTCLTCGGASRHENSVTDLHLALPESVTRSLTAAAAGAGGAETAPAFGPAPRPVGWRGTPPTDNQTEIELTVSQLLLDYLTPERLCGDNQYYCTKCTGLRDAERQLRLLSPPANLVVSLMRFAVDRRTGARRKVLTPVELTEWLTVPLATGPPAQYRLYAVIVHAGHSLDAGHYFSFCRASGGGGIEGMDDTGWWRLDDTSAVPVPAATALGRPRRSTEAAYTLLYRLTDAAVAVAAGGLSALAALPGPLRAAVERDNAVFRRERQSRTAGALPMVHDGRPPPGAGCGGDSGPGVPRMRQPTTRRSGPSRRTATTASTARRRP

SEQ ID NO: 8779 - protein, 1792 aa, Amphibalanus amphitrite
MSHRYPCGACSRGVGSGSVQCHQCSRWFHGRCAVLNRSNLLRLAKLHTEWRCTTCQNTPVAKPCDPQRPTSNGENSPQPPRDASTPASWPSPTPTSQPARDASPPASSPSPTPTSQPARDASPPASSPSPTPTSQPARDASPPASSPSPTPTSQPARDASPPASSPSLVPVSQPPHDARDQPSTQSPAECVACSIRSRRKTIITCGSCRQLWHTSCAKVPARKSHHLPVWHCPACLGRESAQLSDAFNGREVPDTGVVEGLATLRRSTKLISRIPKGVRPLVADALCSALEDALKLRTICAWWTFLSFAFFALRTPGKGDNNVSAAASIRQQLSSPNQTMTPNLLPEPPTNDSAREHQKPATDALARRILGKCADGDIRAALRLLTSDDTVAEPDAEVIAELMLKHPAAPKDELLPPPPAPSDPGPLTVTPEEVEAAINSMPPGSSAGLDGIRPLHLRQLISREAAESGRRLLHSLTVLTNLVLAGEVPDCARDALFSASLCALRKKSGGLRPIAVGSVYRRLPSRIGARFVADSLGAELRPVQLGVGTPLGCEAAVHATRSFIEASRQSAAPHVLVKLDVSNAFNTVRRDVFLTRIRERCPEVYYLAYQAYSSPSPLIIGGQTIASACGVQQGDPLGPAAFAIAIDSCARAVSAPLNIWYLDDATLAGPASAVAADIATLPTALAAAGLSLNASKCEVAFIGAEDSDHRHAAIGAICSALPDVKETELTNLSLLGSPLTDGSIGAAGEAASAMVQRLCTRLRELDSHTAVFFLAHHVSAPRLTYLLRPAPAYKAPHVLQATDEMVRSTLEAVCNVAINPAAWEQASLPVKFGGLGIRSVEALALPAYIASVNAARPLIRSICPSVTDELSDTLETAVSAFLHRTGVDRQQLPDGELVSSQRAWDTVACTVVQSRLLVPANQIDRARLIAAGQPHTAAWIQAVPVPSLGLHLDDETVRVAVALRLGAPVCEPHRCRLCARPVTPLGHHGLSCQKSAGRHSRHAHLNDVVRRALSGAGFPAILEPVGLDRGDGRRPDGITVFPFREGKCLTWDATCVDTFADHIAVESALKPGAAARQAEERKRQRYADLARRYSFVPVALETTGVYGPAAAAFVQDLGRRLATCTGERRETEWLRQRLSVAIARGNAASVLATAPQSGIEQAGQTRRAASTAGSNPGTTRRWPRSHAVTAATPSASCAPEVEISGKRSTRATPPKADSPTEINLGNSCYRRGLVNLGNTCFMNTVLQALFHSDQLRGEVLAARPSPSRPHLAALQRVFAFLAFSERPVYSPGEFQRTALPPCFERGRQHDCSEFLRCFLDALHEEERSPAASPAAPVAVPPPVPPAAATARNRDDSSVPGAAAMERPRSRRRHRSCDTARAGGRSPPVQLSDLASDDVVMAEPAGDRAERTAAEGEPSESPDTGGTQQTDPDGQAQGEVVREHGTGDAGAEEPPAGLVRRLLTGRAETTFTCLTCGGASRHENSVTDLHLALPESVTRSLTAAAAGAGGAETAPAFGPAPRPVGWRGTPPTDNQTEIELTVSQLLLDYLTPERLCGDNQYYCTKCTGLRDAERQLRLLSPPANLVVSLMRFAVDRRTGARRKVLTPVELTEWLTVPLATGPPAQYRLYAVIVHAGHSLDAGHYFSFCRASGGGGIDGMDDTGWWRLDDTSAVPVPAATALGRPRRSTEAAYTLLYRLTDAAVAGAAGGLSALAALPGPLRAAVERDNAVFRRERQSRTAGALPMVHDGRPPPGAGCGGDSGPGVPRMRQPTTRRSGPSRRTATTASTARRRP

SEQ ID NO: 8780 - protein, 1754 aa, Amphibalanus amphitrite
MSHRYPCGACSRGVGSGSVQCHQCSRWFHGRCAVLNRSNLLRLAKLHTEWRCTTCQNTPVAQPCDPQRPTSNGENSPQPPRDASTPASSPSPTPTSQPARDASPPASSPSPTPTSQPARDASPPASSPSLVPVSQPPHDARDQPSTQSPAECVACSIRSRRKTTITCGSCRQLWHTSCAKVPARKSHHLPVWHCPACLGRESAQLSDAFNGREVPDTGVVEGLATLRRSTKLISRIPKGVRPLVADALCSALEDALKLRTICAWWTFLSFAFFALRTPGKGDNNVSAAASIRQQLSSPNQTMTPNLLPEPPTNDSAREHQKPATDALARRILGKCADGDIRAALRLLTSDDTVAEPDAEVIAELMLKHPAAPKDELLPPPPAPSDPGPLTVTPEEVEAAINSMPPGSSAGLDGIRPLHLRQLISREAAESGRRLLHSLTVLTNLVLAGEVPDCARDALFSASLCALRKKSGGLRPIAVGSVYRRLPSRIGARFVADSLGAELRPVQLGVGTPLGCEAAVHATRSFIEASRQSAAPHVLVKLDVSNAFNTVRRDVFLTRIRERCPEVYYLAYQAYSSPSPLIIGGQTIASACGVQQGDPLGPAAFAIAIDSCARAVSAPLNIWYLDDATLAGPASAVAADIATLPTALAAAGLSLNASKCEVAFIGAEDSDHRHAAIGAICSALPDVKETELTNLSLLGSPLTDGSIGAAGEAASAMVQRLCTRLRELDSHTAVFFLAHHVSAPRLTYLLRSAPAFKAPHVLQATDEMVRSTLEAVCNVAINPAAWEQASLPVKFGGLGIRSVEALALPAYIASVNAARPLIRSICPSVTDELSDTLETAVSAFLHRTGVDRQQLPDGELVSSQRAWDTVACTVVQSRLLVPANQIDRARLIAAGQPHTAAWIQAVPVPSLGLHLDDETVRVAVALRLGAPVCEPHRCRLCARPVTPLGHHGLSCQKSAGRHLRHAHLNDVVRRALSGAGFPAILEPVGLDRGDGRRPDGITVFPFREGKCLTWDATCVDTFADHIAVESALKPGAAARQAEERKRQRYADLARRYSFVPVALETTGVYGPAAAAFVQDLGRRLATCTGERRETEWLRQRLSVAIARGNAASVLATAPQSGIEQAGQTRRAASTAGSNPGTTRRWPRSHAVTAATPSASCAPEVETSGKRSTRATPPKADSPTEINLGNSCYRRGLVNLGNTCFMNTVLQALFHSDQLRGEVLAARPSPSRPHLAALQRVFAFLAFSERPVYSPGEFQRTALPPCFERGRQHDCSEFLRCFLDALHEEERSPAASPAAPVAVPPPVPPAAAAARTRDDSSVPGAAAMERPRSRRRHRSCDTARAGGRSPPVQLSDLASDDVAMAEPAGDRAERTAAEGEPTESPDTGGTQQTDPDGQAQGEVVREHGTGDAGAEEPPAGLVRRLLTGRAETTFTCLTCGGASRHENSVTDLHLALPESVTRSLTAAAAGARGAETAPAFGPAPRPVGWRGTPPTDNQTEVELTVSQLLLDYLTPERLCGDNQYYCTKCTGLRDAERQLRLLSPPANLVVSLMRFAVDRRTGARRKVLTPVELTEWLTVPLATGPPAQYRLYAVIVHAGHSLDAGHYFSFCRASGGGGIDGMDDTGWWRLDDTSAVPVPAATALGRPRRSTEAAYTLLYRLTDAAVAGAAGGLSALAALPGPLRAAVEQDNAVFRRERQSRTAGALPMVHDGRPPPGAGCGGDSGPGVPRMRQPTTRRSGPSRRTATTASTARRRP

SEQ ID NO: 8781 - protein, 1754 aa, Amphibalanus amphitrite
MSHRYPCGACSRGVGSGSVQCHQCSRWFHGRCAVLNRSNLVRLAKLHTEWRCTTCQNTPVAQPCDPQRPTSNGENSPQPPRDASTPASSPSPTPTSQPARDASPPASSPSPTPTSQPARDASPPASSPSLVPVSQPPHDARDQPSTQSPAECVACSIRSRRKTTITCGSCRQLWHTSCAKVPARKSHHLPVWHCPACLGRESAQLSDAFNGREVPDTGVVEGLATLRRSTKLISRIPKGVRPLVADALCSALEDALKLRTICAWWTFLSFAFFALRTPGKGDNNVSAAASIRQQLSSPNQTMTPNLLPEPPTNDSAREHQKPATDALARRILGKCADGDIRAALRLLTSDDTVAEPDAEVIAELMLKHPAAPKDELLPPPPAPSDPGPLTVTPEEVEAAINSMPPGSSAGLDGIRPLHLRQLISREAAESGRRLLHSLTVLTNLVLAGEVPDCARDALFSASLCALRKKSGGLRPIAVGSVYRRLPSRIGARFVADSLGAELRPVQLGVGTPLGCEAAVHATRSFIEASRQSAAPHVLVKLDVSNAFNTVRRDVFLTRIRERCPEVYYLAYQAYSSPSPLIIGGQTIASACGVQQGDPLGPAAFAIAIDSCARAVSAPLNIWYLDDATLAGPASAVAADIATLPTALAAAGLSLNASKCEVAFIGAEDSDHRHAAIGAICSALPDVKETELTNLSLLGSPLTDGSIGAAGEAASAMVQRLCTRLRELDSHTAVFFLAHHVSAPRLTYLLRSAPAFKAPHVLQATDETVRSTLEAVCNVAINPAAWEQASLPVKFGGLGIRSVEALALPAYIASVNAARPLIRSICPSVTDELSDTLETAVSAFLHRTGVDRQQLPDGELVSSQRAWDTVACTVVQSRLLVPANQIDRARLIAAGQPHTAAWIQAVPVPSLGLHLDDETVRVAVALRLGAPVCEPHRCRLCARPVTPLGHHGLSCQKSAGRHSRHAHLNDVVRRALSGAGFPAILEPVGLDRGDGRRPDGITVFPFREGKCLTWDATCVDTFADHIAVESALKPGAAARQAEERKRQRYADLARRYSFVPVALETTGVYGPAAAAFVQDLGRRLATCTGERRETEWLRQRLSVAIARGNAASVLATAPQSGIEQAGQTRRAASNAGNNPGTTRRWPRSHAVTAATPSASCAPEVETSGKRSTRATPPKADSPTEINLGNSCYRRGLVNLGNTCFMNTVLQALFHSDQLRGEVLAARPSPSRPHLAALQRVFAFLAFSERPVYSPGEFQRTALPPCFERGRQHDCSEFLRCFLDALHEEERSPAASPAAPVAVPPPVPPAAAAACTRDDSSVPGAAAMERPRSRRRHRSCDTARAGGRSPPVQLSDLASDDVVMAEPAGDRAERTAAEGEPTESPDTGGTQQTDPDGQAQGEVVREHGTGDAGAEEPPAGLVRRLLTGRAETTFTCLTCGGASRHENSVTDLHLALPESVTRSLTAAAAGAGGAETAPAFGPAPRPVGWRGTPPTDNQTEIELTVSQLLLDYLTPERLCGDNQYYCTKCTGLRDAERQLRLLSPPANLVVSLMRFAVDRRTGARRKVLTPVELTEWLTVPLATGPPAQYRLYAVIVHAGHSLDAGHYFSFCRASGGGGIDGMDDTGWWRLDDTSAVPVPAATALGRPRRSTEAAYTLLYRLTDAAVAGAAGGLSALAALPGPLRAAVERDNAVFRRERQSRTAGALPMVHDGRPPPGAGCGGDSGPGVPRMRQPTTRRSGPSRRTATTASTARRRP

SEQ ID NO: 8782 - protein, 1897 aa, Nephila pilipes
MPLNDSPLIMGTDVTISPCNSENTTPTPVALRTRSQMEQSYTDAAKIGLCKLCQASFTSTLLLKNHLTYHKPDKKRKKALQAINDLSSSSMETPVTCTKKPLLQVNILKKFSPPGSAVTGSSPLSNPSSILTEVADVIQDMVETTCHSSPSPKIPIDKSSPSVTPVHVSQCPSPMGSPDAYLLRLGSPIANDCSGKTSPTILLHSNLILQQLPTILSPIPSPPPPSPTILEFILDKQDYLSDCSPEAPHTYVSKIPLLQNPISQDHSPLTFSTSQEKSPIHYTPQVISPITFTAMQDRPPKSSSSSQDKPSSPLASSMQIKSSAPPPCSQNIPKTTSSGLSFLSYADAAKSGRCKICNASFPPAKLLTHLTSHRPCTKRYKCIKAWTLLFNSHSTNSIKPQPSSKQPQSQLETTFREKFPDLAVFKNGSSSSDSSSSSPEKFELLKQLNSPPSGPPTIPAFTKPLYSKIVKKGLFRCRFCEAPFVSKIGLERHLLKVHDHPTIKPTTSLFPENNTLPTCRTCFRTVEDGLSLADHCRLYHNLEISTDRSLPSTAIVKISPSITNPPSVRHVTESKPSKNTATTLSVGLSFSSQSLPGPQKPLTFLNSNLKNGKKIFSNKHTLPSTTPHSDSEDFVTKKTPSTTRQLTVQPSTSTNLPASPRKCPHCPFIALKKIGLRLHLFKIHNIKAPSKSNTDDHPPSTTIEQPPSCPVCGISTKTAKGLRVHMQQAHKISVSKPGKPISPVPAPSPPVSTSPPAILAPAPSRSPATTSPPHSSIVVPRAEDLHLKGTSVSLSGSTLKYLFPLEETLICPVKNCVHSFHTQKWYTTNSSLKKHLLIYHRIQLQTVEHWCSICKSIIKTRPAIHPCIQSSLTAPPSKASPSKFRCSSCNFNATTQIALFLHQRMHKKESLASSAVPLKSFPTPKERKSQKKRKLAPLLQGSPGNHPIAPPLIPFTSIPQPDPADASNSSPVELIQLEEPLLASFVEPLGVLFEDGIDNKMALLENLLHEITSIIQGKFNLSSENFNNRPKRNNPNRLPRSSESQDAQAIQKAYNWNRRKCIRNLINPSNSRCSLKPDTLFSFFSNIWNNSDAHSIPDFGSPPDLPPVVEHLTEELVKDCLQAAENTAPGPDGIAYKHWREVDPTGKILCMIFNLCLQLRRIPDSWKFSNTILIHKKGDTSDPSNWRPISLSNTIYKIFTKCLTRKLGDWCSFHQRLSPNQKGFLPFDGVLEHNFIIAQHLESASRLKKEALSCWLDLSNAFGSIHHDILLAALSATGADSDFVALVHDIYTNSSSSILCEEGTTAKIPCNRGVKQGCPLSGLLFNIAIDSLLRTVQGDAEHKKILAFADDLVLLADTPEELQNLLDLTTSLLEALNLEVNPHKCASLHLSGRSPVGSRPTAFQLYGTTLAYLKDGDQYRYLGKPVGFCLPKDYSNINDALEIAHLISTSKLAPWQRLDALKTFFFPSLCHAMRMAQFGKSDWSSVDKAILKEVKEILGLPSSASNQYVWGSRDQGCCGVPSAAVDSDLYLMDSAFKLLNSQDEDVATLALAQLQRTVRHRLQRNPTDGDLASFLSGCMDLDFKTTSNARQNTWTLARKASNRMGVTWSFSDGVPTIQKDDVVLKPSMKRRVLKNLHKSIRIHQAQLLLNNKSQGKAMDCVRLSKASSHFLTNGKFTRFADWRFVHKARLNLVALNAQPWKAKQDRMCRKCGYPDETLPHVVNHCSSYSAAWQKRHNAVVDRIKKAVTYKGTLISENQECGLAGLRPDLVVHLGGKIYIIDVTVPFENQSQAFERARAIKIAKYSPLIPIFHAKGFKEVHIIPICVGALGSWDPGNDRFLKKVCSGGYLGLLRKLCISDCIRWSRDIYVTHLTGKCQYEQSDSTAHLQAGDESPTEE

SEQ ID NO: 8783 - protein, 1157 aa, Carybdea marsupialis
MVQRHRVASVTWRCPRCSKTFANVAEVAGHLPHYKGSSPREASEPGVYCRRKRMRNESGEANEGMNGKRMRNECTGVIGTPGPSGPTIQASEVNGNVGHLLFVVDGCGRSFTSATGLGQHMRHQHPIVHNERFAGVKRASWKDDELRRVAHFEIECGDLVNVNQYIASKLPGRTGEAVKKVRKRHDYLEILEDVRRRATDGRANLVSPPNKRYRATIEPLNANELMEQIEDGDEALFRSHPEISVPEFEGATLEAKSFRTTALLAVEGKISVDTLFREFSDRYLKGAREESMTGGRGRGGGRSGNRQEPAETKAKRRVRKERPAEKRFRLAQAMFNRSEKDCLDAILSVNGFEREEVSLTSTEKDALLSEYKGVFESDPLEDREGFVPSVTKLGTELTCPISPEEVSRTLNSFDENSAPGPDLIKYSTLKGVDNHVLAVLFNTFLGCSRIASCLKPCRTTLVPKSLGPGLPGKKFRPITIASAILRLYTKIIVNRLNACEVLSGAQRGFVRRPGCFENIYSVRALIKAAREEKRSIAILAIDLAKAFDSVQHTSVQRALNRFGASDHLCRVVDDLYTDVDTRLSVGRTQLGHIIMRNGVKQGDPLSPFLFNLVIDEFLTTVNSDPTVTTGIGFKYGGVKVAAIGYADDLLLIAETRHGAQLLMDGLTTFCRNRHLRINPSKCQSLCLEWQGKAKSHKVLGSIVSVLRDIEQETSVGEGSVRVPAVSVTGSLSYLGTQIRPDGNCEVKESEFASSLAKLRRAPLKGTQKIRLAKLLVQRQFYHVSVADLNMKRIERYDRALRSFTKKVLHLPKSTATSFLYTKTRDGGLGLPCIFEKVMKFLRGQLRKLQTSTDLWIIALAQTQLVQKLQRRIEKFKDRNWQQEFSRTWQGHGADSFKANSVANFWLPGQTKFFKGRVYNQAVQLRTQLFPTRRTQYNTDPATNMCRHGCPSQETIQHVLQSCPFVQGARIKRHDKVVDSLTEYVKKTDFKFLKETYLTKGTQRLKPDLIIVKEGVAYVVDVTVAYDHPEVFKRAAEEKVRKYSVLTPSDIPGLGEIKAVEVIPIVLGARGGWRRANSKLDKVLKLPRSFAKINIIRTIKESIIMLRLHSSLQRRSSRNGNTNNTQSRINSMNGMNVNGINGMNVGPASNAAGVNGGA

SEQ ID NO: 8784 - protein, 855 aa, Diaphorina citri
MSNFTKFLVDANNQLPGPAHPSVTYYRKRKEKKAVISNGSYRQSSNPQRSSKRQRDKRNEKYQYDLTQWQYANQRRKVAQTILNSKKPVRLNVDLPTIEHHFRNIYEQSNDNIRDYYEPCETPQESTTIALDDILFAIKKIAIDTSPGPDKIIMRTIRQVKCGEAIMNIGKIMLLWNYVPKSFRTARSILIYKGKGDHEDLNNWRPITIFSLLRRIIEKSLDNKLRMQTQFSQCQRGFVAGLAGTHINASIVDECLKVSKRDKKNCCIVMLDLAKAFDKVGHIHIRHTLESLPVPTDLKNLVVSLATSNSTKIEVNKKSSNSINMLCGVAQGLPLSPTVFNLCQDFILKLITDPSVAAEHGFELAPDLDNLTALAFADDTAVIAKDENSAIVLVESLQSAFTEVGMVINPTKSVAINVRQGKLHSESLSLADGSTIRSISENENIRYLGINFSNGIVFDKKQFLIELESDFRNLVTSPLLRGDQKINILDQYIFPKLVYPLQTTPVDILEHNFLDSVDSIIRQGVREIIGLPADTPIPVYYARRNVRGLGIVRVTWEASLQHLNICQTLLKTPDPHLHVARDCESEIQQCKTHLGITNQETVRAARTSLRDQEFVKWSGMVQRGIGIQWYKSFPLSNQWVSNKQGLTSSDWTNAIKLSMNSMANRGTGGRSRGNRLCRIPICSENNLVETIPHIRGVCPKSELLRNSVHHKIRTATADLFRQKGWEVHEEVHCEALDANGAIQNRRADIIAINRRTNTGMIIDPTLRWESNVEDQDTKIDSEKKDIYEPTIPYFKDKYGIPNWSVHGLWFGVRGTASPLLVKFFRDQNLKRNDLKELCLTVLRDTLHIIHRHLYT

SEQ ID NO: 8785 - protein, 1281 aa, Globodera pallida
MVTTRKRECTRATAAAQDVRGQRGEEEEERIDVNAAEQSPDIQIIVGELQREGGEGQGGEADENTGNLVLEDGDAVAPIDYTLGVPLLDTIGESFHCRLCAPIPKIFKRHGDLSKHLKRYHPGQRIVFKCNSCQAIFDTVKKCKGHQQKTPACRDASAANEERPQMPAAATNAAVVHRSFFHQRHPNPQPFQRTRPPTPPALPTNRARISVPRRPPPPLGSSSSSIAELSSDTSIVGPASDNTSSEPSFNRRSISTQTARPTVGPAINEHRARQLPSEIPDSPILRRISSLSAEFIELGQRPSQLTASAQRPPLPMNASPILAPVPRFIITPPKTDAQKRWLEVLNADITAVELEACLLELVKDVRAKAKIVLKDPPRRQQGGNNQNRVQNAHGRRRNALNAAEEPGFDAAEASRIQKLYRQCRPRAYREITEQTSPFCQIDGNDLHEHFTRVFGPSAPMPAETPEEIPGQEPPMDNNPLAAPFSPKEVWERLKRCSNTAPGPDGIRYAVWKKYDPGAHVLSAVFNVAQRLKHVPSSWNKSITVLLHKKGDRQEVSNWRPISLSDTIGKLHSSVLANRLATWAIANDRISTSQKGFMPVDGCAEHNFVLQSIIQDAKRAKRHCSVAWLDLTNAFGSIPHQTIFTALRWSGLSETSISIIRRLYASSYTQIRHSNGLTPEILIRAGVKQGCPLSPIIFNLGLEPIIRAIRCQGVGYKLHGSQTSVLAYADDLALVAESAAELQRMLDVTSKVATWEGLSFNARKCATLDLNGKRKDALNTEFSVQNAHPPVLTIEQFYDHLGVPTGYGVAQSANKVLERMNNHVQKINTSLLAPWQKFDAVNTFVLPCIGFHLKNGVVQKTPLNALDKKIRDFGKKWLNLPQRASVEPLYTSHAMGGMGLTPLNLLADISQLVHAYRLITSRDLSSLSMDLLKTVVYKRIRQAPRPDQISDYLNGSMKGVFRQFESTDTPSAWTRLRQATARLSTKLRIGWKWSAVENRLLLQLNNEQLNPKTAEYCLRAAIREFYRLRLLAKPDQGKVFAVTSAATASNHFMQAGNFTRFADWRFIHRARLDCVPLNATRRFGHGDKRCRRCHDGQLETLPHVLCHCWPHLGKGITRRHNAILDRLVKAFKPPPSTITRVNQTVPGFNEAIRPDLLAVDEEKKTVLIIDVAMPFENRYEAFERCRQGKRQKYEALADHYRLQGFEVLLEAFIVGPLGGWDPHNEFVLNQLKIGQHYRRLMRKLMVSDAIRWSRDIYIEHITGVPQFNDDGNVNRNQQRRND

SEQ ID NO: 8786 - protein, 1300 aa, Rotylenchulus reniformis
MLTNKNRGGRRVAATQRGGQRTSNANVNREREQRESVNREQGQREQRNERENSESSESGEDQQRGNRVDYILGVPLLDTIGEEFFCRICAPIPKPYKRHGDLSKHLKRYHPEQQLKFRCNLCGLVFEEVKKCKSHQRTNARCKAAVAIREEAPRLPVPSAGAVPVQRCFLKSKGRIGQPVQPAAGPSSSAVRAGPSGLAPLPPRRPPPKTRQRPNPPSSSSSDSPIPPKNRPQTRKIISSSSDSSDIGDIRRISGTVPPPLEELLSDTGPSRPATPAQAILPVGRRSSFVPDSEDGGHSTSRPITPPVPPLHLSSSSQSAQGEREQIPSRSPSPASNRSSSVGEVAHPQLATTDRSPPKLAYQKAWAKKFSDCSTADELEGLLEELITEVREKAKIALPPPPRPRRGNPRPQNTHGRRRNAMNAVGEVAFDPAAAARIQKLYRLSKKRAYREITEQSSPFCQIDGNDLHEHFLRVFGPSPRIDPNIPVEVPPLDPHPTNDPLAPKFSPKEVWERLKRCSNTAPGPDAVRYAVWKKFDPNAHILSSIFNAVQRIKHIPVNWTKSITVLLHKKGDRSEVTNWRPIALSNTIGKLHSSVLANRLATWAIQHQRVSPSQKGFMPVDGCAEHNFVLQSIIQDARRSKKHCSIAWLDLTNAFGSIPHETIFTALRWAGLAETAIDTIRCLYASNSTSIRHSNGLTPEIPIRAGVKQGCPLSPIIFNLALEPILRAIDRLGTGYRLQGQKIPVLAYADDLVLIAESNEDLQKMLDITSRIADWAGLSFNARKCATLDIDGRRKEALKTRFLVQNGHPPVLSIDEFYEHLGVPTGYSIIRSPEKVLVQMNDHVEKIDSSLLAPWQKFDAVNTFVLPCISFHLKNGVVMKGPLLKLDKKIVRCGKKWLNLPQRASIDPLYLSNAMGGMGLTPLNLLADVSQLVHAYRLIYSRDLSALSMDLLKTAVAARIRRDPRPSELAHYLNGTKKQDLSSYFGKDVPSAWSRLRQATTRIGAKLNITWKWSTAENRLLLQLNNSPLNPKTAEFCLRAAIRNFYHLRLLSKPDQGKVHAVTSVMAASNHFMRAGDFTRFADWRFIHRARLDCVPLNATRRFGTGDKRCRRCHDGQMETLPHVLCHCFVHFGKGIVRRHNAILDRLVKAYRPPASTTVRINLTVPGFPDAVRPDIFALDEEKKSAVIVDVSMPFENRYEGFERCRQEKRRKYERLAEHFRQQGFTVFLDAFLVGPLGGWDPHNEFVLNQMGIGHRYRQLMRKLMVSDAIRWSRDIYVEHLTGIRQYPDAENPREPEEH

SEQ ID NO: 8787 - protein, 1223 aa, Hoplolaimus galeatus
MVNTRRAAKRVAAVHFREESVEIGEEERSRRAEEGGQIDDDRGRNGSPEVDGANATDEDGGGTEQQSENGSDGSAAEQVDYVLGVPLLDTIGCQFHCRLCSPIPKVFKRHGDLSKHLKKYHPGQVIVFQCNSCGRVFDRVKLCKAHQRKEVQFRAAVAVPEDVPQCPNAGAGAARVKKSFFHPKARHMATPAEPLRASPPTPPLVASCSRGTRNFHRTDSLPSDGDEAASSTSVAKSARVLEHAAARVCDRPSRVGEQLGRALPNQAVSPGAGQPIPNQREHQNRWVQVFAGIKRLEEMESLLSELITEVREKAQIKSKTPSRGRRTTLARQATAHGRWWNAMNAESEEPFDPAEAARIQRLYRRCRPRAYREITEQSSPFCQINPEIIIEHFQEVFGPSAPVDQTIPEEVPAQHYRANDDPLMPMFSPKEVWERLKRYSNTAPGPDAVRYAVWKKFDPGAHILSSVFATVQRLERIPSSWTKSTTLLLHKKGDRQDISNWRPISLSSTIGKLYSSVIANRLAKWAISSNRISASQKGLVDGCAEHNFVLQSIIQDARRSRKHCSVAWLDLTNAFGSIPHQMIFLALRWAGLPEPAVAVIRRLYEANTTCVRHSGGLTPEIQIQASVKQGCPLSPIIFNLSIEPILRAVELLGIGYVLHGRRTSVLAYADDLVLLAESADGPQEMLDVISRVATWSGLSFNARKCSTLDIDGKKREALGTQFLIQGASPPALSIEQYYEQLGVPTGYAVARSADKVLERMADHLDKIDGSALAPWQKFDAVNTFVLPCVSFHLKNGVVPKAPLNSLDRKVKELGKKWLNLPQRASAEPLFLPHSMGGMGLTPLNLLADVSQVVHAFRLFSSEGLVDTTIDLLKTVVTKRIRQSPNPGQLVDYLNGSMSGLFRQYESTDITSMWTRLRQATARLSTKVDVSWMWSFAEERMLLQLNKTTLNPKTAEFCLSGAVREFYMRRLLAKPDQGKVFEVTSVMPASNHFMRAGDFTRFADWRFVHRARLDCVPLNATRRFGEGDPRCRRCHDGQRETLPHVLCHCWPHLGKGIMLRHNAILDRLVKAYKPPPTTTVRVDQTVPGFPDALRPDLVAVDDTLKSVKIVDVSMPFENRYRAFEAKRQEKRRKYEAIAEHYRRKGYAVFLDAFLVGPLGGWDPHNEFVLNVLGVGHRYRQLLRKLMVSDAIRWSRDIYVEHITGVQQYAEKNLGVIDGMEEVVT

SEQ ID NO: 8788 - protein, 879 aa, Heterodera schachtii
MNAAQEPAYDPVAASRIQKLYRQSRPRAYREITEQSSPFCQIEGNDLFDHFSRVFEENAPIDEEMPPEIPRHGPPTERNPLGPQFTQKEVWERLKRCSNTAPGPDGIRYSVWKKYDQGAHILTTIFNCVKRSHHIPRSWTKSVTVLLHKKGDRNEVSNWRPIALSNTIGKLYSSVLANRLAMWSVAFNRVSSSQKGFMPVDGCAEHNFVLQSIIQDAKRAKKRCSIAWLDLTNAFGSIPHQTIFTALKWSGLSDQSINVIRQLYATNSTQIRHSNGLTPEIPIHAGVKQGCPLSPIIFNLGIEPILRTIGQLRTGYKLQEKRIDVLAYADDLVLVAESAEELQRMLDATSTIATWAGLSFNARKCATLDIDGRRKTALNTEFFVQNAHPPILTIDQFYDHLGVPTGYGSAQSATKILEKMNDHVQKIDESLLTPWQKFDALNTFVLPCIGFHLKNGVVQKNPLNALDKKIRNYGKKWLNLPQRASAEPLYLSHAMGGMGLTPLNLLADISQIVHAYRLITSRDLSSLSMDLIKTVVNKRIRQQPTHQQITEYLNGSMKGLFRQFESTDISSNWTRVRQATARLSSKLKIEWKWSNDRLALQLNNDPLNPKIAEYCLRAAIRDFFRRRLLAKPDQGKVFSITSATTASNHFMKAGNFTRFADWRFVHRARLDCVPLNATRRFGHGDKHCRRCHDGQLETLPHVLCHCWPHLGKGITRRHNAILDRLVKAFRPPPTTVVRVNQTVPGFGAAVRPDLLAVDEQNKTALIIDVAMPFENRYQAFERCRQGKRQKYEDIAEHYRAMGFDVLLEAFIVGPLGGWDPHNEFVLNKMKIGQHYRQLMRRLMVSDAIRWSRDIYVEHLTGVAQFRDDDVEGVRGEAPN

SEQ ID NO: 8789 - protein, 878 aa, Rotylenchulus reniformis
MNADKEPSYDPAAAARIQKLYRLSKKRAYREITEQSSPFCQIDGDELHEHFRRVFGPSPRINPNIPEEVPPLNPPPTNDPLAPKFSPKEVWERLKRCSNTAPGPDAVRYAVWKKFDPNAHILSSIFNAVQRLKHIPSNWTKSITVLLHKKGDKSEVTNWRPIALSNTIGKLHSSVLANRLATWAIQHQRVSPSQKGFMPVDGCAEHNFVLQSIIQDSRRSKKHCSIAWLDLTNAFGSIPHETIFTALRWAGLAETAIDTIRCLYSSNSTAIRHSNGLTPEIPIKAGVKQGCPLSPIIFNLALEPILRAIDRLGTGYRLHGQRIPVLAYADDLVLIAESSADLQKMLDITSRVADWAGLAFNARKCATMDIDERRKEALKTSFKVQNGHPPVLTIDEFYEHLGVPTGYSIIRSPEKVLTQMNDYVEKIDSSLLAPWQKFDAVNTFVLPCISFHLKNGVVMKGPLLKLDKKIVRCGKKWLNLPQRASIDPLYLSNAMGGMGLTPLNLLADVSQLVHAYRLIYSRDLSTISMDLLKKAVATRIRRDPRPSELAQYLNGIKKQDLQLTYLAGDVPSAWSRLRQATNRIGAKLNITWKWSADENRLLLLLNNSPLNPKTAEFCLRAAIRNFYHLRLLSKPDQGKVHAVTSVMAASNHFMRAGDFTRFADWRFIHRARLDCVPLNATRRFGTGDKRCRRCHDGQLETLPHVLCHCFSHFGTGIVRRHNAILDRLVKAYRPPTSTTVRVNLTVPGFPDAVRPDLFAVDEEKKAVTIIDVSMPFENKGFERCRQEKRQKYERLAEHFRQQGFTVFLDAFLVGPLGGWDPHNEFVLNQMGIGHRYRQLMRKLMVSDAIRWSRDIYVEHLTGIRQFPDAENPREPDEH

SEQ ID NO: 8790 - protein, 1362 aa, Caenorhabditis japonica
MHKVNNDKRSNLLKSGKFAQRGLSVSSSTPVADTGMTSNWGTVGREAHADSMGTGRQLACTVDRSVTDEATSSGVVVAPPTAKARRNARLHSNRNSPTRRRKSLERTPVETTYATPASDRPSRGGLVQAVYRGRTAFGNSRLLWDDRQDRVLLDCIVFVTSFSDREIDMEALHQEWKIQEHRGLVPPRSKNALRLRINGKHWSTGNGEGLREAPTETGSVPCPQTQTAEPDSPPGSIKEFDGKKKKARKRKRREKGLATDIGENKIMGRTAWETGLPKRRKADGRDRSGLEEVTPFREENTPIVGGFDDGLLWDTLDGDPEVANEEAEGARESTRETLFESFFRANISKATRLIPRKPRRMPKKVDLQWLDKMVRDKIAAKSSIIVVTAALYAGAKVFEEEHNDRFVCAQKSWVEHLGKVANQRRELVEEKKAISRELRRRKLQRGLNEDAYRTVKGLKENGSVKTKSLKDRIVGIDEKINVLDHNCDVRRKLRAAKNRRTPATRTILQKSCNGVVDCSAEEVRNVWAKIIGKEGPRIKIPKEIEDWKDEVRADGSTRTKVPKALWRSWWNISMKSVKSWKAPGPDGVHAFYWKMVPAAREFLCKWVKGKVLIGKKEVPRQVSAGRVVMIPKKGSSTKPEDMRPIACLNVSCKVLNAMIWKVSEENLTKMIPEEQRALRKQECNTLHAHIIDSGVATDFRYRKSPKEVHIAWVDYAKAFDSVSHKYLKWLLRQVGIRASARRTYFSFLQNLTVYYEVRTENGTERSTPLQYRRGVPQGDTLSPRLFCLALAPISHALRKAMQGYTFAFKRESEPTQLTHLLYVDDLKLFSQDSEQLRMGLQLVKRLSEVVGLQYNQKKCSTAHFGGASNAFEEVPVLEYGEVYRYLGIEQHLGTGVEEVRGRVHKTIMERVDRIWESEMTFPEKVHMFNMTVAPVARFYAGNHCATGGERSASNRAWGTELDKEIRKIMATKNARFSKCSKYRPYLPISELGLGLKSLADEVDEATVYAACYLLLTPSLKMFKEIAETHARRGKRTLISDFAWTLQQYAELDVDFSSNGRIRVGEQSFTSARAASRVLVQLMRQHQVANRLEAWKKKTASSSINTADIDKGLSGNWVRACHLDAKVVRDAMGLQEHQVLFNGHPKNGFGKCRFCEEKETCQHVVSVCSTFRASLMVKRHDAVCRVIYDRIRKELKMERLPNNWTPPPLYQAENGTQLYWNHIFHTRAVLRYRRPDMVVVIPERKTILIIEVAVSWVSRLDETTKWKFAKYAHDGNAESRLPPYQFGPALATDLQYSRGFRVEVIPIAIGTCGEVHTSFTDYFKKIPGCQTPKQRQSLLTQIQKRVIRGTVGIMRAHLAHLSR

SEQ ID NO: 8791 - protein, 1623 aa, Caenorhabditis brenneri
MKIPTNKLVKCCFRHCLTSTQSGFGSSDLKHMTNHLKKEHKVEKVDWVYECILDGCGAQSPIDATSTMATRWVTEHLKLKHDAVATPRIKPTKSLGNTTLEDLEKSAPSLGRPKKSTKPPITMMRQETPDKLEMRIQTRSVTKTLSTLKASVKKQEEEKKVADKQQSKSILGFFKSSESKGKGPRRSLAKCVSTDGAATNASDSVGQLLKTMTGAERVKASREMFARKSRTSLHGRPSLSAAILNMDEKDSKKEDEVPKEEVTPTKDDEESSTSVEIREGKGEEEERKKEDVIPMRKLVGRSTFEVIPQRKDEDEVPEEEVTPVKEEEADTTVTETVLSDDGSEDTHNRTYVIEEWEPVKRRFNTWCLDYETTDKAWLCDEVVYWYMQELCSNNDKYKVLDPCLWEVWKASAMTTESILQKMWSSQTYFFPLCEDEHWILLVINASQIWYANSTGGEPRGHVEKFMNELKRERAFFDSPYPFQKDNVNCGVHVCLMARSIATGEYWFDFPEVESFRTKFKQGLKDRNYELYSEEHVRKGKKTSMGEEGDEKKEEAKEEILEELESKSEETPGEDEVKPKDQSEKAIEVEVKRDQIPKLMDLKPDRIKSPVPRKLPNQANNQKNPKEKPTAQMGRKRKVLTGNPDKVVVKVREWFDKEFKSYIREGRSFQRLEWLTEMLTAAIHKASVGDEQTVDKMRKRCPPLDQKEGEMSTQTEIKKRYVKKEEVASQNRTGKLKRFSYWENRTKVFNSVIGQEFKQCEIPIDKIEEFFQKTTSVTNVPKKTLDEVTSRLPKLDIGEWIEEEFVSKDVQNALKKTKDTAPGVDGLQYHHLRWFDPDCKILTLIYNECRKHRKIPAHWKEAETILLYKGGEESKPDNWRPISLMPTIYKLYSSLWNRRIRSVDGVMSRCQRGFQEREGCNESIAILRSAIDVAKGKMSDLSVAWLDLTNAFGSVPHELIESTLIAYGYPETVVHIIKDMYDGASIRVKTRDEKSQQIRINSGVKQGDPISPTLFNMCLENVIRRHLEVANGHKCIGTRIKILAFADDMAILAETKGQLQKELTDMDQDCTPLNLIFKPSKCASLVIRKGVVQTTAEVKLKGVAIRNLNEKNSYKYLGVQTGAETRISEKDLMKKVLQELDKVQSSDDLTPPQKLDCIKCFVLPKMTYMYANSIPKLTELRVFANLVMRGVKVIHRIPVRGSPLEYVQLPVAKGGLGVSCPRITAMISFLVTILKKLWSTDEYIRNLYNEYLKAVVEVETGKKNVTMADIAYYLCDGKLANKKPLFGYTCFSRIRDISRGLSMNQDSPLHCFRFVEENGKLAIEVKATESGKVKRYTDIHLKKLQQLLKGDVNAALLHRFITEKPVKSEVVQVIQQHPGSNSFVRQGGKVSLACHNIIHKARLNLLNCHYNTYDKNSPKTCRRCGAENETQWHILQVCPYSWGRWITHRHDAVLYRVKELIESGSKKDWKLRIDHEFPQFARLRPDIFMESPDKKEVIIGDVACPYEHGLKGMERSWQKKVEKYDEGFQMLREQGKKVTVLPIIIGSLGTWWTPTSKSLEDLGISKTTIRKSIPILCSTVMEHSTQIYWRHIHGEHYISRPIRYGYEKPTGQWRRNDNVLSTTD

SEQ ID NO: 8792 - protein, 2061 aa, Caenorhabditis brenneri
MSQVQHLEFALRPRKIGMRWSLKPENTSAFDVAILEDRERGCLEIQVTTPEFRRDLPHTAERQNRQQEVEVVQSTRDKVIESESGISNPVWPPRTGNVRPNMDYVVIPGPQNEETAGRKTLVPEHQKANQAHSNGQKERSKSHTARDDRHSKNSYGKKKEGNHVPGPVSHKPRDPKQPVRPVPYKKQPRFNSSSNPKPSTNPHFRNFKPSSKNEKTVSDGNPKYRGVIGISKSQEEKRNTNGQKHNCSNEKKIAERVPDPRRIQSPVPLKQEKCDGDCEQCEKLMKKKNDDWTIVSHAWRKPIKCPPLPYHGKRNETINQKPFKPKGNRFAVFENLPKDNPENLNNSEVPVDGFVDSKRKEHNEPKKKEQVPKPNTSREYRSKNDESKPSENKKNERITGGGKQGKTQTREEVNQSERIEILKSDGKDKPTIVCKMKIPTNKLVKCCFRHCLTSTQSGFGSSDLKHMTNHLKKEHKVEKVDWVYECILDGCGAQSPIDATSTMATRWVTEHLKLKHDAVATPRIKPTKSLGNTTLEDLEKSAPSLGRPKKSTKPLITMVRLETPEKLEMKIQTRSVTKTLSTLKASMKKQEEEKKVADSQQSKSILGFFKSSESKAKGPRRSLAKCVSTDGAATNASDSVGQLLKTMTGAERVKASREMFARKSRTSLHGRPSLSAAILSVSMDEKDSKKEDEIPKEEVTPTKDDEESSTSVEIREGKGDGESEKVVVIPTKQEEGPSTFEVIPQRKDPDDVPEEKVTPVKEEEADITVTETVLSDDGSEDTHNRTYVIEEWEPVKRRFNTWCLDYETTDKAWLCDEVIYWYLQELCSSNDKFKVLDPCLWEVWKASAMTTESILQKMWSSQTYFFPLCEDEHWILLVINASQIWYANSTGGEPRGHVEKFMNELKRDRALFGSPYPLQKDNVNCGVHVCLMARSIATGKYWFDFSEVESFRTKFKQGLKDRNYELYSEEHVRKGKKTSMGEEGDEKKEEAKEDILEEPESKLEETPGEDEVKPMDRSEKVTEVEVKRDQIPKLMNLDLKPDRIKSPVPRKLPNQTHNQKYPKEKPTAQMGRKRKVPTGNPDKVVIKVREWFDKEFKSYIREGRSFQRLEWLTEMLTAAIHKASVGDEQTVDRMRKRCPPLDQKAGEMSTQTEIKKKYVKKDEVASQNRTGKLKRFSYWENRTKVFSSVIGQEFKQCEIPIDKIEEFFQKTTSVTNVPKKTLDEVTSRLPKLDIGEWIEEEFVSKEVQNALKKTKDTAPGVDGLQYHHLRWFDPNCNILTLIYNECRKHRRIPAHWKEAETILLYKGGEESKPDNWRPISLMPTIYKLYSSLWNRRIRSVEGVMSRCQRGFQEREGCNESIAILRSAIDVAKGKMSDLSVAWLDLTNAFGSVPHELIESTLVAYGYPETVVHIIKDMYDGASIRVKTKDEKSQQIRINSGVKQGDPISPTLFNMCLENVIRRHLEVATGHKCIGTRIKILAFADDMAILAETKGQLQKELTDMDQDCTPLNLIFKPSKCASLVIRKGVVQTNAEVKLKGVAIRNLNEKTSYKYLGVQTGAETRISEKELMKKVLQELDKVQSSDDLTPPQKLDCIKCFVLPKMTYMYANSIPKLTELRVFANLVMRGVKVMHRIPVRGSPLEYVQLPVSKGGLGVACPRITAMISFLVTILKKLWSTDEYIRNLYNEYLKSVVEVETGKKNVTITDLAYYLSDGKLANKKPLFGYTCFSRIRDISRGLSMNQDSPLNCFRFVEDNGKLAIEVKATESGKVKRYTDLHLKKLQQLLKGDVNAALLHRFITKKPVKSEVVQVIQQHPGSNSFVRQGGKVSLACHNIIHKARLNLLNCNYNTYDSNSPKTCRRCGAENETQWHILQVCPYSWGRWITHRHDAVLYRVKELIESGSKKDWKLRIDHEFPQFARLRPDIFMESPDKKEVIIGDVACPYEHGLKGMERSWQKKVEKYDEGFQMLREQGKKVTVLPIIIGSLGTWWTPTSKSLEDLGISKTTIRKSIPILCSTVMEHSTQIYWRHIHGEHYISRPIRYGYEKPTGQWRRNDNVLSTTD

SEQ ID NO: 8793 - protein, 960 aa, Periplaneta americana
MKVAHGIRSTALNICPHCNKFFKGVKQHIAKAHPEEFRTNLCSSYNSNNQNVSLDIPEIPLPNLESENVSDKNDVHGFQQNLDEWIQIFQSNMDEENFQKYTEDFKDFLGTAHHFLPGPKHPATRYYLARRRGDFKNNNRHYTETTNPQRKSKREKQVRLEKYNYQVTQFLYYNQRKKAVRRIFEPKKCPLSIPVNEIETTFNNKFNNVNHHHLDNYPNHITEVDKDDINNKFLDTVSKEEILKAMQGISIDTSAGPDKILMRTIKCEKVAVILALIGTKMLSHNWVPNFFRKARTVLIYKGGEKKDPNNYRPITICSVIRRVLERCLCSRMQQYVEFNENQRGFVSTAGAQINASILNSVLRKAKIEKEDVTILFLDVHKAYDTVGHRHLESVIHNSALPQKLQDLIINLQCGNETQIEVGIHKTKPIPFKQGVMQGAPLSPMLFNLSIDHIFDELSEPSVAEEFGYDLVSDLNNVVTLGFADDIALVAKSTIAASEIFTMTKRSLQQIGLSLNESKTQTIVIEKGKLSSTTLNLGGSIVNSIDGDERIKYLGINFSDEIKFDIAKVINNLNNKIQALTSTYLLKPEQKLNVLNMYIWPILVYPLQNAPLHQLSDRFLEDVDKLIKSSVKEILCLPGDTPDAMLYTERKYKGLSLFKAQWEAYLQHLNICNTLLRTSNPLVVSTRNIAAEKKVCSRKLKIPPEDLDISNINVHKLRQNLRKQEYDKWCALPHKGKGVILFQEYTPGNKWIFSKEGLSSSEWRDAIKMNANVAPVRSLHGRSLDGFRCRYCNEIETLAHVLGSCQHGELLRNSRHHNIRKLIAQALRNKSFEVHEEVHCVASEGGGIRRADIVALDKTNSKGFILDPTVRFEMSQTQPSEVNKEKQQIYEPTIPYFREKYQMEGTWEVHGLMIGARGTIPRSTVNTIKTFGIHDIIPKIITSTITKGSVAILKNHLYGIS

SEQ ID NO: 8794 - protein, 1059 aa, Periplaneta americana
MSTNIPLSTPFDFTNTSSVTCTLCDKSFTHRGINTHISRCHTSEDSSLNITPAAAENPYDISTHISATNQPDDNDSSLRQNKIGCIYCKKLYDKRGIHKHMKVAHGIRSTALNICPHCNKFFKGVKQHIAKAHPEEFRTNLCSSYNSNNQNVSLDIPEIPLPNLESENVSDKNDVHGFQQNLDEWIQIFQSNMDEENFQKYTEDFKDFLGTAHHFLPGPKHPATRYYLARRRGDFKNNNRHYTETTNPQRKSKREKQVRLEKYNYQVTQFLYYNQRKKAVRRIFEPKKCPLSIPVNEIETTFNNKFNNVNHHHLDNYPNHITEVDKDDINNKFLDTVSKEEILKAMQGISIDTSAGPDKILMRTIKCEKVAVILALIGTKMLSHNWVPNFFRKARTVLIYKGGEKKDPNNYRPITICSVIRRVLERCLCSRMQQYVEFNENQRGFVSTAGAQINASILNSVLRKAKIEKEDVTILFLDVHKAYDTVGHRHLESVIHNSALPQKLQDLIINLQCGNETQIEVGIHKTKPIPFKQGVMQGAPLSPMLFNLSIDHIFDELSEPSVAEEFGYDLVSDLNNVVTLGFADDIALVAKSTIAASEIFTMTKRSLQQIGLSLNESKTQTIVIEKGKLSSTTLNLGGSIVNSIDGDERIKYLGINFSDEIKFDIAKVINNLNNKIQALTSTYLLKPEQKLNVLNMYIWPILVYPLQNAPLHQLSDRFLEDVDKLIKSSVKEILCLPGDTPDAMLYTERKYKGLSLFKAQWEAYLQHLNICNTLLRTSNPLVVSTRNIAAEKKVCSRKLKIPPEDLDISNINVHKLRQNLRKQEYDKWCALPHKGKGVILFQEYTPGNKWIFSKEGLSSSEWRDAIKMNANVAPVRSLHGRSLDGFRCRYCNEIETLAHVLGSCQHGELLRNSRHHNIRKLIAQALRNKSFEVHEEVHCVASEGGGIRRADIVALDKTNSKGFILDPTVRFEMSQTQPSEVNKEKQQIYEPTIPYFREKYQMEGTWEVHGLMIGARGTIPRSTVNTIKTFGIHDIIPKIITSTIKGSVAILKNHLYGIS

SEQ ID NO: 8795 - protein, 1060 aa, Periplaneta americana
MPTNIPLSTPFDFTNTSSVTCTLCDKSFTHRGVNTHISRCHTSEDSSLNITPAAAAENPYDISTHISATNQPDDNDSSLRQNKIGCIYCKKLYDKRGIHKHTKVAHGIRSTALNICPHCNKFFKDVKQHIAKAHPEEFRTNLCSSYNSNNQNVSLDIPEIPLPNLESENVSDKNDAHGFQQNLDEWIQIFQSNMDEENFQKYTEDFKDFLGTAHHFLPGPKHPATRYYLARRRGGFKNNNRQYTETTNPQRKSKREKQVRLEKYNYQVTQFLYYNQRKKAVRRIFEPKKCPLSIPVNEIDTTFNNKFNNVNHHHLDNYPNHITEVDKDDINNKFLDTVSKEEILKAMQGISIDTSAGPDKILMRTIKCEKVAVILALIGTKMLSHNWVPNFFRKARTVLIYKGGEKKDPNNYRPITICSVIRRVLERCLCSRMQQYVEFNENQRGFVSTAGAQINASILNSVLRKAKIEKEDVTILFLDVHKAYDTVGHRHLESVIHNSALPQKLQDLIINLQCGNETQIEVGIHKTKPIPFKQGVMQGAPLSPMLFNLSIDHIFDELSEPSVAEEFGYDLVSDLNNVVTLGFADDIALVAKSTIAASEIFTMTKRSLQQIGLSLNESKTQTIVIEKGKLSSTTLNLGGSIVNSIDGDERIKYLGINFSDEIKFDIAKVINNLNNKIQALTSTYLLKPEQKLNVLNMYIWPILVYPLQNAPLHQLSDRFLEDVDKLIKSSVKEILCLPGDTPDAMLYTERKYKGLSLFKAQWEAYLQHLNICNTLLRTSNPLVVSTRNIAAEKKVCSRKLKIPPEDLDISNINVHKLRQNLRKQEYDKWCALPHKGKGVILFQEYTPGNKWIFSKEGLSSSEWRDAIKMNANVAPVRSLHGRSLDGFRCRYCNEIETLAHVLGSCQHGELLRNSRHHNIRKLIAQALRNKSFEVHEEVHCVASEGGGIRRADIVALDKTNSKGFILDPTVRFEMSQTQPSEVNKEKQQIYEPTIPYFREKYQMEGTWEVHGLMIGARGTIPRSTVNTIKTFGIHDIIPKIITSTIKGSVAILKNHLYGIS

SEQ ID NO: 8796 - protein, 1059 aa, Periplaneta americana
MSTNIPLSTPFDFTNTSSVTCTLCDKSFTHRGINTHISRCHTSEDSSLNITPAAAENPYDISTHISATNQPDDNDSSLRQNKIGCIYCKKLYDKRGIHKHMKVAHGIRSTALNICPHCNKFFKGVKQHIAKAHPEEFRTNLCSSYNSNNQNVSLDIPEIPLPNLESENVSDKNDVHGFQQNLDEWIQIFQSNMDEENFQKYTEDFKDFLGTAHHFLPGPKHPATRYYLARRRGDFKNNNRHYTETTNPQRKSKREKQVRLEKYNYQVTQFLYYNQRKKAVRRIFEPKKCPLSIPVNEIETTFNNKFNNVNHHHLDNYPNHITEVDKDDINNKFLDTVSKEEILKAMQGISIDTSAGPDKILMRTIKCEKVAVILALIGTKMLSHNWVPNFFRKARTVLIYKGGEKKDPNNYRPITICSVIRRVLERCLCSRMQQYVEFNENQRGFVSTAGAQINASILNSVLRKAKIEKEDVTILFLDVHKAYDTVGHRHLESVIHNSALPQKLQDLIINLQCGNETQIEVGIHKTKPIPFKQGVMQGAPLSPMLFNLSIDHIFDELSEPSVAEEFGYDLVSDLNNVVTLGFADDIALVAKSTIAASEIFTMTKRSLQQIGLSLNESKTQTIVIEKGKLSSTTLNLGGSIVNSIDGDERIKYLGINFSDEIKFDIAKVINNLNNKIQALTSTYLLKPEQKLNVLNMYIWPILVYPLQNAPLHQLSDRFLEDVDKLIKSSVKEILCLPGDTPDAMLYTERKYKGLSLFKAQWEAYLQHLNICNTLLRTSNPLVVSTRNIAAEKKVCSRKLKIPPEDLDISNINVHKLRQNLRKQEYDKWCALPHKGKGVILFQEYTPGNKWIFSKEGLSSSEWRDAIKMNANVAPVRSLHGRSLDGFRCRYCNEIETLAHVLGSCQHGELLRNSRHHNIRKLIAQALRNKSFEVHEEVHCVASEGGGIRRADIVALDKTNSKGFILDPTVRFEMSQTQPSEVNKEKQQIYEPTIPYFREKYEMEGTWEVHGLMIGARGTIPRSTVNTIKTFGIHDIIPKIITSSIKGSVAILKNHLYGIS

SEQ ID NO: 8797 - protein, 1059 aa, Periplaneta americana
MSTNIPLSTPFDFTNTSSVTCTLCDKSFTHRGINTHISRCHTSEDSSLNITPAAAENPYDISTHISATNQPDDNDSSLRQNKIGCIYCKKLYDKRGIHKHMKVAHGIRSTALNICPHCNKFFKGVKQHIAKAHPEEFRTNLCSSYNSNNQNVSLDIPEIPLPNLESENVSDKNDVHGFQQNLDEWIQIFQSNMDEENFQKYTEDFKDFLGTAHHFLPGPKHPATRYYLARRRGDFKNNNRHYTETTNPQRKSKREKQVRLEKYNYQVTQFLYYNQRKKAVRRIFEPKKCPLSIPVNEIETTFNNKFNNVNHHHLDNYPNHITEVDKDDINNKFLDTVSKEEILKAMQGISIDTSAGPDKILMRTIKCEKVAVILALIGTKMLSHNWVPNFFRKARTVLIYKGGEKKDPNNYRPITICSVIRRVLERCLCSRMQQYVEFNENQRGFVSTAGAQINASILNSVLRKAKIEKEDVTILFLDVHKAYDTVGHRHLESVIHNSALPQKLQDLIINLQCGNETQIEVGIHKTKPIPFKQGVMQGAPLSPMLFNLSIDHIFDELSEPSVAEEFGYDLVSDLNNVVTLGFADDIALVAKSTIAASEIFTMTKRSLQQIGLSLNESKTQTIVIEKGKLSSTTLNLGGSIVNSIDGDERIKYLGINFSDEIKFDIAKVINNLNNKIQALTSTYLLKPEQKLNVLNMYIWPILVYPLQNAPLHQLSDRFLEDVDKLIKSSVKEILCLPGDTPDAMLYTERKYKGLSLFKAQWEAYLQHLNICNTLLRTSNPLVVSTRNIAAEKKVCSRKLKIPPEDLDISNINVHKLRQNLRKQEYDKWCALPHKGKGVILFQEYTPGNKWIFSKEGLSSSEWRDAIKMNANVAPVRSLHGRSLDGFRCRYCNEIETLAHVLGSCQHGELLRNSRHHNIRKLIAQALRNKSFEVHEEVHCVASEGGGIRRADIVALDKTNSKGFILDPTVRFEMSQTQPSEVNKEKQQIYEPTIPYFREKYQMEGTWEVHGLMIGARGTIPRSTVNIIKTFGIHDIIPKIITSTIKGSVAILKNHLYGIS

SEQ ID NO: 8798 - protein, 944 aa, Periplaneta americana
MKVAHGIRSTALNICPHCNKFFKGVKQHIAKAHPEEFRTNLCSSYNSNNQNVSLDIPEIPLPNLESENVSDKNDVHGFQQNLDEWIQIFQSNMDEENFQKYTEDFKDFLGTAHHFLPGPKHPATRYYLARRRGDFKNNNRHYTETTNPQRKSKREKQVRLEKYNYQVTQFLYYNQRKKAVRRIFEPKKCPLSIPVNEIETTFNNKFNNVNHHHLDNYPNHITEVDKDDINNKFLDTVSKEEILKAMQGISIDTSAGPDKILMRTIKCEKVAVILALIGTKMLSHNWVPNFFRKARTVLIYKGGEKKDPNNYRPITICSVIRRVLERCLCSRMQQYVEFNENQRGFVSTAGAQINASILNSVLRKAKIEKEDVTILFLDVHKAYDTVGHRHLESVIHNSALPQKLQDLIINLQCGNETQIEVGIHKTKPIPFKQGVMQGAPLSPMLFNLSIDHIFDELSEPSVAEEFGYDLVSDLNNVVTLGFADDIALVAKSTIAASEIFTMTKRSLQQIGLSLNESKTQTIVIEKGKLSSTTLNLGGSIVNSIDGDERIKYLGINFSDEIKFDIAKVINNLNNKIQALTSTYLLKPEQKLNVLNMYIWPILVYPLQNAPLHQLSDRFLEDVDKLIKSSVKEILCLPGDTPDAMLYTERKYKGLSLFKAQWEAYLQHLNICNTLLRTSNPLVVSTRNIAAEKKVCSRKLKIPPEDLDISNINVHKLRQNLRKQEYDKWCALPHKGKGVILFQEYTPGNKWIFSKEGLSSSEWRDAIKMNANVAPVRSLHGRSLDGFRCRYCNEIETLAHVLGSCQHGELLRNSRHHNIRKLIAQALRNKSFEVHEEVHCVASEGGGIRRADIVALDKTNSKGFILDPTVRFEMSQTQPSEVNKEKQQIYEPTIPYFREKYQMEGTWEVHGLMIGARGTIPRSTVNTIKTFGIHDIIPKINSFNH

SEQ ID NO: 8799 - protein, 959 aa, Periplaneta americana
MKVAHGIRSTALNICPHCNKFFKGVKQHIAKAHPEEFRTNLCSSYNSNNQNVSLDIPEIPLPNLESENVSDKNDVHGFQQNLDEWIQIFQSNMDEENFQKYTEDFKDFLGTAHHFLPGPKHPATRYYLARRRGDFKNNNRHYTETTNPQRKSKREKQVRLEKYNYQVTQFLYYNQRKKAVRRIFEPKKCPLSIPVNEIETTFNNKFNNVNHHHLDNYPNHITEVDKDDINNKFLDTVSKEEILKAMQGISIDTSAGPDKILMRTIKCEKVAVILALIGTKMLSHNWVPNFFRKARTVLIYKGGEKKDPNNYRPITICSVIRRVLERCLCSRMQQYVEFNENQRGFVSTAGAQINASILNSVLRKAKIEKEDVTILFLDVHKAYDTVGHRHLESVIHNSALPQKLQDLIINLQCGNETQIEVGIHKTKPIPFKQGVMQGAPLSPMLFNLSIDHIFDELSEPSVAEEFGYDLVSDLNNVVTLGFADDIALVAKSTIAASEIFTMTKRSLQQIGLSLNESKTQTIVIEKGKLSSTTLNLGGSIVNSIDGDERIKYLGINFSDEIKFDIAKVINNLNNKIQALTSTYLLKPEQKLNVLNMYIWPILVYPLQNAPLHQLSDRFLEDVDKLIKSSVKEILCLPGDTPDAMLYTERKYKGLSLFKAQWEAYLQHLNICNTLLRTSNPLVVSTRNIAAEKKVCSRKLKIPPEDLDISNINVHKLRQNLRKQEYDKWCALPHKGKGVILFQEYTPGNKWIFSKEGLSSSEWRDAIKMNANVAPVRSLHGRSLDGFRCRYCNEIETLAHVLGSCQHGELLRNSRHHNIRKLIAQALRNKSFEVHEEVHCVASEGGGIRRADIVALDKTNSKGFILDPTVRFEMSQTQPSEVNKEKQQIYEPTIPYFREKYQMEGTWEVHGLMIGARGTIPRSTVNTIKTFGIHDIIPKIITSTIKGSVAILKNHLYGIS

SEQ ID NO: 8800 - protein, 1059 aa, Periplaneta americana
MSTNIPLSTPFDFTNTSSVTCTLCDKSFTHRGINTHISRCHTSEDSSLNITPAAAENPYDISTHISATNQPDDNDSSLRQNKIGCIYCKKLYDKRGIHKHMKVAHGIRSTALNICPHCNKFFKGVKQHIAKAHPEEFRTNLCSSYNSNNQNVSLDIPEIPLPNLESENVSDKNDVHGFQQNLDEWIQIFQSNMDEENFQKYTEDFKDFLGTAHHFLPGPKHPATRYYLARRRGDFKNNNRHYTETTNPQRKSKREKQVRLEKYNYQVTQFLYYNQRKKAVRRIFEPKKCPLSIPVNEIETTFNNKFNNVNHHHLDNYPNHITEVDKDDINNKFLDTVSKEEILKAMQGISIDTSAGPDKILMRTIKCEKVAVILALIGTKMLSHNWVPNFFRKARTVLIYKGGEKKDPNNYRPITICSVIRRVLERCLCSRMQQYVEFNENQRGFVSTAGAQINASILNSVLRKAKIEKEDVTILFLDVHKAYDTVGHRHLESVIHNSALPQKLQDLIINLQCGNETQIEVGIHKTKPIPFKQGVMQGAPLSPMLFNLSIDHIFDELSEPSVAEEFGYDLVSDLNNVVTLGFADDIALVAKSTIAASEIFTMTKRSLQQIGLSLNESKTQTIVIEKGKLSSTTLNLGGSIVNSIDGDERIKYLGINFSDEIKFDIAKVINNLNNKIQALTSTYLLKPEQKLNVLNMYIWPILVYPLQNAPLHQLSDRFLEDVDKLIKSSVKEILCLPGDTPDAMLYTERKYKGLSLFKAQWEAYLQHLNICNTLLRTSNPLVVSTRNIAAEKKVCSRKLKIPPEDLDISNINVHKLRQNLRKQEYDKWCALPHKGKGVILFQEYTPGNKWIFSKEGLSSSEWRDAIKMNANVAPVRSLHGRSLDGFRCRYCNEIETLAHVLGSCQHGELLRNSRHHNIRKLIAQALRNKSFEVHEEVHCVASEGGGIRRADIVALDKTNSKGFILDPTVRFEMSQTQPSEVNKEKQQIYEPTIPYFREKYQMEGTWEVHGLMIGARGTIPRSTVNTIKTFGIHEIFPKIITSTIKGSVAILKNHLYGIS

SEQ ID NO: 8801 - protein, 1059 aa, Periplaneta americana
MSTNIPLSTPFDFTNTSSVTCTLCDKSFSHRGINTHISRCHTSEDSSLNITPAAAENPYDISTHISATNQPDDNGSSLRQNKIGCIYCKKLYDKRGIHKHMKVAHGIRSTVLNICPHCNKFFKGVKQHIAKAHPEGFRTNLCSSYNSNNQNVSLDIPEIPLPNLESENVSDKNDVHGFQQNLDEWIQIFQSNMDEEDFKKYTEDFKDFLGTAHHFLPGPKHPATRYYLARRRGDFKNNNIHYTETTNPQRKSKREKQVRLEKYNYQVTQFLYYNQRKKAVRRIFEPKKCPLSIPVNEIETTFNNKFNNVNHHHLDNYPNHITEVDKDDINNKFLDTVSKEEILKAMQGISIDTSAGPDKILMRTIKCEKVAVILALIGTKMLSHNWVPNFFRKARTVLIYKGGEKKDPNNYRPITICSVIRRVLERCLCSRMQQYVEFNENQRGFVSTAGAQINASILNSVLRKAKIEKEDVTILFLDVHKAYDTVGHRHLESVIHNSALPQKLQDLIINLQCGNETQIEVGIHKTKPIPFKQGVMQGAPLSPMLFNLSIDHIFDELSEPSVAEEFGYDLVSDLNNVVTLGFADDIALVAKSTIAASEIFTMTKRSLQQIGLSLNESKTQTIVIEKGKLSSTTLNLGGSIVNSIDGDERIKYLGINFSDEIKFDIAKVINNLNNKIQALTSTYLLKPEQKLNVLNMYIWPILVYPLQNAPLHQLSDRFLEDVDKLIKSSVKEILCLPGDTPDAMLYTERKYKGLSLFKAQWEAYLQHLNICNTLLRTSNPLVVSTRNIAAEKKVCSRKLKIPPEDLDISNINVHKLRQNLRKQEYDKWCALPHKGKGVILFQEYTPGNKWIFSKEGLSSSEWRDAIKMNANVAPVRSLHGRSLDGFRCRYCNEIETLAHVLGSCQHGELLRNSRHHNIRKLIAQALRNKSFEVHEEVHCVASEGGGIRRADIVALDKTNSKGFILDPTVRFEMSQTQPSEVNKEKQQIYEPTIPYFREKYQMEGTWEVHGLMIGARGTIPRSTVNTIKTFGIHDIIPKIITSTIKGSVAILKNHLYGIS

SEQ ID NO: 8802 - protein, 867 aa, Periplaneta americana
MDEENFQKYTEDFKDFLGTAHHFLPGPKHPATRYYLARRRGDFKNNNRHYTETTNPQRKSKREKQVRLEKYNYQVTQFLYYNQRKKAVRRIFEPKKCPLSIPVNEIETTFNNKFNNVNHHHLDNYPNHITEVDKDDINNKFLDTVSKEEILKAMQGISIDTSAGPDKILMRTIKCEKVAVILALIGTKMLSHNWVPNFFRKARTVLIYKGGEKKDPNNYRPITICSVIRRVLERCLCSRMQQYVEFNENQRGFVSTAGAQINASILNSVLRKAKIEKEDVTILFLDVHKAYDTVGHRHLESVIHNSALPQKLQDLIINLQCGNETQIEVGIHKTKPIPFKQGVMQGAPLSPMLFNLSIDHIFDELSEPSVAEEFGYDLVSDLNNVVTLGFADDIALVAKSTIAASEIFTMTKRSLQQIGLSLNESKTQTIVIEKGKLSSTTLNLGGSIVNSIDGDERIKYLGINFSDEIKFDIAKVINNLNNKIQALTSTYLLKPEQKLNVLNMYIWPILVYPLQNAPLHQLSDRFLEDVDKLIKSSVKEILCLPGDTPDAMLYTERKYKGLSLFKAQWEAYLQHLNICNTLLRTSNPLVVSTRNIAAEKKVCSRKLKIPPEDLDISNINVHKLRQNLRKQEYDKWCALPHKGKGVILFQEYTPGNKWIFSKEGLSSSEWRDAIKMNANVAPVRSLHGRSLDGFRCRYCNEIETLAHVLGSCQHGELLRNSRHHNIRKLIAQALRNKSFEVHEEVHCVASEGGGIRRADIVALDKTNSKGFILDPTVRFEMSQTQPSEVNKEKQQIYEPTIPYFREKYQMEGTWEVHGLMIGARGTIPRSTVNTIKTFGIHDIIPKIITSNIKGSVAILKNHLYGIS

SEQ ID NO: 8803 - protein, 1059 aa, Periplaneta americana
MSTNIPLSTPFDFTNTSSVTCTLCDKSFTHRGINTHISRCHTSEDSSLNITPAAAENPYDISTHISATNQPDDNDSSLRQNKIGCIYCKKLYDKRGIHKHMKVAHGIRSTALNICPHCNKFFKGVKQHIAKAHPEEFRTNLCSSYNSNNQNVSLDIPEIPLPNLESENVSDKNDVHGFQQNLDEWIQIFQSNMDEENFQKYTEDFKDFLGTAHHFLPGPKHPATRYYLARRRGDFKNNNRHYTETTNPQRKSKREKQVRLEKYNYQVTQFLYYNQRKKAVRRIFEPKKCPLSIPVNEIETTFNNKFNNVNHHHLDNYPNHITEVDKDDINNKFLDTVSKEEILKAMQGISIDTSAGPDKILMRTIKCEKVAVILALIGTKMLSHNWVPNFFRKARTVLIYKGGEKKDPNNYRPITICSVIRRVLERCLCSRMQQYVEFNENQRGFVSTAGAQINASILNSVLRKAKIEKEDVTILFLDVHKAYDTVGHRHLESVIHNSALPQKLQDLIINLQCGNETQIEVGIHKTKPIPFKQGVMQGAPLSPMLFNLSIDHIFDELSEPSVAEEFGYDLVSDLNNVVTLGFADDIALVAKSTIAASEIFTMTKRSLQQIGLSLNESKTQTIVIEKGKLSSTTLNLGGSIVNSIDGDERIKYLGINFSDEIKFDIAKVINNLNNKIQALTSTYLLKPEQKLNVLNMYIWPILVYPLQNAPLHQLSDRFLEDVDKLIKSSVKEILCLPGDTPDAMLYTERKYKGLSLFKAQWEAYLQHLNICNTLLRTSNPLVVSTRNIAAEKKVCSRKLKIPPEDLDISNINVHKLRQNLRKQEYDKWCALPHKGKGVILFQEYTPGNKWIFSKEGLSSSEWRDAIKMNANVAPVRSLHGRSLDGFRCRYCNEIETLAHVLGSCQHGELLRNSRHHNIRKLIAQALRNKSFEVHEEVHCVASEGGGIRRADIVALDKTNSKGFILDPTVRFEMSQTQPSEVNKEKQQIYEPTIPYFREKYQMEGTWEVHGLMIGARGTIPRSTVNTIKTFGIHDIIPKMITSTIKGSVAILKNHLYGIS

SEQ ID NO: 8804 - protein, 1320 aa, Strix occidentalis
MVRPLKISFISVSTQTGYDTYTDQTIKNIGHKNIVLEEPSLNLKNIEIINSHEKDDNEHSDSDGLAMLPEVYDDSSFSKPEINKRRVNEEEEELILQTDIAKPTSPDTPTQPPTHALLSETPVLKMPSNTNTCPYCEIIFGKLSNLIEHIQRTHGKRKIIYKCNKCGKENEKHQSIACHIPKCKGTIFKEAVTGLPCGECGKTFETKIGLGQHKRLAHPLLRNQERIIAAHPNLNSARGAHNQCWTKQEIDQLIYLDKKYKGTKNINKLIAEQIPSKTAKQISDKRRALYKNTPKEIDVDQGWMKRLEEGEALEDVGQPIDDGLKTQYRRTINKWISMEKLPILQNFEILEEDINKMTLVKNSFENHYSFLHRRSQNPTKDQSHQKNRRPHSTQPAKEWMKKRAKKRGQFLRFQQLFHKDRRKLASIILDDAESLKCNIPLEELHKIFKERWETSGRYKGLGGFLTRGRADNTAFKTMITAKEIAKNIKEMSRNAAPGPDGLTLKHLADLDPDNSQLMELFNLWLLSGTIPDTVKECRTVLISKSALPERQNNINNWRPITIGSIILRLFSKILTARLTKACPINPRQRGFIRSSGCSENLKLLKLIINNAKKERQPLGVVFVDIAKAFDTVSHTHIIDILIQKGVDNHIINLISNMYNNTKTHINKKNEQSDDIKIQIGVKQGDPMSPILFNLAMDPLLCKLEEEGYGYQHRSAHITTMAFADDLVLLSSSWEGMQRNLEIVRTFCDITGLKTQGEKCHGFFIQPTKDSYTINDCQPWTIKGSPLNMIHPNNTEKYLGLFIDPWIGISKPNLLDKIKDWLLKIDRSPLKPFQKINILRTYTIPRVIYLADHSDTKITYLETLDLTIRNTVKKWLHLPPSTADALLYSSTKDGGLGLTRLSGLIPSVQVRRIHRIAQSDDNTIKTIVKSENIEKEFKHLWIAAGGDKDKIPSVWDPGVITTKTNEIIREEDSEWERPAQKKIFPKPCNWRNEEFRKWTKLLSQGRGIANFEKDNISNNWIERYRGIPHRKLITALQLRANVYPTREFLGRGRQSTYNKSCRHCQADNETCAHIIGFCPAVQDARIKRHNKICETLIDEAKKKDWIIFKEPLLKDNNNDLYKPDLIFLKENTAVVVDVTIRYESKLETLQEAAIEKVNKYKHLRNQIQELTNASKIKFMGFPLGSRGKWYEGNYTLLSDLGISKSKQTNIAKRLSNMALFSSVDIIHIFASKARPHHHLTYYVNSYIYYVIVMNCSFPVYYIGQTPACNGKLERTGNLSSITSCVKLDLTIWSKLNLSFDLTKRIIPKILILDIGGRATFT

SEQ ID NO: 8805 - protein, 915 aa, Otus sunia
MKTEKLPILQETFQKVLEDNINKTTLIEDSFENHYSFLYMRSSDSEDNTQKEKQGLEKKTKNQAKNGSHNTKSSKEWMKKRAKKRGEFLRFQSLFYRNRRKLANIILDEVESLKCNIPIKDLQRIYKERWESTGTFQDLGGFHPKGKAENTAFESMITAKEIAKNIKEMSKHAAPGPDGLTLRHLTALDPDNTQLMELFNLWLLSGMIPDVIKECRTVLISKSAMQERLNDINNWRPITIGSIVLRLFSRIITARITKACPINPRQRGFIRTSGCSENLKLLKLLINNAKKEKQPLGVVFVDIAKAFDTVNHNHIIEVLKQKGVDKHIITLITNMYKNTKTYIDLKNEKSDSIGIHIGVKQGDPMSPILFNLALDPLICKLEEEGVGYQHRSAQLTTMAFADDLVLLSSSWDGMQKNLEIVNIFCEITGLKTQGEKCHGFFIKPTKDSYTINDCQPWTIKGTPLNMIHPSNTEKYLGLLIDPWVGISKPKLLDKIKTWLNKLEKSPLKPFQKIDLLRTYTIPRIIYLADHSDTKITNLETLDLTIRNTVKSWLHLPPSTADSVLYSSTKDGGLGLTRLSGLIPSVQARRIHRIAQSSDETIRTIVKNENIEKEFEHLWIAAGGDKDKKTSIWDPGTVTTRINGILREDDSEWERPTPRRVFPKPCNWRINEFKKWTNLQSQGRGIANFENDNISNNWIERYRGIPHRKLITALQLRANVYPTREFLGRGRQSTFNRSCRHCQAESETCAHIIGYCPIVKDARIKRHNKICQILIDEAKKKHWTIFQEPLLRDNKNELYKPDLIFVKDKTAVVLDVTIRYENKLDTLQEAATEKVNKYKHLKNQIQELTNATNIKFVGFPLGSRGKWHAENYTVLTDLGISKSRQTRIARRLSNIALFSSVDIIHMFVSKSRSKTD

SEQ ID NO: 8806 - protein, 1230 aa, Ardeotis arabs
MGRPIRVAFVSVATQTSPLDLRDDVVIKSIIDHREVVGEEIEYRGLEFVNSQIVGVMAHHPIPIETLAILPDVYEVPDVGPKGVTTSPHPVEIESEEEEVLSPPGATAHPIRIPSTPILGAGSEHPTEGTPVVKVPDNNPPCPCCGNRMGKMSGLIEHLRRAHGKRKILFQCARCGRTNVKHHSIACHFPKCKGDITSPPKGDWVCEECGKAFETKIGLGQHKRLVHPAARNIERIIASRPKEGTARGLHRQCWTEEEVELLKRLDKQYEGSKNINKLIAEHIPSKTAKQISDKRRGLHKSPIKRGGKDQGGKKLLEEKGEHLVETGSHENGGLRSHYRRMVSEWITSEKLPILQGTFESVLEGSEDPTTLVDEAVDESYARMFRTSIELKACQERKQQMARRARPSEPPKGWMKRRAKKRGQFLRFQRLFHLDRGKLAGIILDDVESLKCEIPLDEVHSVFKSRWESPGTFKGLGAFRTNVQADNSAFEAMITAKEISKNIKEMSKNAAPGPDGLTLRDLIKRDPECDQLMEVFNLWLVTGSIPNMVRECRTVLISKSALPERQRDINNWRPITIGSTLLRLFSRILTARLTKACPINPRQRGFIKSAGCAENLKLLQLLIKNAKKNHRPLGVVFVDLAKAFDTVSHHHIITALVQRGVDNHIIALIKNLYSNISTRIHLKNEQSDPIGIHIGVKQGDPMSPILFNLAIDPLLCKLDKEGNGFQHCSRAITALAFADDLVLLSGSWEGMEQNIEILEAFCHLTGLKTQGEKCHGFYIKPTKDSYTINDCPAWTINGTPLNMIEPGETEKYLGLRIDPWVGISKPELRTKIEDWLQRIGRAPLKPFQKVDILKGYTIPRLIYLADQADVKVTYLESLDLIIRTTVKEWLHLPTSTCDAILYSNTRDGGLGIVRLVGLIPNIQARRLHRIAQSSDELIRSVVQEEGIEREFEKLWVTAGGKMDKIPSIWDPGTVMVISEGVGGEEPASEWEIAAPKTIFPRPCDWRKQEFVNWTKLLSQGRGISNFEKDKISNSWLEYYRGIPHRKLITALQLRANVCPTREFLARGRQEIQIKACRHCLAENESCSHIIGFCPAVQDARIKRHNQLCETLANEAKKKNWIVFNEPVLKNEQNELYKPDLIFVKENQAMVVDITIRYESKITSLVDAANEKVKKYEPLKIQIQDLTNCENIKFYGFPIGARGKWHQGNYQLLTELGLSSSRREKVARQMSN

SEQ ID NO: 8807 - protein, 1255 aa, Tyto alba
MCLAARIAFVSVGTQTSLLDLRDDVVPRTIRDHAKLVDVGINFRRLEFVNSDVEGLEGGDLSTVTESLAMLPEVYEEPSPSALEGKDISPLLRESESEGEGELSPPGAVAQLFPLPSSPILASGGEPSPEGTPVVKVPDKNTSCPCCGTRIGKVSGLVEHLRRVHGRRKILFQCALCGKTNEKHHSIACHVPKCKGAIEATPKEGLACEECGRTFETKIGLGQHKRLAHPVTRNLERIMAARPKETSARGVHRKCWTEEEVEILRKLEKQYEGNRNINKLIAEELPFKTAKQISDKRRILHKSPVKKREEDQEWKKHLREGEHLVSIGPRKRGGGLKSHYRKTISKWITAGKLRILHATFEKVIEGGEDLPTTVGGAVEDCYARLFKRSSELEASQGRKLQTARTARSSEPPKEWMKKRARKRGEFLRFQRLFHLDRGKLAGIILDDVESLKCGLPLDEVHCVFKSRWESPGTFKGLGGFKTLGRADNSAFEAMITSKEISKNIKEMSKNSAPGPDGLSLRGLMAIDPHYTMLAELYNLWLLTGTIPDMVKECRTVLISKSALPERQKDINNWRPITIGSTVLRLFSRIITARLTKACPISPRQRGFIRSAGCAENLKLLQLLIRNAKREKHPLGVVFVDLAKAFDTVSHNHIIEVLKQKGVDNHIISLISNMYSNTHTYIDMKSEQSDPIGIRIGVKQGDPMSPILFNLSVDPLLCVLEKEGSGYQHYSTSITSMAFADDLVLLSGSWEGMRRNIEIVEAFCDLTGLKTQGEKCHGFYIQPTKDSYTINDCPAWTIKGTPLNMIEPGSSEKYLGLKIDPWVGISKPELLAKIKDWLHRIDRAPLKPMQKVDILKVYTIPRMIYLADQSDVKVSYLESLDLTIRTAVKEWVHLPPSTCDAILYSSTRDGGLGLTRLSGLIPSVQARRLHRIAQSSDEVIREIVSKEGIEKEYEKLWLAAGGNKEKIPSIWDPSSAMVITEVLGGIDQYSEWERPAPKTIFPKPSDWRKQEFIKWTKLASQGRGITNFEKDKISNSWLERYRGIPQRKIVTALQLRANVYPTREFLARGRQETHVRSCRHCGAEIESCSHIIGYCPAVQDARIKRHNQICELLIEEAKKKEWIAFQEPLIRDEKKELFKPDLVFVREEIAIVVDVTIRYESKETSLEDAAKEKIKKYQHLEDQIQELTNATTIKFMGFPLGARGKWYQGNYTLLKELGLSSSRQDKVARRLSNRALFSSVDIIHMFSSKVRTVENV

SEQ ID NO: 8808 - protein, 967 aa, Euglossa dilemma
MAAVEVRGVLSGARFINQYIMQHLQTSPTLESVKGTRKTPQYKQLVSALLEEARAGTRETSPDGVDKNDATLPPGPPDASDPCAELQSTGSLESFEHEIRSLIRDLEGVTEFKAELLVSIAERQLRGDDVSESLTRWLGEVFTPASQQQQVRRDRRRRCRRQKRAPVSGRLPRWRERRREYAEMQTLFRRNPSLAASRVLDGRNESRPPDLSGMIDFWEPLLSQQSAEHRAVGPAPEKSELRAIWDPVEKEELLSSVPPLDTAAGPDGITARQWKSVMPAVKALLYNIILRRGSFPTSMLESRTVFLPKKQHSVDPADFRPISIASVVVRQLHKVLATRLRRANLVDERQRCMDDGCAENITVLASQLDDARHSLKELHVVSLDCAKAFDSVSHQAIDATLKECGLPAGFVQYISCTYFNSFTKLEVGRERSTPIKVNRGVRQGDPLSTLLFCMCFDRAIRTLPPHIGYDINNTRINTLLYADDAFLVSATAPGMDILLRSIEESAGEMGLIFNASKCTALSLTPSGKEKKMKVGTTPRFQTSQGFIAQMSPSQEWRYLGVDFQYSGPKTASRSLKTELDRISRAPLKPQQRLLILRAHLLPRYYHHLVLSRITLGHLRGLDLQVRAAVRRWLSLPRDIPVAYFHTRTKEGGLGLPAFETSIPCQMLGRLGSMETSTCKAARAAAQGFWVQKRIHWATAALTKNGEALTCRMDVERWWATRLHKSVDGHELRESSGVSSSSTWVNSALHITGRDYVQYHHVRINSIPTRVRTSRGVRDATRDIMCRAGCRVTETTAHVIQSCHRTHGGRILRHNAVCKVLASGLRDKGWEVREEPHLRTRQGLRKPDLVAVRDGAVAVIDAQIVSGSGPLDGAHDNKRKYYSDNGDVTVAIAREYNIRPSDVGYTSCTISWRGVWSPRSAADLLNLGLSKKLLGFITIRVLRGSHLNWTRWNKMTTMHIQRRRAGIG

SEQ ID NO: 8809 - protein, 1046 aa, Megachile rotundata
MQCLCARHVSGRSPQKSAWAFTLEERTSACGVDAMFVCSTCQRSFATKIGLGVHVRRAHVEVANAAISVERVKDRWSEEERRIMAAVEVRGVLSGARFINEYIMSHLQTSRTLESVKGTRKNPKYKELVATLLEEARTSVREESPRSAVNDSATQPSGPSDTRSLRTEHLFTESTEPFEHRIRELIGDLEGVTDFRAELLVSIAEQQLQGDEVAESLTRWLGEVFKPENQQQQVQRKRRRQRKAPVSGQLPKWRERRRDYAAMQTLFHRNPSLAAGRVLDGKNESRPPDLPEMTAFWEPILTEQSAEHRAVGPASEKSELCSVWGPVEKEELLSSVPPLDTAVGPDGVTARQWRAVLPAVRALLYNIILKRGSFPASMLESRTVFLPKKQHSVNPADFRPISIASVVVRQLHKILAMRLRRTNLVDERQRCMDDGCAENITVLASLLDDARHGLKELHLVSLDCAKAFDSVSHHAIDATLKECGLPAGFVQYISRTYSDSSTRLEVGRNRSEPIKTNRGVRQGDPLSTLIFCLCFDRVARTLSPHIGYDLNNTRISTLLYADDAFLVSTTAPGMNILLRSVEESAGEVGLSFNTSKCSALSLIPSGKEKKMKVGTTPTFKTSQGFITQITPSQEWRYLGVDFQYSGPKKASRSLKIELERISKAPLKPQQRLLILRVYLLPRYYHHLVLSRTTLGHLRGLDLQVRAAVRRWLSLPRDIPIAYFHTTAKEGGLGLPAFETSIPCLMLARLRSMETSTCKAARAAVQGFWVQKRIHWATAALTKNGEALTCKADVDRWWASRLHKSVDGRELRECSGVGSSSTWVNSALNITGRDYVQYHHVRINSLPTRIRTSRGVRREGMEVTCRAGCQVTETAAHVIQSCHRTHGGRILRHNAVCKVLASGLRDKGWEVREEPKLRTRQGLRKPDIVAIKDGVARVIDAQVVSGSGPLDEAHETKRKYYSDNGDVTAAIARECNIAPSNVAYSSCTISWRGVWSPRSAADLLQVGLSKKLLGFITLRVLRGSHLNWTRWNKMTTMRVHHQRTGIG

SEQ ID NO: 8810 - protein, 1053 aa, Folsomia candida
MANDLHCPIPTCPGPSDTEDDNWIFCEQCTSWFHSKCVGVVVIPEEEWICLVCISLNSTSSQLSSTANDDPTNHPVQAETSNPTRISKKDIIIAARLWLQENLVEDPESKIAKAEVSLRYTQHVEIKGEGRVAISTLGKYIFKLFPQTTTCRPGARGTTNSAYKGIRWTDASQPPRQNHEDLGFVFSKLKGTVPTLRPVPKGARISVAEALTNILEEVINKNDAESWNKLFTFPYAVLTVPAKSEKVTNLTSWVKMRVSKWKTDPTTTIPTGRQPSPSIHKPQQSQQMISKKVEAKLSDGDIRGAIRLLCSDDTVAPYNQSTIDSLLDKHPPHPEPLNFPVMPDVDEHPAEATEEEILATISSFPPGSAGGLDGLRPQILKDLVGISTGDTGMKLVKTICSFADVVLCGKVPDVVCPTLFGASLTALNKKSGGIRPIAVGNTWRRLVSKIVVTRITPQLVDYFSPHQLGVGIKGGAEIGAHAARRYWSHAHDTAKAFLKLDLRNAFNEIRRDSLLHIIKQRIPSIYSFINQAYAHPSSLFYGNILIPSLLGVQQGDPLGPGLYSLVIQPIIEAVTTEFNVWYLDDATIADIPEKVLHAFDTIRTMGEDVGLHLNYEKCEVGVFGGNPDTHDAIYDEFHKASPGIKIISPEVATLLGAPLTDEAIERVMESKISQLAAFGNRLLQLSAHSAFFLLRASISIPRLIYFLRCAPSWRNHASLLAYDNTLKLVLEGITNCFLSPESWIQSSLPVSKGGLGTRHAVSTAIPCFLASAHSCLPHLESLLPDYIRDQDDAISEGEELWSADYRQLPLPELRGKQAIWEAPLIEHRQKTLLDNTSTPQDKARLLALDRPYVGAWLNAIPAPQLGNHLSNEEFRVAIALRLGCAICQPHKCICGAEVSSSGYHGLSCRKSAGRWSRHSAANDVISRALRAAEVPSIREPVGCCRTDGKRADGMTLIPWSRGKALVWDFTCVDTFAPSYLSSTSGHPGAAAVLAEKKKKTLYSFLEDRFIFIPVAAETIGVWGEDGIKLIQHIGQRITTITGEIRATSYLLQR

SEQ ID NO: 8811 - protein, 1082 aa, Folsomia candida
MANDLHCPILTCPGPSDTEDDNWIFCEQCTSWFHSKCVGVVVIPEEEWICLVCISLNSTSSQLSSTANDDPTNHPVQAETSNPTRISKKDIIIAARLWLQENLVEDPESKIAKAEVSLRYTQHVEIKGEGRVAISTLGKYIFKLFPQTTTCRPGARGTTNSAYKGIRWTDASQPPRQNHEDLGFVFSKLKGTVPTLRPVPKGARISVAEALTNILEEVINKNDAESWNKLFTFPYAVLTVPAKSEKVTNLTSWVKMRVSKWKTDPTTTIPTGRQPSPSIHKPQQSQQMISKKVEAKLSDGDIRGAIRLLCSDDTVAPYNQSTIDSLLDKHPPHPEPLNFPVMPDVDEHPAEATEEEILATISSFPPGSAGGLDGLRPQILKDLVGISTGDTGMKLVKTICSFADVVLCGKVPDVVCPTLFGASLTALNKKSGGIRPIAVGNTWRRLVSKIVVTRITPQLVDYFSPHQLGVGIKGGAEIGAHAARRYWSHAHDTAKAFLKLDLRNAFNEIRRDSLLHIIKQRIPSIYSFINQAYAHPSSLFYGNILIPSLLGVQQGDPLGPGLYSLVIQPIIEAVTTEFNVWYLDDATIADIPEKVLHAFDTIRTMGEDVGLHLNYEKCEVGVFGGNPDTHDAIYDEFHKASPGIKIISPEVATLLGAPLTDEAIERVMESKISQLAAFGIRLLQLSAHSAFFLLRASISIPRLIYFLRCAPSWRNHASLLAYDNTLKLVLEGITNCFLSPESWIQSSLPVSKGGLGTRHAVSTAIPCFLASAHSCLPHLESLLPDYIRDQDDAISEGEELWSADYRQLPLPELRGKQAIWEAPLIEHRQKTLLDNTSTPQDKARLLALDRPYVGAWLNAIPAPQLGNHLSNEEFRVAIALRLGCAICQPHKCICGAEVSSSGYHGLSCRKSAGRWSRHSAANDVISRALRTAEVPSIREPVGCCRTDGKRADGMTLIPWSRGKALVWDFTCVDTFAPSYLSSTSGHPGAAAVLAEKKKKTLYSFLEDRFIFIPVAAETIGVWGEDGIKLIQHIGQRITTITGEIRATSYLLQRLSITLQRGNVASILGTLPTGKKLSEFFYL

SEQ ID NO: 8812 - protein, 1166 aa, Andrena haemorrhoa
MSKGMSWNGLETMYPEQNLFLSMYRNNQDEASDAEVPGPGTSAADVSASRQGTTTDDLSNVPGHELEQSVTLPLGSPIQCVGCHNVGRNMQFLSEKDFNAHASEVHHEMVVQWMCRKCDKRYERIHQLRCHIPKCKGPKVVTEEEFRCTECGVTYKTQRGLSTHERHRHPTIRNEKRKNAGGAAPVEVKRGRKATVWTEEETVLLRELDRRYGSSSRVNVKIREHFPEKTLKQISDKRRQFKPPANEVECITIEDSDTETECRSEDADPISPDRGVSSQEPTSDGAWQEALKESISATGPESNIWTSILDSIRRLAMDDESTSEQIEQVVGETLSILLGDEPAVNPRQNQGRKGREKAGNGGARFSKRTRRGRFRYGRYQELYKKCPRKLADMAIAGSTIDKTEEEICYPQTEDIKRLYATLWGTAGPRSVELAEDSRMPTSIATGEIWVPVEPEEIISRLGKMKPGTAAGPDGVKKAHIKRDGAVQVLAKLFNLLLLKGYFPEQFKANRTTLIPKPGKDTKDAKNWRPITIGSLIGRLLSNMIDSRIRDKIMLSDRQKGFMKDNGCKHNVAIIKSALGSMKKSKGGVLTVVDISKAFDTVPHASLVASLAVKGMPREVTSYIKEMYNGCHTAIKDSNGGCINITLQRGVKQGDPLSPLLFNAVMDPIISSIGSATKGVDLNGNNVAILAFADDLVLIGQDRNVAATQMKMLDKYLRSLGMELSIPKCATVEIVTKNKTWFLRDPEIMVGLDRIPTLGPGESTKYLGITLDPWIGLKVDSERLKEIARATGVIARMGLKPHQKVDVIRTYLLPRAIYELVTSPPPIKMLKEFDHEVKQAVKGILKLHPSTTDGVIYSDRSHGGVGLQRIENIVKLAVIRNGVKMLDSTDDAVQEALKDERGVIEKYAKSLNLSWPTTMARIDEARRECKKCDTEKWRQLVSQGHGVADFSHDRIGNAWLYNPTLLKSSRYLDALKLRTNTFGTKVALSRASTNVDVACRRCKAQAETLGHVLGNCVHTKPMRMRRHDEIKDFIGNRMATSHAVFVEPTVNVLGELRKPDLVIKDQERLLIVDVTVRYEINDNLLKAYREKVSKYQETLEYVKIKTSSREGKILPIVVGTRGAMPTKTKENLKFLGFRKEDMITISLMALRSSLEMANAFIDYDHIR

SEQ ID NO: 8813 - protein, 908 aa, Adalia bipunctata
MTWKGGNFSKQLRTEARLIRKFKMKPKQYIICNQDRIKVLENQLEQQKRRHEVSELRSKFRDTPSVRILKQSRQVHPQDLEVVEKFFSELYREEHKTGQTPCLNKWLGKYQKQTTNKIYDNQIDSTYVENLFNETLRQTSPWKSPGEDYIPNYLYKIFPAAKHFLLNFVMDALRNNQQLEEKDCRAQIILVYKKGNESDPSNYRPIALLNTDYKILTSTITKILMNDLPQWAIPSEQLARAKVWGTMQGMLIDKAITQTARMRRKTNHSAWYDFTKAYDSISHTQLKRLIGTLPLHKNIKKLLKISMQQWSIRVRVGKNLTNPIYVKRGVYQGDSISPLLFILLTASIIDHIKTNRSVNKYTKGNFNIMAFMDDIKCHSATKIGLKTITHELEKSARELGLTLNAEKCGSYSRTRMDAEEDDDGMFLPEVRDGYRYLGLDQLERDNVTNFDRVQEKVKLLSDEIFNTPLTTAQKVALYNSTVVPSANYVMGNMYTDEKRATSLRKCRDLDTEVRKILVSKNIKGKTTSNAHVYLPQHKGGMGLRSIELEAEIHFVRKGLYIDTHPDMKEAKELFKALQRAGWRNPLSDRDFVVEKYECPELQYNYENMGKCCKTLKAHIEKKHHEQLEKEWGQNMHYGRVIVGERDSILFPAYSSPHMDSWRYSLLHSAAEEQLHGLGAIPGRRTRCRKGCDSVETAYHVSSACITNAYITRHDNVVHWLLKTLLKSLKAPNECGSELQFGKATLNINFDNGNRSISIRAGSKILTEKKLHHNKPDVMIILDNPKEIIILEVAVSHVQNVKLQERIKRNRYSVNGVVEVNNRNIGDLSMDMNLVSELERTYNCPVHLGIFVVGCYGEIMVTGEHKIFLNLLKQKLCLNNLDIQIMINKCAYSVAVSTSNILVRHLGIG

SEQ ID NO: 8814 - protein, 1088 aa, Schrankia costaestrigalis
MHNEKLFYRNVKQETTNIHSNHSNTNEQNVPTSENLHDFWANIWSTPIQHSSEAEWIQTECRNSNTTIQSMTFKHITPEIFLNVIHNIHNWKSPRSDNIHTYKKFTTIHSHLLSHINTFVEEPKLIPTYLTIGKSYMIPKDNENLADPSKYRPITCLQTLYKIITSCLSQLVYQHVSSNNILAEQQKGCKKYSQGCKEQLIIDSVILNQVQKSKSDLYSMYIDYKKAYDSVPHSWLIHVLELYKIHPKLIVFLKSLMSKWATVLTLNTPSKTIETNPIKIQRGIFQGDALSPLWFCLALNPLSNILNSTSLGYSFKDIVPDDQNIAQNNVVSHLLYMDDIKLYAKTETELNELARLTEQFTNDIKMEFGIDKCKINSIKAGQNYQHHYVLNTGEHINPLDEYSSYKYLGYNQSLQIQHKDIKQTLTQQFQHRLNTILKTQLNAINTVKAINTFVIPLLTYSFGVIRWTKTELKNLQRKINTTMTKFRKNHPRSSVHRLTLPRSEGGRGIIDISNLHNRQISGLRKYFFAKSQSSALHKYTAHNDHKFTPLNLKNPTLQINEQLIDDKTKIDDWTNKSLHGRHRHDLWQQNVDKEASNAWLSRGELFPETEGFIIAIQDQVIETKNYRKYIIKNLPSDTCRKCSSASETIQHITGACKSIAQTDYKHRHDQVANIIHQKLAQQYNFIDTLTPYYKYNPETVLDNSTTKLYYDRAILTDRTIHFNRPDITLINKVTRTGYLIDIAVPNTHNLQTTIAEKLTKYIELKVEITRLWNLQKVSIVPIVISTTGVIPKQLHQSIKTIELPTSTYNLLQKAVILNTCRIVRKFLQCDSNTTPNAHNITHTTTAFGSRPSVLPSDSSLSIKAHHCSNLPPSCPCPLLTRVSVVRYLGIQLDACLSWKQHLKTLSGRIRKLIYLFKKLRVSANNDILKTVYLALCESILSYCIPVWGGAAKTDIIQVERAQRAVIKVIKKKPFRYPTRQLYIDFNTLTVRQLYILRTVLRKHLTLPKKINDSSIVKRRPAPVCPKIRAKTTFATRHYSYLSASLYTKLHKKLNIHELNSHNCNKITKQFLLTLDYDETETLIKPKPS

SEQ ID NO: 8815 - protein, 997 aa, Clostera curtula
MILYILFFSVVLVFFYLVKLFVLYLIYDNVLGRDSCIKPMSSLTSGTFTCNLCSKSFHCGKGLKIHTGKKHKTLTQPCLSSSLPVTVNNNNLTSSSCSNLHLHLSDLKRTIPLIKRIPRGARISVATKLTEAINKCVYTNSATDWSNLLKFSYSILHVKFKNELSLTQNIKNNCSSTLTAPIPSKLLNTFNLCKRVEDKVSDGDLKGAARLLFSNDSLSPDSSETLIALQERHPTAQDLASHYPTSSSPTDTSQCTQTTPPSASALVSTIYLQCTKKDIEKAIFSFKNGSASGLDGISPQHLKDLISKSVGDAGQNLLESLTSIVNSMLAGKVNIDITPILYGANLIALSKKDGGIRPIAVGSVFRRIASKIAVQYVSAKLQGHFAPIQLGFGVRGGCEAAVHATRTFLTNCDPSNVLLKLDLKNAFNSVNRVPMLQEIKNIIPELFSYLNQCYGEPSKLTYRTHEISSEVGCQQGDPLGPAIFSLAINSIVQNLTSKFNIWYLDDGTLGGTADTVLCDLKHIIKKFQAIGLQINFNKCELFLGDSLQNKNEIISQFNSVAQNITVVNKTSLFILGSPIFSESSTPALEKAINKFKENSDKLLQINPHSAFFILKFCLFVPKFTYLLRSSPLWTHKSYLLSIDNLLKSSVESIFNLSLSEKAWIQATLPIKFGGLGLRRISSLALPAFLSSIESTNSLCKQILLNSIQNTQLPIYEQALSSWHVSGPVRDPTVQKCWDDLACLATYQNLFLNSSGHESARLEAASRNESGLWLHAYPNINTGSCLDPNTIRIAIGLRLGVVLCTPHTCPCGVEVDAFGHHGLSCQKSYGRFSRHAALNDIIRRSLATINVPAILEPKGLVRDDGKRPDGMSLVPWVRGRALVWDATCVDTLAPSHIHGTSKRAGAAAETAELSKFHKYRGIGAEYIFITFGVETLGPWGPNALGLYKKLSKKLIEVSGDPRAGSFLGQRISLAIQRGNAASILGTLPHGPNLLNHLN

SEQ ID NO: 8816 - protein, 997 aa, Clostera curtula
MILYILFFSVVLVFFYLVKLFVLYLIYDNVLGRDSCIKPMSSLTSGTFTCNLCSKSFHCGKGLKIHTGKKHKTLTQPCLSSSLPVTVNNNNLTSSSCSNLHLHLSDLKRTIPLIKRIPRGARISVATKLTEVINKCVYTNSATDWSNLLKFSYSILHVKFKNELSLTQNIKNNCSSTLTAPIPSKLLNTFNLCKRVEDKVSDGDLKGAARLLFSNDSLSPDSSETLIALQERHPTAQDLASHYPTSSSHTDTSQCTQTTPPSASALVSTIYLQCTKKDIEKAIFSFKNGSASGLDGISPQHLKDLISKSVGDAGQNLLESLTSIVNSMLAGKVNTDITPILYGANLIALSKKDGGIRPIAVGSVFRRIASKIAVQYVSAKLQGQFAPIQLGFGVRGGCEAAVHATRTFLTNCDPSNVLLKLDLKNAFNSVNRVPMLQEIKNIIPELFSYLNQCYGEPSKLTYRTHEISSEVGCQQGDPLGPAIFSLAINSIVQNLTSKFNIWYLDDGTLGGTADTVLCDLKHIIKKFQAIGLQINFNKCELFLGDSLQNKNEIISQFNSVAQNITVVNKTSLFILGSPIFSESSTPALEKAINKFKENSDKLLQINPHSAFFILKFCLFVPKFTYLLRSSPLWTHKSYLLSIDNLLKSSVESIFNLSLSEKAWIQATLPIKFGGLGLRRISSLALPAFLSSIESTNSLCKQILLNSIQNTQLPIYEQALSSWHVSGPVRDPTVQKCWDDLACLATFQNLFLNSSGHESARLEAASRNESGLWLHAYPNINTGSCLDPNTIRIAIGLRLGVVLCTPHTCPCGVEVDAFGHHGLSCQKSYGRFSRHAALNDIIRRSLATINVPAILEPKGLVRDDGKRPDGMSLVPWVRGRALVWDATCVDTLAPSHIHGTSKRAGAAAETAELSKFHKYRGIGAEYIFIPFGVETLGPWGPNALGLYKKLSKKLIEVSGDPRAGSFLGQRISLAIQRGNAASILGTLPHGPNLLNYLN

SEQ ID NO: 8817 - protein, 997 aa, Clostera curtula
MILYILFFSVVLVFFYLVKLFVLYLIYDNVLGRDSCIKPMSSLTSDTFTCNLCSKSFHCGKGLKIHTGKKHKTPTQPCLSSSLPVTVNNNNLTSSSCSNLHLHLSDLKRTIPLIKRIPRGARISVATKLTEVINKCVYTNSATDWSNLLKFSYSILHVKFKNELSLTQNIKNNCSSTLTAPIPSKLLNTFNLCKRVEDKVSDGDLKGAARLLFSNDSLSPDSSETLIALQERHPTAQDLASHYPTSSSPTDTSQCTQTTPPSASALVSTIYLQCTKKDIEKAIFSFKNGSASGLDGISPQHLKDLISKSVGDAGQNLLESLTSIVNSMLAGKVNTDITSILYGANLIALSKKDGGIRPIAVGSVFRRIASKIAVQYVSAKLQGQFAPIQLGFGVRGGCEAAVHATRTFLTNCDPSNVLLKLDLKNAFNSVNRVPMLQEIKNIIPELFSYLNQCYGEPSKLTYRTHEISSEVGCQQGDPLGPAIFSLAINSIVQNLTSKFNIWYLDDGTLGGTADTVLCDFEHIIKKFQAIGLQINFNKCELFLGDSLQNKNEIISQFNSVAQNITVVNKTSLFILGSPIFSESSTPALEKAINKFKENSDKLLQINPHSAFFILKFCLFVPKFTYLLRSSPLWTHKSYLLSIDNLLKSSVESIFNLSLSEKAWIQATLPIKFGGLGLRRISSLALPAFLSSIESTNSLCKQILLDSIQNTQLPIYEQALSSWHVSGPVRDPTVQKCWDDLACLATFQNLFLNSSGHESARLEAASRNESGLWLHAYPNINTGSCLDPNTIRIAIGLRLGVVLCTPHTCPCGVEVDAFGHHGLSCQKSYGRFSRHAALNDIIRRSLATINVPAILEPKGLVRDDGKRPDGMSLVPWVRGRALVWDATCVDTLAPSHIHGTSKRAGAAAETAELSKFHKYRGIGAEYIFIPFGVETLGPWGPNALGLYKKLSKKLIEVSGDPRAGSFLGQRISLAIQRGNAASILGTLPHGPNLLNHLN

SEQ ID NO: 8818 - protein, 667 aa, Clostera curtula
MLAGKVNTDITPILYGANLIALSKKDGGIRPIAVGSVFRRIASKIAVQYVSAKLQGQFAPIQLGFGVRGGCEAAVHATRTFLTNCDPSNVLLKLDLKNAFNSVNRVQEIKNIIPELFSYLNQCYGEPSKLTYRTHEISSEVGCQQGDPLGPAIFSLAINSIVQNLTSKFNIWYLDDGTLGGTADTVLCDFEHIIKKFQAIGLQINFNKYELFLGDSLQNKNEIISQFNSVAQNITVVNKTSLFILGSPIFSESSTPALEKAINKFKENSDKLLQINPHSAFFILKFCLFVPKFTYLLRSSPLWTHKSYLLSIDNLLKSSVESIFNLSLSEKAWIQATLPIKFGGLGLRRISSLALPAFLSSIESTNSLCKQILLDSIQNTQLPIYEQALSSWHVSGPVRDPTVQKCWDDLACLATFQNLFLNSSGHESARLEAASRNESGLWLHAYPNINTGSCLDPNTIRIAIGLRLGVVLCTPHTCPCGVEVDAFGHHGLSCQKSYGRFSRHAALNDIIRRSLATINVPAILEPKGLVRDDGKRPDGMSLVPWVRGRALVWDATCVDTLAPSHIHGTSKRAGAAAETAELSKFHKYRGIGAEYIFIPFGVETLGPWGPNALGLYKKLSKKLIEVSGDPRAGSFLGQRISLAIQRGNAASILGTLPHGPNLLNHLN

SEQ ID NO: 8819 - protein, 958 aa, Clostera curtula
MSSLTSDTFTCNLCSKSFHCGKGLKIHTGKKHKTPTQPCLSSSLPVTVNNNNLTSSSCSNLHLHLSDLKRTIPLIKRIPRGARISVATKLTEAINKCVYTNSATDWSNLLKFSYSILHVKFKNELSLTQNIKNNCSSTLTAPIPSKLLNTFNLCKRVEDKVSDGDLKGAARLLFSNDSLSPDSSETLIALQERHPTAQDLASHYPTSSSPTDTSQCTQTTPPSASALVSTIYLQCTKKDIEKAIFSFKNGSASGLDGISPQHLKDLISKSVGDAGQNLLESLTSIVNSMLAGKVNTDITPILYGANLIALSKKDGGIRPIAVGSVFRRIASKIAVQYVSAKLQGQFAPIQLGFGVRGGCEAAVHATRTFLTNCDPSNVLLKLDIKNAFNSVNRVPMLQEIKNIIPELFSYLNQCYGEPSKLTYRTHEISSEVGCQQGDPLGPAIFSLAINSIVQNLTSKFNIWYLDDGTLGGTADTVLCDFEHIIKKFQAIGLQINFNKCELFLGDSLQNKNEIISQFNSVAQNITVVNKTSLFILGSPIFSESSTPALEKAINKFKENSDKLLQINPHSAFFILKFCLFVPKFTYLLRSSPLWTHKSYLLSIDNLLKSSVESIFNLSLSEKAWIQATLPIKFGGLGLRRISSLALPAFLSSIESTNSLCKQILLDSIQNTQLPIYEQALSSWHVSGPVRDPTVQKCWDDLACLATFQNLFLNSSGHESARLEAASRNESGLWLHAYPNINTGSCLDPNTIRIAIGLRLGVVLCTPHTCPCGVEVDAFGHHGLSCQKSYGRFSRHAALNDIIRRSLATINVPAILEPKGLVRDDGKRPDGMSLVPWVRGRALVWDATCVDTLAPSHIHGTSKRAGAAAETAELSKFHKYRGIGAEYIFIPFGVETLGPWGPNALGLYKKLSKKLIEVSGDPRAGSFLGQRISLAIQRGNAASILGTLPHGPNLLNHLN

SEQ ID NO: 8820 - protein, 997 aa, Clostera curtula
MILYILFFSVVLVFFYLVKLFVLYLIYDNVLGRDSCIKPMSSLTSGTFTCNLCSKSFHCGKGLKIHTGKKHKTLTQPCLSSSLPVIVNNNNLTSSSCSNLHLHLSDLKRTIPLIKRIPRGARISVATKLTEAINKCVYTNSATDWSNLLKFSYSILHVKFKNELSLTQNIKNNCSSTLTAPIPSKLLNTFNLCKRVEDKVSDGDLKGAARLLFSNDSLSPDSSETLIALQERHPTAQDPASHYPTSSSPTDTSQCTQTTPPSASALVSTIYLQCTKKDIEKAIFSFKNGSASGLDGISPQHLKDLISKSVGDAGQNLLESLTSIVNSMLAGKVNTDITPILYGANLIALSKKDGGIRPIAVGSVFRRIASKIAVQYVSAKLQGHFAPIQLGFGVRGGCEAAVHATRTFLTNCDPSNVLLKLDLKNAFNSVNRVPMLQEIKNIIPELFSYLNQCYGEPSKLTYRTHEISSEVGCQQGDPLGPAIFSLAINSIVQNLTSKFNIWYLDDGTLGGTADTVLCDLKHIIKKFQAIGLQINFNKCELFLGDSLQNKNEIISQFNSVAQNITVVNKTSLFILGSPIFSESSTPALEKAINKFKENSDKLLQINPHSAFFILKFCLFVPKFTYLLRSSPLWTHKSYLLSIDNLLKSSVESIFNLSLSEKAWIQATLPIKFGGLGLRRISSLALPAFLSSIESTNSLCKQILLNSIQNTQLPIYEQALSSWHVSGPVRDPTVQKCWDDLACLATYQNLILNSSGHESARLEAASRNESGLWLNAYPNINTGSCLDPNTIRIAIGLRLGVVLCTPHTCPCGVEVDAFGHHGLSCQKSYGRFSRHAALNDIIRRSLATINVPAILEPKGLVRDDGKRPDGMSLVPWVRGRALVWDATCVDTLAPSHIHGTSKRAGAAAETAELSKFHKYRGIGAEYIFIPFGVETLGPWGPNALGLYKKLSKKLIEVSGDPRAGSFLGQRISLAIQRGNAASILGTLPHGPNLLNHLN

SEQ ID NO: 8821 - protein, 939 aa, Notocelia uddmanniana
MSNLPGVACPHCPKVFAATRGLNVHISKIHKNVAIAHGSSGIVAASQFTSAGAGDEGLHSLPTLKRNVRVLKHIPKGARNLAAGRLAGIIDNCLRTNSLEDWFTLLSFSFTALRVPESTVQRQSLTSKVKDNIEAIRVYFPDEVSHKPQSLFRSIEAKVHDGDLRGAVRLLLSDSTLAPNNENTLRELKVKHPIPSRPLQLPAEPDLSTPFLIVSAPDVLNALGSFYNGSAAGLDGLRPQHLKELTSPSAGSNGPKLLESLTNLSNFLLRGMVHPQVCPYLYGASICALSKKDGSVRPIAIGNTIRRLVSKLCCRSVRDEMAVYLQPHQVGFGTPLGCEAAIHATRSFALTRDRTDNVIIKLDIKNAFNSVERDTLLEEVNSLVPSLYPFLFQCYSSPSNLFYNNNILFSQVGVQQGDPLGPLVFCLAIHKHVSSLDSPLNVWYLDDGTIGGPPGLVLEDLKKIPILPALSAIGLELNAGKCEIFHCSSTRSIADFEELLPGLKVIDSTSFTLLGAPIFPEGVPTIVKKKSDALASSLILLQQLSAHVALVLLRSSFSMPRMIYTLRTAPSWLFPQCIQDFDQILRCGLEAILNVSLNESQWVQAALPIRYGGLGIRHVNDVGLVAFIASAHASGELVTRILCLDGGKVQIPFLKEALVEWKLRCPDDARPTCLNTQRSWDDLLCKRTYEGLVEVAVGVDVARLKAVAEPESGAWLHALPSPHIGTLLNNDSLRIAAALRLGCSVCELHQCICGATVEANGHHGLSCGRCAGRFSRHQSINEIIRRALVSANLPSVLEPQGLSRMDGKRPDGLTLVPWARGRSLIWDATCVSTFAPSHLNLTLRKAGAAAESAAKLKHAKYSNLEPMYDFVPVAVETCGPWCSEAKLFLKKLGQRLRESGCDPRSGSYLVQKISLAVQRGNAASILGTFTPGACRSGIY

SEQ ID NO: 8822 - protein, 937 aa, Notocelia uddmanniana
MSNLPGVACPHCPKVFAATRGLNVHISKIHKNVAIAHGSSGIVAASQFTSAGAGDEGLHSLPTLKRNVRVLKHIPKGARNLAAGRLAGIMDNCLRTNSLEDWFTLLSFSFTALRVPESTVQRQSLTSKVKDNIEAIRVYFPDEVSHKPQSLFRSIEAKVHDGDLRGAVRLLLSDSTLAPNNESTLRELKVKHPIPSRPLQLPAEPDLSTPFLIVSAPDVINALGSFYNGSAAGLDGLRPQHLKELTSPSAGSNGPKLLESLTNLCNFLLRGMVHPQVCPYLYGASICALSKKDGSVRPIAIGNTIRRLVSKLCCRSVRDEMAVYLQPHQVGFGTPLGCEAAIHATRSFALTRDRTDNVIIKLDIKNAFNSVERDTLLEEVNSLVPSLYPFLFQCYSSPSNLFYNNNILFSQVGVQQGDPLGPLVFCLAIHKHVSSLDSPLNVWYLDDGTIGGPPGLVLEDLKKMLPALSAIGLELNAGKCEIFHCSSTRSIADFEELLPGLKVIDSTSFTLLGAPIFPEGVPTIVKRKSDALASSLILLQQLSAHVALVLLRSSFSMPRMIYTLRTAPSWLFPQCIQDFDQILRCGLEAILNVSLNESQWVQAALPIRYGGLGIRHVNDVGLVAFIASAHASGELVTRILCLDGGKVQIPFLKEALVEWKLRCPDDARPTCLNTQRSWDDLLCKRTYEGLVEVAVGVDVARLKAVAEPESGAWLHALPSPHIGTLLNNDSLRIAAALRLGCSVCELHQCICGATVEANGHHGLSCGRCAGRFSRHQSINEIIRRALVSANLPSVLEPQGLSRMDGKRPDGLTLVPWARGRSLIWDATCVSTFAPSHLNLTLRKAGAAAESAAKLKHAKYSNLEPMYDFVPVAVETCGPWCSEAKLFLKKLGQRLRESGCDPRSGSYLVQKISLAVQRGNAASILGTFTPGACRSGIY

SEQ ID NO: 8823 - protein, 937 aa, Notocelia uddmanniana
MSNLPGVACPHCPKVFAATRGLNVHISKIHKNVTIAHGSSGIVAASQFTSAGAGDEGLHSLPTLKRNVRVLKHIPKGARNLAAGRLAGIIDNCLRTNSLEDWFTLLSFSFTALRVPESTVQRQSLTSKVKDNIEAIRVYFPDEVSHKPQSLFRSIEAKVHDGDLRGAVRLLLSDSTLAPNNESTLRELKVKHPIPSRPLQLPAEPDLSTPFLIVSAPDVLNALGSFYNGSAAGLDGLRPQHLKELTSPSAGSNGPKLLESLTNLCNFLLRGMVHPQVCPYLYGASICALSKKDGSVRPIAIGNTIRRLVSKLCCRSVRDEMAVYLQPHQVGFGTPLGCEAAIHATRSFALTRDRTDNVIIKLDIKNAFNSVERDTLLEEVNSLVPSLYPFLFQCYSSPSNLFYNNNILFSQVGVQQGDPLGPLVFCLAIHKHVSSLDSPLNVWYLDDGTIGGPPGLVLEDLKKMLPALSAIGLELNAGKCEIFHCSSTRSIADFEELLPGLKVIDSTSFTLLGAPIFPEGVPTIVKKKSDALASSLILLQQLSAHVALVLLRSSFSMPRMIYTLRTAPSWLFPQCIQDFDQILRCGLEAILNVSLNESQWVQAALPIRYGGLSIRHVNDVGLVAFIASAHASGELVTRILCLDGGKVQIPFLKEALVEWKLRCPDDARPTCLNTQRSWDDLLCKRTYEGLVEVAVGVDVARLKAVAEPESGAWLHALPSPHIGTLLNNDSLRIAAALRLGCSVCELHQCICGATVEANGHHGLSCGRCAGRFSRHQSINEIIRRALVSANLPSVLEPQGLSRMDGKRPDGLTLVPWARGRSLIWDATCVSTFAPSHLNLTLRKAGAAAESAAKLKHAKYSNLEPMYDFVPVAVETCGPWCSEAKLFLKKLGQRLRESGCDPRSGSYLVQKISLAVQRGNAASILGTFTPGACRSGIY

SEQ ID NO: 8824 - protein, 937 aa, Notocelia uddmanniana
MSNLPGVACPHCPKVFAATRGLNVHISKIHKNVAIAHGSSGIVAASQFTSAGAGDEGLHSLPTLKRNVRVLKHIPKGARNLAAGRLAGIIDNCLRTNSLEDWFTLLSFSFTALRVPESTVQRQSLTSKVKDNIEAIRVYFPDEVSHKPQSLFRSIEAKVHDGDLRGAVRLLLSDSTLAPNNESTLRELKVKHPIPSRPLQLPAEPDLSTPFLIVSAPDVLNALGSFYNGSAAGLDGLRPQHLKELTSPSAGSNGPKLLESLTNLSNFLLRGMVHPQVCPYLYGASICALSKKDGSVRPIAIGNTIRRLVSKLCCRSVRDEMAVYLQPHQVGFGTPLGCEAAIHATRSFALTRDRTDNVIIKLDIKNAFNSVERDTLLEEVNSLVPSLYPFLFQCYSSPSNLFYNNNILFSQVGVQQGDPLGPLVFCLAIHKHVSSLDSPLNVWYLDDGTIGGPPGLVLEDLKKMLPALSAIGLELNAGKCEIFHCSSTRSIADFEELLPGLKVIDSTSFTLLGAPIFPEGVPTIVKKKSDALASSLILLQQLSAHVALVLLRSSFSMPRMIYTLRTAPSWLFPQCIQDFDQILRCGLEAILNVSLNESQWVQAALPIRYGGLGIRHVNDVGLVAFIASAHASGELVTRIFCLDGGKVQIPFLKEALVEWKLRCPDDARPTCLNTQRSWDDLLCKRTYEGLVEVAVGVDVARLKAVAEPESGAWLHALPSPHIGTLLNNDSLRIAAALRLGCSVCELHQCISGATVEANGHHGLSCGRCAGRFSRHQSINEIIRRALVSANLPSVLEPQGLSRMDGKRPDGLTLVPWARGRSLIWDATCVSTFAPSHLNLTLRKAGAAAESAAKLKHAKYSNLEPMYDFVPVAVETCGPWCSEAKLFLKKLGQRLRESGCDPRSGSYLVQKISLAVQRGNAASILGTFTPGACRSGIY

SEQ ID NO: 8825 - protein, 937 aa, Notocelia uddmanniana
MSNLPGVACPHCPKVFAATRGLNVHISKIHKNVAIAHGSSGIVAASQFTSAGAGDERLHSLPTLKRNVRVLKHIPKGARNLAAGRLAGIMDNCLRTNSLEDWFTLLSFSFTALRVPESTVQRQSLTSKVKDNIEAIRVYFPDEVSHKPQSLFRSIEAKVHDGDLRGAVRLLLSDSTLAPNNESTLRELKVKHPIPSRPLQLPAEPDLSTPFLIVSAPDVLNALGSFYNGSAAGLDGLRPQHLKELTFPSAGSNGPKLLESLTNLCNFLLRGMVHPQVCPYLYGASICALSKKDGSVRPIAIGNTIRRLVSKLCCRSVRDEMAVYLQPHQVGFGTPLGCEAAIHATRSFALTRDRTDNVIIKLDIKNAFNSVERDTLLEEVNSLVPSLYPFLFQCYSSPSNLFYNNNILFSQVGVQQGDPLGPLVFCLAIHKHVSSLDSPLNVWYLDDGTIGGPPGLVLEDLKKMLPALSAIGLELNAGKCEIFHCSSTRSIADFEELLPGLKVIDSTSFTLLGAPIFPEGVPTIVKKKSDALASSLILLQQLSAHVALVLLRSSFSMPRMIYTLRTAPSWLFPQCIQDFDQILRCGLEAILNVSLNESQWVQAALPIRYGGLGIRHVNDVGLVAFIASAHASGELVTRILCLDGGKVQIPFLKEALVEWKLRCPDDARPTCLNTQRSWDDLLCKRTYEGLVEVAVGVDVARLKAVAEPESGAWLHALPSPHIGTLLNNDSLRIATALRLGCSVCELHQCICGATVEANGHHGLSCGRCAGRFSRHQSINEIIRRALVPANLPSVLEPQGLSRMDGKRPDGLTLVPWARGRSLIWDATCVSTFAPSHLNLTLRKAGAAAESAAKLKHAKYSNLEPMYDFVPVAVETCGPWCSEAKLFLKKLGQRLRESGCDPRSGSYLVQKISLPVQRGNAASILGTFTPGACRSGIF

SEQ ID NO: 8826 - protein, 937 aa, Notocelia uddmanniana
MSNLPGVACPHCPKVFAATRGLNVHISKIHKNVAIAHGSSGIVAASQFTSAGAGDEGLHSLPTLKRNVRVLKHIPKGARNLAAGRLAGIIDNCLRTNSLEDWFTLLSFSFTALRVPESTVQRQSLTSKVKDNIEAIRVYFPDEVSHKPQSLFRSIEAKVHDGDLRGAVRLLLSDSTLAPNNESTLRELKVKHPIPSRPLQLPAEPDLSTPFLIVSAPDVLNALGSFYNGSAAGLDGLRPQHLKELTSPSAGSNGPKLLESLTNLCNFLLRGMVHPQVCPYLYGASICALSKKDGSVRPIAIGNTIRRLVSKLCCRSVRDEMAVYLQPHQVGFGTPLGCEAAIHATRSFALTRDRTDNVIIKLDIKNAFNSVERDTLLEEVNSLVPSLYPFLFQCYSSPSNLFYNNNILFSQVGVQQGDPLGPLVFCLAIHKHVSSLDSPLNVWYLDDGTIGGPPGLVLEDLKKMLPALSAIGLELNAGKCEIFHCSSTRSIADFEELLPGLKVIDSTSFTLLGAPIFPEGVPTIVKKKSDALASSLILLQQLSAHVALVLLRSSFSMPRMIYTLRTAPSWLFPQCIQDFDQILRCGLEAILNVSLNESQWVQAALPIRYGGLGIRHVNDVGLVAFIASAHASGELVTRILCLDGGKVQIPFLKEALVEWKLRCPDDARPTCLNTQRSWDDLLCKRTYEGLVEVAVGVDVARLKAVAEPESGAWLHALPSPHIGTLLNNDSLRISAALRLGCSVCELHQCICGATVEANGHHGLSCGRCAGRFSRHQSINEIIRRALVSANLPSVLEPQGLSRMDGKRPDGLTLVPWARGRSLIWDATCVSTFAPSHLNLTLRKAGAAAESAAKLKHAKYSNLEPMYDFVPVAVETCGPWCSEAKLFLKKLGQRLRESGCDPRSGSYLVQKISLAVQRGNAASILGTFTPGACRSGIY

SEQ ID NO: 8827 - protein, 933 aa, Hedya salicella
MGNLTESSCPHCCRVFAGSRGLNVHISKVHKDVGVSHGSENIAAGIRSDSANGTSLESLPILKRDVRVLKHIPKGARSLAAGKLCGIIDKCLETNSLEDWFTLLSFSFTALRVPNGTVQKSLTAKVKENIEGNCVYFPDNVKFKPKSIYSSIEAKVHEGDLRGAARLLMSDSSLAPNDDNTLRALKNKHPSPSRQHVVPAEPDLSTPFLSVTTSDMVNALGSFYNGSAAGLDGLRPQHLKELTSSSAGCNGTKLLDSLTRLCNFLLRGMVHPQVCPYLYGASMCALEKKTGDIRPIAIGNTIRRLVAKLGCHSVREKMADYLQPHQVGFGTPLGCEAAIHATRSFALAYDNEDKVILKLDIKNAFNSLERDTLLKEVKDLVPSLYPFLYQCYASPSKLFYNCNALSSQVGAQQGDPLGPLIFCLAIQKCITAVGSPLNVWYLDDGTIGGEPQEVLSDVKMLLPILSAVGLEVNAEKCELFPCSSTVPISGLQSVLPGLKIVDRGSFSLLGAPIFSEGVPAAFKKKSDALSASLTHLQQLSAHVALVLFRSSFSMPRMTYILRTAPSWLFPQEILEFDQILQHGLETLLNVRFVESQWVQAVLPVRYGGLGVRQVQDIGLVAFLASTHASMELVTRIFSVNGDNIEVPFLKEALFEWKVRCPNDARPDNLKSQRSWDDILSRQTYGGLLETASGVDEARLRAVVEPESGAWLHALPSSHLGTLLDNESLRVGVALRLGCSVCEHHQCICGASVEANGHHGLSCVRSAGRFSRHYAINDIIRRAMVSANMPCILEPQGLSRTDGRRPDGLTLVPWAKGRSLIWDATCVSTFAPSHLGHTISKAGTAAEIAAKHKHAKYSNLEPIYDFVPVAVETSGPWCSEAKSFIKKIGQRLRERGCDPRSGSYLVQQISLAIQRGNAASIFGTFAPGAGQAGV

SEQ ID NO: 8828 - protein, 933 aa, Hedya salicella
MGNLTESSCPHCCRVFAGSRGLNVHISKVHKDVGVSHGSENIAAGIRSDSANGTSLESLPILKRDVRVLKHIPKGARSLAAGKLCGIIDKCLETNSLEDWFTLLSFSFTALRVPNGTVQKSLTAKVKENIEGNCVYFPDNVKFKPKSIYSSIEAKVHEGDLRGAARLLMSDSSLAPNDDNTLRALKNKHPSPSRQHVVPAEPDLSTPFLSVTTSDMVNALGSFYNGSAAGLDGLRPQHLKELTSSSAGCNGTKLLDSLTRLCNFLLRGMVHPQVCPYLYGASMCALEKKTGDIRPIAIGNTIRRLVAKLGCHSVREKMADYLQPHQVGFGTPLGCEAAIHATRSFALAYDNEDKVILKLDIKNAFNSLERDTLLKEVKDLVPSLYPFLYQCYASPSKLFYNCNALSSQVGAQQGDPLGPLIFCLAIQKCITAVGSPLNVWYLDDGTIGGEPQEVLSDVKMLLPILSAVGLEVNAEKCELFPCSSTVPISGLQSVLPGLKIVDRGSFSLLGAPIFSEGVPAAFKKKSDALSASLTHLQQLSAHVALVLFRSSFSMPRMTYILRTAPSWLFPQEILEFDQILQHGLETLLNVRFVESQWVQAVLPVRYGGLGVRQLQDIGLVAFLASTHASMELVTRIFSVNGDNIEVPFLKEALFEWKVRCPNDARPDNLKSQRSWDDILSRQTYGGLLETASGVDEARLRAVVEPESGAWLHALPSSHLGTLLDNESLRVGVALRLGCSVCEHHQCICGASVEANGHHGLSCVRSAGRFSRHYAINDIIRRAMVSANMPCILEPQGLSRTDGRRPDGLTLVPWAKGRSLIWDATCVSTFAPSHLGHTISKAGTAAEIAAKHKHAKYSNLEPIYDFVPVAVETSGPWCSEAKSFIKKIGQRLRERGCDPRSGSYLGQQISLAIQRGNAASIFGTFAPGAGQAGV

SEQ ID NO: 8829 - protein, 933 aa, Hedya salicella
MGNLTESSCPHCCRVFAGSRGLNVYISKVHKDVGVSHGSENIAAGIRSDSANGTSLESLPILKRDVRVLKHIPKGARSLAAGKLCGIIDKCLETNSLEDWFTLLSFSFTALRVPNGTVQKSLTAKVKENIEGNCVYFPDNVKFKPKSIYSSIEAKVHEGDLRGAARLLMSDSSLAPNDDNTLRALKNKHPSPSRQHVVPAEPDLSTPFLSVTTSDVVNALGSFYNGSAAGLDGLRPQHLKELTSSSAGCNGTKLLDSLTRLCNFLLRGMVHPQVCPYLYGASMCALEKKTGDIRSIAIGNTIRRLVAKLGCHSVREKMADYLQPHQVGFGTPLGCEAAIHATRSFALAYDNEDKVILKLDIKNAFNSLERDTLLKEVKDLVPSLYPFLYQCYASPSKLFYNCNALSSQVGAQQGDPLGLLIFCLAIQKCITAVGSPLNVWYLDDGTIGGEPQEVLSDVKMLLPILSAVGLEVNAEKCELFPCSSTVPISGLQSVLPGLKIVDRGSFSLLGAPIFSEGVPAAFKKKSDALSASLTHLQQLSAHVALVLLRSSFSMPRMTYILRTAPSWLFPQEILEFDQILQHGLETLLNVRFLESQWVQAVLPVRYGGLGVRQVQDIGLVAILASTHASMELVTRIFSVNGDNIEVPFLKEALFEWKVRCPNDARPDNLKSQRSWDDILSRQTYGGLLETASGVDEARLRAVVEPESGAWLHALPSSHLGTLLDNESLKVGVALRLGCSVCEHHQCICGASVEANGHHGLSCVRSAGRFSRHYAINNIIRRAMVSANMPCILEPQGLSRTDGRRPDGLTLVPWAKGRSLIWDATCVSTFAPSHLGHTISKAGTAAEIAAKHKHAKYSNLEPIYDFVPVAVETSGPWCSEAKSFIKKIGQRLRERGCDPRSGSYLVQQISIAIQRGNAASIFGTFAPGAGQAGV

SEQ ID NO: 8830 - protein, 943 aa, Pammene fasciana
MCSRATGTLPNSAPPPTSDVQCPLCPPGRLFKGQRGLKIHSSRFHGTNTSHPFSTHTQNSDVGTRPGLDTLPSLKKHVRVLKHIPKGARSLAAGKLAAVIENCLRTNSIDDWYLLLSFSFTALRVPESSTHKSLTAKVKDNIESTYAYFPDEVSYKPQSLYRIIESKVHEGDLRGAVRLLLSESTLAPNNSDTLRELENKHPPPSRQLAIPAEPNISSPYLIITNSEVSSALASFYNGSAAGLDGLRPQHVKELTSPSAGSNGPKLLESLTRLCNFMLRGMVHPQVCPYLYGASVCALSKKDGGVRPIAIGNTIRRLVAKICCQSVRDQMATYLQPHQVGFGTPLGCEAAIHATRSYAISQNDDDKIILKLDLKNAFNSVERDTMLEEVKDLVPSLYPFLYQCYASPSNLFYNCSALSSQVGCQQGDPLGPLIFCLAIQKQISILDSPLNVWYLDDGTIGGPANVVLNDLKRLLPALSIIGLEVNSGKCEFFPCSSSASISELQALLPDLKQIDTASFSLLGAPIFPEGIPSTIKKKGDALSSSLLHLQQLSAHVALVLLRNCFSMPRMIYTLRTAPTWLFPQNIHDFDQTLRHGLEVILNVSLSESQWSQSSLPIRYGGLGIRRVHDIGLVAFLASAHASMELVTRILSINGGNVRIPFLEEAFYEWKVRCPNDARPDNLKVQRSWDDILSKKTYDGLLEATAGVDAARLKAVVLPESGAWLHALPSSHLGTLLDNDSLRIGVALRLGSDACERHQCVCGAIVEKNGHHGLSCVRCAGRFSRHQSINDTIRRALVSVNVPCVLEPQGLNRTDGRRPDGLTLVPWARGRSLIWDATCVSTFAPSHLTHTVRKAGAAAENAAKLKHNKYSNLEPAYNFIPVAVETSGPWCAEAKSFIRSLGQRLRDKSGDPRSGAYLVQQISLAIQRGNAGSIFGTFTPGTCRP

SEQ ID NO: 8831 - protein, 933 aa, Hedya salicella
MGNLTESSCPHCCRVFAGSRGLNVHISKVHKDVGVSHGSENIAAGIRSDSANGTSLESLPILKRDVRVLKHIPKGARSLAAGKLCGIIDKCLETNSLEDWFTLLSFSFTALRVPNGTVQKSLTAKVKENIEGNCVYFPDNVKFKPKSIYSSIEAKVHEGDLRGAARLLMSDSSLAPNDDNTLRALKNKHPSPSRQHVVPAEPDLSTPFLSVTTSDMVNALGSFYNRSAAGLDGLRPQHLKELTSSSAGCNGTKLLDSLTRLCNFLLRGMVHPQVCPYLYGASMCALEKKTGDIRPIAIGNTIRRLVAKLGCHSVREKMADYLQPHQVGFGTPLGCEAAIHATRSFALAYDNEDKVILKLDIKNAFNSLERDTLLKEVKDLVPSLYPFLYQCYASPSKLFYNCNALSSQVGAQQGDPLGPLIFCLAIQKCITAVGSPLNVWYLDDGTIGGEPQEVLSDVKMLLPILSAVGLEVNAEKCELFPCSSTVPISGLQSVLPGLKIVDRGSFSLLGAPIFSEGVPAAFKKKSDALSASLTHLQQLSAHVALVLFRSSFSMPRMTYILRTAPSWLFPQEILEFDQILQHGLETLLNVRFLESQWVQAVLPVRYGGLGVRQVQDIGLVVFLASTHASMELVTRIFSVNGDNIEVPFLKEALFEWKVRCPNDARPDNLKSQRSWDDILSRQTYGGLLETASGVDEARLRAVVEPESGAWLHALPSSHLGTLLDNESLRVGVALRLGCSVCEHHQCICGASVEANGHHGLSCVRSAGRFSRHYAINDIIRRAMVSANMPCILEPQGLSRTDGRRPDGLTLVPWAKGRSLIWDATCVSTFAPSHLGHTISKAGTAAEIAAKHKHAKYSNLEPIYDFVPVAVETSGPWCSEAKSFIKKIGQRLRERGCDPRSGSYLVQQISLAIQRGNAASIFGTFAPGAGQAGV

SEQ ID NO: 8832 - protein, 973 aa, Leptopilina heterotoma
MQLRKRDRNVKDRWTEEEKNMMARREAEIISSDPKCFINQELQKTFSNRTIESIKGQRRPQAYKDRVQRYLELLTPDSSISESESMESLESASSDSSAISSADNNSIFIEYFRDLPPLDFDNPLALQLNNICGLVNVRSREEILVDIGLIVRKIFFPSVTKSRGHQGHRDANRSEVLSLSSKAKRRQDFARIQDLWKRDRGKCIKRILSDELDQVEGVPQDLMVPFWKATFTRDISSSPLYANQDTEISDLWQPISALEVARSFPPNKTAPGYDGVPSSALRAVPTEVLVRIFNIFMWCRDVPQFLKLSRTVLIPKKKGSMDPADYRPLTVSSVIIRSYHRVLAGRLKRIKLDTRQRGFTDFDGCAENVSLLDAIFRHHHKYFKSFYLASLDVRKAYDSVTHESIQSVLKAKGVPSPFREYINTLYQTSDTVLQHGGWTSSKIHPTCGVKQGDPMSPCLFNLVMDGLFDRVPSEIGVDLGNLKVNVIAFADDLILVASTKVGLQVLLDKISEFLLQCGLEINPSKSCTVSIQNIPGEKKVVVDSKSSFKVRGCNIPPLKRSSDWKYLGIPFTPEGKVLSDVKGLLQTSLEKLTKAPLKPQQRLWALRSNVLPSCQYQLSMGETTLGYLRKIDRMVRHYVRLWLHLPNDCPNAFFHASVSDGGLGVRSFRWAAPLERVTRLGRLMECFGGSGRLSDNFLRDQINKSEIRLRTCENIILSSKQAMEAWWASRLYKMVDGGALKDSRRVLGQHNWVADGTRFLSGKDFINLIRLRIGAIPTRSRTARGQRKDRICRAGCNVPETSNHVLQLCHRTHDPRIKRHDALVAYVAKKLRKSEFSVAVESEYLTSSGLRKPDIVATSGSTCLVIDAQVVSEQTDLVRADALKVRKYKHDCNLVDVIKSSSEVPGLKVVVLSVTLNWRGVWSVSSAASLERWGVISKGDLKIISSRVLLGSHMIWSVFNTSTSVQHHGRRRR

SEQ ID NO: 8833 - protein, 1189 aa, Aphidius ervi
MADLSVGSDGLLVDETAIEMDMNMIIQATTLNLPIGNGAECPVCIETGRSFYFLNEKDIIKHLEDSHPTVVVTLKCICDKVVKNYRGWAVHKNYCKGPTEDVPLLLEFPCTICERSFDTKIGLSMHERHEHPDLRNQKRTEEGNKEKRKSGRKNYVWTEEETQEFERVCRDENGLNLRSNVLKERFFPNRSITQIRTKKMAIKKRMEQLLPLQEEVIDPPRDENIIHPVIDLEEEEEENLLYAAAELEGATQEPELVNEMEESPIETQQEQENNTDQDEWESNMTNFIKSIQLDASNPPESIAIILRDLWEQEYASKEEKIEKLNSFIADELTSVILGRNPKEKDTGKKDLQKNKVTTSAKHCRKHNRAKDVGINQRNKNATNKGRHSNHVNRQRFAFARCQDLYNNCPRKLASFVMKGDFSFTEIKQDPPSKISVQEVYSELWGMTGPQNIEIGTHPENEKDIRTFFQPINGETIKKRLKRMKSNSASGLDGIKKGHLLKTGVNNLLLVLFNILILEGLFPTCWKKNRTTLIPKEGKDLADAKNWRLITVGSIMSRLYTGILDGKLRGTIVQSTRQKGFSSEDGCRLNIAILDHKIKHMKREVGGVVTVLDVSKAFDTVPHSAINPALKRKGVPQHLIEIIKKMYLKCTTNIKSCDGLTEIELKRGVKQGDPLSPLIFNLIIEPILVKLQNETTGIGHQEEAVAALAFADDIVLLGKNKEEAAQQLSMVKDYLDMLGMSLAATKCQTFQIIPNNKTWYLQDPGLFVGEDKIPMLGPEDMTKYLGAKVNPWKGLVKGQEINSILSIIKNVQKLKLKPIQKVDLLQTYIFPRFIYGLSVNTPARTTLTDLDKMIRNEIKKILHLPMSISTGFMYSPRSNSGLGLLNFEKTILLSSLRSGVKIRASKDPALRSLTENTNLRNIWSKIERNLGANKVIETLDDCESLKRDKRKEYINNWANLETQGRGVGDFRKDRIGNLWLSNPALIRGSRLIDAIRIRTNTFGTRVVLSQSNPGLNVMCRRCNLVPETLGHILGQCQYTKSAVIRRHNEVRDYVAGIMMKNKECKVLVEPEIVQSDTILKPDLVFVLPNEVIVADVTIRYEKDHYLREAATEKKKKYFNTARYLQGQQERESSRVIPIVIGSRGAIPSSTIKALKRLGFKRGDFITMSMISLRISIEIANAFIDYGREIF

SEQ ID NO: 8834 - protein, 804 aa, Sinella curviseta
MLPTSSPKNQQSSLEKIVTEKVKDFDTRGAVRLISSDDSLAPFNDETLQLLRDKHPSGSRDLTSQEPPDDSTKAPLLSEEIVRKAVNGFRSGSAPGVDGFRPQYLKDIISVSAGEAGKRALTSLTELCNFMLAGQVNSDVTPILYGASLCALTKKTGGIRPIAVGNVFRRLVGKLACTVAKKDLLLYLTPKQLGVATKLGCETCIHAVRTYVHHPQNTNKVILKIDFKNAFNSIDRISMLSEIRCQVPSLYPFLYQCYHKASHLFFGKDLISSEVGCQQGDPCGPMAFSLTIHQIVQSLSTDLNLWYMDDATLGDDPEIVLENFKMLIQLAEKLGLTINPTKCELHFINGNPDEKVINMFSSISPGIKITSKENLELLGSPIYEEGFVTYTRNKIETLQLLIKRLDNLPSHVSYFLLKNCLFIPKLSYLIKTSPFWKFPALMDEMDNYLRNALETTLNISISDNQWNLSTLPITYAGLGIRKISDLALPAFLASSHGCRNLVSQILSFMDSEIPTHHFEEAMILWNALNSDQVPPVPHIQRNWDIINVERIFLELNPSSPSDQARLLALLEPESGAWLQAIPSDNIGTFMDNHTFRTCVALRLGCNIYKQHICHCNAVVEENAIHGLSCTQSKGRIPRHNELNMIIHRALTSVNIASTLEPLGLSRDDGKRPDGITLIPWCKGQKLVWDATCVDTLAMSYLPKTSEKAGSAAEVACKRKHEKYTRIESSYYIFKALAFETLGPWAEETKSFIDVLGALLIKESGDPRAKHYLHQRISLAIQRGNAASILGTLPLSIPMDEIFIL

SEQ ID NO: 8835 - protein, 1040 aa, Sinella curviseta
MSLPPSWKKRSDDTNLSPEPIIDDSTPQVSTYCFCKKPDDGNPMIKCNTCREWFHSNCVNLTLSQVKQLAKSKKKPWFCPKCFTDPKVTTPSSGTRSQPVSPPATACSGTIRIPCPFSPYRTFKSQKRLDNHLKKKHNTSTEDCIDSQNGNDPVSSLKENLVTMKEETQTLRRIPKGARPTVADKFSSVVNEVVSQNSINAWSNLLLFSFMTLSVNDDNKRRSLTVKIKENVNTFKLPSKSRKKHSRSSFPTVVKAKVKDFDIKGAVRLLSSDDTIAPFNEETLTLLQEKHPYSSHDLSFPEPPDISHSCPLVSEDLVKKAVNSFHCGSAPGIDGFRPEYMKDLLSHSAGEAGKRALTALTLLCNFMLAGKVNQEITPILYGASLCALSKKTGGIRPIAVGSFFRRLVSKVSCSMVQNDLALYLSPNQLGVATKLGCEICVHAVRSYTHSPNNSGKVLLKIDFSNAFNSIRRDHMLAEVRDHVPNLFPYLHQCYRESSHLFFGKHQISSAVGCQQGDPCGPMVFSLTIHQIVQALSTELNLWYMDDATLADEPETVLDNFKTLIRLAKEVGLEINPSKCELFFLSGQHNEEICRQFNEISPGIRIVTKESLELLGAPIFGEGVIAVVKKKIDSLTLMINRLERIDAHIAYFLLRNCFFIPKLSYLLRTSPLWNYQSIMEEIDTYLRSSLNSILNIQMDDEQWTLATLPINYGGLGIRKVSDVSLPAFLASTSGCRNLVSQILHFMDNEISIHYTEEAKQLWKELNDDLVPQVPHYQKNWDLINIERIVTQLASVNPSDKARLLALKERESNAWLQAIPSENIGTFLDCQSFKTCIALRLGCKIYKEHFCHCSTIVKDDGHHGLSCTMSKGRIPRHNELNQIIHRALSSVNIASSLEPVGLSRDDGKRPDGVTLIPWSKGQKLVWDATCVDTLAESYLPKTSEKAGSAAELACKRKHDKYTQIESSHFIFKALAFETLGPWAEESKSFIDTLGSLLIKESGDLRAKHFLYQRISLAIQRGNAASILGTLPHTIPMDEIFIL

SEQ ID NO: 8836 - protein, 1238 aa, Nephromyces sp.
MMELRSKIKNPNGVNEAEPTFGGLSPGMVNVRKQALPGRHSTTAFNNKTSRPNNALDNQNELDVQPDSFAPASSSQNKSKNLKKLCRRKWSVEEYREIVWCYFYSLKYYNNSNVTENTYKTWKTRNVEVNNSTKMDKIKLSNLRRWIIQNKKLSADELHNMEIDVDTSIKENGFTIDITDNLPDLNEVLQNNSSKTPSLSSARSHNHSQSEVSSEIKKDDNYLKIKQDIEDEINKTIHMKFEERPRLFKFKINSKVKKDITIANQILHDLLPSYLNSNTDTEMDLNSLTKLNAIIYATSLVITNYHAGVQRLKTNRKSKKNKLKPWEQRLTNKIKQLRADISKLESLKTRSANTKKLKQIKRYFETKFNVNFDQESKIVEIKEQLIMSLQAKAERLKRYQKRSNQFFQNKQFIEDTKQFYNNLQSNTIKVENPPTKENLVEFWGNIWGKEEKHNESAEWISEVELCTERIIEQDWCNITQDEIKTMIKTTSNWKSAGMDKIRNYWLKYLTSTHIYLAKEFNKILENLNILTKTNWLTTGVTYLIPKNKDTTDPKNFRPITCLNTIYKLLTKILSERTYKHVINYLPEEQKGYQKGTRGCKDQIILNKSILEDCFKRKKNLSMAWIDYRKAFDSVPHSWIMQVLKMYKINAKLTKFISKLMLNWTTSLELKYNNGQLKTDTIKIKSGIYQGDSFSPLLFCMALAPLSILIENSGIGYDLGNKTRSTVHHLLYMDDLKIFAKNETQLTEQLKIIQTFSNDIRMNFGIEKCAKATFIKGKQEKTSGIELNIDTYIKNLDSEEIYKYLGIEEGSNIQHKLVKFKVKKEYLKRVRSVLKSELNSKHKITAINTLAIPLVAYGFGIVNWTIAELRTLDRKTRKYLTIHRCHHPKADVERLYISNDCGGRGLLNVEQTYKREIIGLNEYFHSKSSKYYEIIKQFDENKLKYSIKKQSEKFLREMSINTNMETSAKKLYKHLSNLKHCETWKNKKLHGQFANYISRPHVNIPLSFTWLKGSGLKAESEGFIFAAQDQSLNTRYYQNKILKMNVDPKCRMCKSKLETIEHIISGCTVLAPNEYTHRHNNVGKYIHLELCKYFNIEQEASKWYEHKPEAVCKNKSVTILWDMPVITDHSIKANRPDIIIKNHKENTCTLIDVAIPSDYNIALKEAEKISKYCDLKFEIGKMWKMKTKIVPIVIGATGIVKHDILENIDKLPGNIKLDQLQKITLLGTVHILRKFLSRE

SEQ ID NO: 8837 - protein, 977 aa, Tuta absoluta
MSLAVPATVQPNADDIPSSPSGDADEYLRCELCTEPRFFKGRRGLKIHMSRIHRVRVSPSVSPVPNRSQNNTVSTPGVDGLQNDSPDLPLWKLLSGFKNNVPVVKRIPRGARFAVASALRKTIDTVVTKNDRTSWVDLLTFTYRTLHVSKEGKSASLIKKIKGNCSAPPALHDFDLITNAPTSFNVLKRVEDKVNDGDLKGAAQLLFSSDVLAPDNSETLDALHSKHPSPLAVTQLPVPPTGSDTTPVVTVDDVENALMSFKSGSAAGLDGLSPQHLKDLITCSIGDVGRNLLQSLVSLVSLMLSGKVLSEVTDLFYGANLVALKKKDGGIRPIAVGNALRRLVSKICCKKVLPFLSSKFEPKQLGFGIKGGCEAAVHATRAFLRLNGGEVLLKVDVKNAFNTVDRGVLLNAVKEHIPAIYPYLHQCYGAPTKLLYKDNFLMSASGCQQGDPLGPAIFSLAIHPIISALNSDLNLWYLDDETLGGSAHTVAADLRALREAFAVIGLELNNAKCELFVHPTVDSVTRSSVIANFTSLAPDIKILENDSLRLLGAPILDEALPSYIEEQIQHFQVSSDRLHKINSHMALFIVRFCLFVPKFMYVLRCTQLWKFQNLMQGLDRTIRETLCTILNCALDDTAWIQASLPVRFGGLGIRGVTSVSLPAFLSSVHSASLLCGKILSPSLGSVEISGLAEAVAVWRESCDEMPVALHSQKQWDEPLCKLVLKSLISGCSNSVERARILAVSERESGLWLQALPSANLGTLLDDCTLSLIVGLRLGTEINEPHKCICGEAVNRLGRHGLSCQRSAGRQSRHASLNDIIRRALISAKVPAVLEPNGLFRADGKRPDGMSMIPWKLGKCVVWDATCVDTLAPTHVPSTSRCVGAAAAAAEVLKRRKYVDLLNKYVFVPFAVETLGPWGSEAKALISDISARLREASGDPRSGSYLAQRLSLAIQRGNAASLLGTLPRGDALEGIYYL

SEQ ID NO: 8838 - protein, 969 aa, Tuta absoluta
MMSLSVPSVQHGVDDSLGSRSPDMRCEICFKYFKGIRGLNIHMGIKHRDRVSPSVSPIPNSRVSVAPDIGGLQNDSPDLPLWQRMGHLKTNISVVKRIPRGARFAVASALSKCIDSVVLKNDGAGWEDLLTFAYRTLHVNNDGLSVSLTKKNKANCVSPSSLDDFDLVSKRPNNSNVLKSIENKVNDGDLKGAAQLLFSNDALAPDNEETLSALRSKHPAPTVSAPLPVPPTGCDASPVVTEDDVRDALMSFKSGSAAGLDGLSPQHLKDLIGCSLGDVGKTLVVSLVSLVNLMLSGKVNHEFTDLFYGASLVALNEKDGGIRPIAVGNTFRRLASKICCKNVRAFLSSKFEPKQLGFAIKGGCEAAVHATREFLELAGGEVLLKVDIKNAFNTIDRGVLLSAVREHIPAIYPYLWQCYGAPTKLLYKDHVLSSAAGCQQGDPLGPAIFSLAIHSIISNLDSSLNLWYLDDGTLGGSASTVASDLSSLRNAFASIGLELNFSKCELFIQPSVDTDSRDSIIASFNSLAPNIKIQTKESLRLLGAPILDESLHFYIEEQIERFQASSDRLYKINSHMALFIMRFCLFVPKFTYVLRCTMLWKFQDLLAVLDETIKRTLCAILNIALDDVAWVQASLPIRYGGIGVRKATSVSLPAFLSSAHSASPLCGKVLNPSLGSVGISGLAEAIEIWRERCPNDFPDAPHVQRQWDEPLCKQVSQNLVGGCSNSSDRARILAVSERESGFWLQAYPSANLGTLLDNGTLSVVVGLRLGVKIIEPHQCFCGELVNELGHHGLSCQRSAGRMSRHASLNDIIRRALTSTSIPAVLEPNGLLRTDGKRPDGLSMIPWKLGKCLIWDATCVDTLAPTHLPSTCRGAGAAAATAEGLKRRKYRDFLHNYVFVPFAVETLGPWGLEARAFITDLAARLREASGDSRSGSYLAQRISLAIQRGNAASILGTLPRGDALEGIYYL

SEQ ID NO: 8839 - protein, 1255 aa, Osmia bicornis
MVNDFGCVWIVDIDTQYYIYTVMNLNEYNNNASDAELPGPGNSVTDLSVMQGTSDDDLAINKVPIYVTLPLEEEGFLCPICIRKQLNFSSHTIQNLVSHFEKHHLLHTLTARCRECERCFKPRGWSIHYRKCKGKINNEPKAYICNICNASFDKQVGLSTHERHLHATIRNEKRKAEAEVPKKKSGRHLSVWTEEEISLLKNLSERFAHCKYPNVEIQQFFPNKSVKQIRDKKKDVLGRVRTRNNRNENESGSVSGNENEDQNQNDNHENQNNNQLRDTRNNVESIGEVNGNGTTYNEEGISLDLTASHRSLGSSLSNMEPRERSGNEVTEEDDETEILSEEWFNNIFEEIEMENTTNVPDPVITVYNTLKEMWSSCSQNKTDLTSGIEEYIKNTLIPFLFKVEEKNKAEINNKNKNNQNKNKNKRKSQRKNKNENENDFAKRNNDTNRLRINKNNRSHRKRYSFARCQEIYNECPKKLADIAVKGDLSLLKPPQKFPPATEIKALYDQVWGTSEPTLQTEEEDYCNYTDRVNIKKVLHPITPKEILDRIKKIQNKSAAGLDGLQKKHLLVKGIEIILALLYNMIIFTSYYPKVWKINRATLIPKHGQDLNEVKNWRPITVGSILSRIFSAVLDCRIRNAIEQNIRQKGFTSENGCKSNVMLLNEVIKVAKVEKGGVVTVLDISKAFDTIPHATIKNSLIKKGLPKTICDLVENMYTGNTTYIKANDTRVEVQIKRGVKQGDPLSPLLFNLCIEKLLQELQDNTSGLSTSLDHNSMVSVLAFADDIVALGINKQEAQFQLEIIHKYLKNLGMSLSTSKCLTFEIKTHRDTWYVVDPNLNISGNKIPEADPNTTFRYLGAKIGPWKGLESGIVVPDIINIIKRIRKMPLKPHQKIDLITSYIIPRFIYGLLIYPPGNSTLKLLDSEIRQQIKEILHLTPSTATGFFYTKKINGGLGIPRLETIIKLGVLRSAIKMKSSIDSAVKDVVSSTTADKYLKKIANSLRINWPATLDDIEAARRRLRAQPSKEWSVLRIQGQGMNEFYKDPVGNKWLSQPTLLKGSRFIDAIRLRTNTMGTRVVLNKTNKNINPICRRCHLQPETLGHILGQCYHTKGLRIKRHNEIRDFLATKLASKNQVTVEPTLTVRDELRKPDLIVKNEKQVFIVDVTIRYEHKEYLNTAAKEKINKYTSCLNQLKRKYGREGKVLPIVLGCRGVIPQSTKKNLEILGINKRDWLTISLIALRASIELANIFIDYDR

SEQ ID NO: 8840 - protein, 1175 aa, Ancistrocerus nigricornis
MDTNSDSASDTESPGPGDSVTDLSVRQGTSNDDLAMNRETILITVPVGINGTLCPICKAHSLNFSFFTERSLAAHFEKHHLLHSISWNCRSCNRNFAKVHGWSCHFGKCKGSADADPNAFTCEICGSSFEKQVGLSMHERHMHPGVRNEKRKMEAEKPRRIAGRKNRVWKEEEIALLKQLNERFANYRHPNIEIQRFLPEKTPKQISDKRRDLQEKIRNIEDIQVTQERQIEVNEDNEEGINDGGNAEEMRTETNTATDEGTNREAMEMEMENETEVLNAEWINSMISATYSDIPGEISELFGSLKILWDEYVHTQELTKLLKCIDDFIKNKLIPILKTTNNKETENDNRNNNRNKDRNSNKNLNLNKNKGRNNSNNKNKRKTRNDRKRFSYARCQELYHECPKKLADIAIKGDLSIIEPPKSRPSVEEVKNLYSDLWGTSGPSLEEGETTTRCRGKLYPVTAEEVRSRIAKANNRSAAGLDGLQKKHLQRKGTEVILALLYNILLHTRYYPKAWKTNRASLIPKIGHDLSDPKNWRPITISSIISRIFSAVIDHRLRKIIEQSPLQKGFTSENGCVNNVMLLKEAIKIAKGCNGGVVSVLDISKAFDTVPHSAIKISLRRKGVPDSICDLVGDMYTDCTTQIKAHNGAVDIPLKRGVKQGDPLSPLLFNVCIERLLEDLQNKTSGLSINITKNKRISVLAFADDIVLLGVNKEEAQTQLKLTLEYLQKLGMSLSIKKCLGFEIKSLRDTWYVADPGLVLDGIKIPNVDPDDTFKYLGAKIGPWKGLESGILVPDVIGIIKRVRKLSLKPHQKINLITLYIIPRFIYGLLVYPPSESTLKLLDSEIRQQIKEILHLTPSTTINFFYTKKGNGGLGIPRLEIIIKLGVLKNAIKMSNSIDPGVRDLVNEESVNKRFKSIANSLRINWPATLEDIESARRRLKMQPSKEWSQLRIQGQGVTNFYNDKVGNKWLSDPTLLKASRFIDAIRLRTNTFGTRVVLSKANKGIDTTCRRCHWQPETLGHILGLCNHTKGLRIRRHDEIKNLLANKLAIKNEVAIEPTITVRGELHKPDLIIKNEKEVFVVDVTVRYENRDYLETAAIEKIRKYESCLKQLKQSYNLKEGEVLPVVVGCRGALPPRTTANLAKLGIRKKDLLTIAMIALRSSIEIANIFIDND

SEQ ID NO: 8841 - protein, 1093 aa, Dendronephthya gigantea
MKNTLLELVHYRRIEFKSIMIRISLLAFFFTLIICGFCGKEFVSLGRHSWRCKSKIDYSEETTGKADPVMEIPSQECMPIKTRKAIKCCCGKVCKGARGLKMHQRSCRVIDDLEEELQQQMVEVLSEQQNEDDIDPVNIMVSSGNVQENYPDIKKGIKLPKSPSQWAIANDFFRLTFSNHPITPHDIGNNIKTMATEIYNYFGENFGYIDNNSNAKFESKYKTFAAKDLKKTLKKLKLEKGDVLEIKFVANKLRNLLKNCDIIDHNNTNTSGTKEHDHDRLINKSFWGYVKKIFEKNTSSLPSFDLLQCTSYFTKMFSAINQSKRFNIPSWIPKFASPQTPFKLDPPTYQEITNIIRKMKPSGSPCPLDQISIICFKRCPYLRSYLTDIIRVSWSHGAVPSEWKKACTILIHKKGETSEPANFRPITLESIPLKVFTSCLRNKTFQYLVENNYIEQNIQKGFTPKLSGTIEHTAQMAHIINTARTKQRSLIITLLDLKNAFGEVHHALINEVLKYHHIPDHIKNLICSLYTNFQTSIITDQFNTPFITVGRGVLQGDCLSPLLFNMTFNTFIQHIKSDKYRQLGFWKHCVNGIPLYPIHWFQFADDAAVITGQEKENQMLLNRFTIWCQWSDMIIRVDKCVSFGINKHLTKSIQYLPKLIINNHLVPRVEIGKSFRYLGRYFDFSMSDDDHKSEVYETLTNILKEIDELPLHPKNKILLYNRYVLSKISWNFTVADIGKTWVNEKLDSITSKYIRKWLELPISATLSNVLLPRNKFGLNVILPSTKFLQCQTISRNALKSSPNTEITNLWKNTSNHKNIQYDTYKNTKEVLSSVREKHEEKLQLHLTSQGSFFSNIAKYSTLTLNSMWSSVQSKLPKNIFNFTIRYINNTLPTNKNLQKWGISSTSDCSFCLKPESLLHVVAGCNAYLNEGRFTWRHDSVLHCIATALRSVKKSTLYVDLSDYISPSVITGDTYRPDLLISIENKCIYILELTVGFESNLHANVTRKEQKYQALINEQRKIYEKVIFVNMSISTLGVFSKPALGFMDMLKDLEVDSQCRKYLVRKIMNICIRSSYYIFCKRNKEWNNPQLISY

SEQ ID NO: 8842 - protein, 1075 aa, Dendronephthya gigantea
MIRAHLLVLFFTLIICGFCGKEFLSLGRHSWRCKSKLGNEEERTGNVNPRMEMPTKLCLPVKAVKAIKCCCGKVCKGARGLKMHQRSCRVIDDLEDELQQQMTDAMNDRHSEDSICPDTTETSNLSTQDQENFPDLKQGIKLPKSPLQWSAANDFFQLTFSNHPIIPSDLNNNINTMATVIYNYFSENYGFVGNNSNVKYERKYQTLSTKDLKKELKKLKAENGDITEIKFVAKKLRNLLSKSSQTDPHTNDFDSTEINHDSLITKNFWGYVKRIFKKTTSSLPSFNLTQCTNYFTKTFTSINPKRSFKLPSWIPKLASPQTPYNIDPPTYQEITNVIRKMKPSGSPCPLDHISIICFKRCPYLRSYLTEIIQAAWSCGVVPTEWKKACTILIHKKGETCDPANFRPITLESIPLKVFTSCLRNKTYQFLSENNYIEQKIQKGFTPKLSGTLEHTAQMAHIINTARIKQRSIVITLLDLKNAFGEVHHNLIYEVLEYHHIPSHIKNLVRNLYTDFQTSIITEHFNTPFITISRGVLQGDCLSPLLFNMSFNTFVQHIKSEKYRQLGFWKLSQVGIPCNPVHWFQFADDAAVISSQERENQMLLNRFNIWCQWADMIIRVDKCSTFGIKKHLTKSIQYLPKLFINNHLIPRIEMGKSFCYLGRFFNYDMSEEEHKTELLNTFNEIMNKIDQLPLHPKNKLQLYSRYLFSKIAWHFTVSDIPKTWICETLDSAASKYIRKWLELPVTSTLNNVFLPQNKFGLNLNLPSTKFLQCRTVCRTALKSSTNKDINNLWVITSTNKNIQYDIYKDTKDVLKAVRKENKERLQNHLFSQGSFFSNVINNSTSTFNSLWSSVQRKLPKNIFNFTIRYINNSLPTRKNLSKWGVSSTSACSFCSSPESLLHVVAGCQTYLKEGRYTWRHDSVLNFLASTLTAVQSSRLFVDLPGFINPSVLTGDNLRPDLLLAIENKYLYILELTVGYESNMENNAHRKHQKYTHLIKEQESSYDSVKFVNLSLSALGVFSRSAKCFDEMLRSLKFDAQHSKYIKRKIVNMCIRSSYYIFCKRNKEWDNPTLMTL

SEQ ID NO: 8843 - protein, 1093 aa, Dendronephthya gigantea
MKNTLLELVHYRRIEFKSIMIRISLLALFFTLIICGFCGKEFVSLGRHSWRCKSKIDYSEETTGKADPVMEIPSQECMPIKTRKAIKCCCGKVCKGARGLKMHQRSCRVIDDLEEELQQQMVEVLSEQQNEDDIDPVNIMVSSGNVQENYPDIKKGIKLPKSPSQWAIANDFFRLTFSNHPITPHDIGNNIKTMATEIYNYFGENFGYIDNNSNAKFESKYKTFAAKDLKKTLKKLKLEKGDVLEIKFVANKLRNLLKNCDIIDHNNTNTSGTKEHDHDRLINKSFWGYVKKIFEKNTSSLPSFDLLQCSSYFTKMFSAINQSKRFNIPSWIPKFASPQTPFKLDPPTYQEITNIIRKMKPSGSPCPLDQISIICFKRCPYLRSYLTDIIRVSWSHGAVPSEWKKACTILIHKKGETSEPANFRPITLESIPLKVFTSCLRNKTFQYLVENNYIEQNIQKGFTPKLSGTIEHTAQMAHIINTARTKQRSLIITLLDLKNAFGEVHHALINEVLKYHHIPDHIKNLICSLYTNFQTSIITDQFNTPFITVGRGVLQGDCLSPLLFNMTFNTFIQHIKSDKYRQLGFWKHCVNGIPLYPIHWFQFADDAAVITGQEKENQMLLNRFTIWCQWSDMIIRVDKCVSFGIKKHLTKSIQYLPKLIINNHLVPRVEIGKSFRYLGRYFDFSMSDDHHKSEVYETLTNILKEIDELPLHPKNKILLYNRYVLSKISWNFTVADIGKTWVNEKLDSITSKYIRKWLELPISATLSNVLLPRNKFGLNVILPSTKFLQCQTISRNALKSSPNTEITNLWKNTSNHKNIQYDTYKNTKEVLSSVREKHEEKLQLHLTSQGSFFSNIAKYSTLTLNSMWSSVQSKLPKNIFNFTIRYINNTLPTNKNLQKWGISSTSDCSFCLKPESLLHVVAGCNAYLNEGRFTWRHDSVLHCIATALQSVKKSTLYVDLPDYISPSVITGDTYRPDLLISLENKCIYILELTVGFESNLHANVTRKEQKYQALINEQRKIYEKVIFVNMSISTLGVFSKPALGFMDMLKDLEVDSQCRKYLVRKIMNICIRSSYYIFCKRNKEWNNPQIISY

SEQ ID NO: 8844 - protein, 901 aa, Trachythela sp.
MATVMYNYFGENFGYVDNNNHVEFERKYETFSIKDLKKALKKLKLENVDVIEIKFVAKKLRNLLNKSTNNTVHNTDNHESAEIDHDNLINKNFWGYVKRFFKKNNSSLPSFDLARCTSYFTKTLSVINPNKTFNIPSWIPKFASPENPFNLDPPTYQEITNVIRKMKLSGSPCPLDQLSIICFKRCPYLRSYLTEIIHAAWSCGVVPSEWKKACTILIHKKGETDQPENFRPITLESIPLKVFTSCLRNKTFQFLAENKYIEQNIQKSFTPKLSGTLEHTAQMAHIINKARIKQRSLIITLLDLKNAFGEVHHNLIHEVLEYHHISDHKKNLIGSLYTDFQTSIITEQFNTPFITVGRGVLQGDCLSPLLFNMSFNTFIQHIKSEKYRQLGFWKITENGIPLNPIHWFQFADDAAVLSGQEKENQMLLNRFTIWCQWANMIIRVDKCSTFGIKKESTKSTQYLPKLFLNNSLVPRVEIGKSFSYLGRYFDFSMSDEDHKSEVYDIFTNMLNQIDELPLHPKNKILLYSRYVLSKISWHFTVSDIGKTWVNEKLDSIASKYIRKWLELPISATLSNVLLPHNKFGLNTILPSTKFLQCQTVSRKALKSSPNEDINNLWRDTSNYKNVQYDTYKNTKDVLSTIRKEHEEKLQNHLISQGSFFSNIMKYSTLSFNSIWSSVQSKLPKNIFNFTIRYINNTLPTRKNLLKWGISPTSECSFCLKPETLLHVVAGCKTYLNEGRFTWRHDSAVLNFVASTLKSVQHSNLYADVPGYISPSVITGDRLRPDLLVTIQNKCIYILELTVGFESNLLTNVTRKRQKYQELINEQNKKYETVKLVNLSISSLGVFSQSSLDFVEMLKDLKFDEQCRKYFIRKMINTCVRSSYYIFCKRNKEWDNPQLMSY

SEQ ID NO: 8845 - protein, 1228 aa, Collichthys lucidus
MMAVSDAVSVCWRHPLSATESLQRMTPLEPARAGAQDGSMIDNTATDPGTNTTMSKNTAHETTAAGHSLQVCTCGWAKVTSVTGLKIHQGKKRCLGKQSQGPRIDRYFLRSNTSNQSSEAQRRDKNQSSQSISTPVTEEGNANTELQVEEPTHPQRPPKENKTKGHRLSVKWPKAVEKREWETVNNDLTKILEQQVGTAEKKLENIGDIIYHYGEERFGVNSRKAANTIPPTKSRRQQEIDRLIRERRDLRKQWKKASDPEREGLMLLQGDIKLRLATLRRAENLRKLRRKKEHTRTRFYKNPFKFVKDLFDKDKSGFLKTSKQELEEHLEKVYQDTKRHEQLAIPHDIPPIQPPEVNMETGPPKWKEVESMVRHARSGSAPGPNGVPYKLYKNAPDVLRYLWRLMRIVWQKGLIPKAWRRAGGVLIPKEKDAADISQFRPISLLNVEGKIFFSVLAQRLSTYLEKNKYVDTSVQKAGIPGFSGCLEHTSMIWHQIQAAKKDKRDLHVIFLDLANAFGSVPHNLLWESFNFFHVPSSITTLVKAYFEDLQLCFTTADFITSWQRVEVGIMAGCTISPLAFTMAMEVIIRASRWVVGGERTRNGIRLPPVRAYMDDMTTLTTTAACTRRLLGKLQENIKWARMKIKPNKSRSISIIKGELKNVKFCIGDDPIPTVSEQPVKSLGRWYNSSLKDKDQVQQLRQDIINGLDNINKIPLPGKLKLWCLQFGLLPRVMWPLTVYEVPLTTVEKMERAITAYVKQWLGVPRCLTNISLYGKGVLELPITSLTEEYKCSKVRLQMTLTGSKDRTISEAAPPLSTGRKWTPSGAVQHATAALRHSDIVGHIQMGRGGFGLTTRKPTWCKASASEKRKLVVEEVRRQEEAERTAKAISLAKQGQWMRWEGLEKRKLGWRDLWEMEASNISFIIRATNDVLPSPKNLHLWYGEDPTCALCPTSATLKHILTGCKTSLTQGRYTWRHNQVLKSLAAVLEGKRNAINSLPMRATTSITAAPTFVREGHKKLNHPPLKPEVGQLTMARDWKMLVDIGQQLIFPAEIAATTLRPDLVLWSPSLKSVFIAELTVPWENAVEEAYERKKLRYTELAADAQQRGWKAKVYPRGRQLSLDAGQFFSDNPIAGHDHGGGGGGGGHTARGHTASVMKQSGFSPGFYFRVTGSAGPGEHPPPPHPHPTPPPPPRRRFSRAHLDAGPGWTAMRAGSATRKKKTFDDGDEN

SEQ ID NO: 8846 - protein, 1174 aa, Collichthys lucidus
MMAVSDAVSVCWRHPLSATESLQRMTPLEPARAGAQDGSMIDNTATDPGTNTTMSKNTAHETTAAGHSLQVCTCGWAKVTSVTGLKIHQGKKRCLGKQSQGPRIDRYFLRSNTSNQSSEAQRRDKNQSSQSISTPVTEEGNANTELQVEEPTHPQRPPKENKTKGHRLSVKWPKAVEKREWETVNNDLTKILEQQVGTAEKKLENIGDIIYHYGEERFGVNSRKAANTIPPTKSRRQQEIDRLIRERRDLRKQWKKASDPEREGLMLLQGDIKLRLATLRRAENLRKLRRKKEHTRTRFYKNPFKFVKDLFDKDKSGFLKTSKQELEEHLEKVYQDTKRHEQLAIPHDIPPIQPPEVNMETGPPKWKEVESMVRHARSGSAPGPNGVPYKLYKNAPDVLRYLWRLMRIVWQKGLIPKAWRRAGGVLIPKEKDAADISQFRPISLLNVEGKIFFSVLAQRLSTYLEKNKYVDTSVQKAGIPGFSGCLEHTSMIWHQIQAAKKDKRDLHVIFLDLANAFGSVPHNLLWESFNFFHVPSSITTLVKAYFEDLQLCFTTADFITSWQRVEVGIMAGCTISPLAFTMAMEVIIRASRWVVGGERTRNGIRLPPVRAYMDDMTTLTTTAACTRRLLGKLQENIKWARMKIKPNKSRSISIIKGELKNVKFCIGDDPIPTVSEQPVKSLGRWYNSSLKDKDQVQQLRQDIINGLDNINKIPLPGKLKLWCLQFGLLPRVMWPLTVYEVPLTTVEKMERAITAYVKQWLGVPRCLTNISLYGKGVLELPITSLTEEYKCSKVRLQMTLTGSKDRTISEAAPPLSTGRKWTPSGAVQHATAALRHSDIVGHIQMGRGGFGLTTRKPTWCKASASEKRKLVVEEVRRQEEAERTAKAISLAKQGQWMRWEGLEKRKLGWRDLWEMEASNISFIIRATNDVLPSPKNLHLWYGEDPTCALCPTSATLKHILTGCKTSLTQGRYTWRHNQVLKSLAAVLEGKRNAINSLPMRATTSITAAPTFVREGHKKLNHPPLKPEVGQLTMARDWKMLVDIGQQLIFPAEIAATTLRPDLVLWSPSLKSVFIAELTVPWENAVEEAYERKKLRYTELAADAQQRGWKAKVYPVEVGCRGFVASSTIKLLQDLGIHGRALRQTVRSLSEAAERSSQWIWMKRKDPCWAHRSAT

SEQ ID NO: 8847 - protein, 1174 aa, Collichthys lucidus
MMAVSDAVSVCWRHPLSATESLQRMTPLEPARAGAQDGSMIDNTATDPGTNTTMSKNTAHETTAAGHSLQVCTCGWAKVTSVTGLKIHQGKKRCLGKQSQGPRIDRYFLRSNTSNQSSEAQRRDKNQSSQSISTPVTEEGNANTELQVEEPTHPQRPPKENKTKGHRLSVKWPKAVEKREWETVNNDLTKILEQQVGTAEKKLENIGDIIYHYGEERFGVNSRKAANTIPPTKSRRQQEIDRLIRERRDLRKQWKKASDPEREGLMLLQGDIKLRLATLRRAENLRKLRRKKEHTRTRFYKNPFKFVKDLFDKDKSGFLKTSKQELEEHLEKVYQDTKRHEQLAIPHDIPPIQPPEVNMETGPPKWKEVESMVRHARSGSAPGPNGVPYKLYKNAPDVLRYLWRLMRIVWQKGLIPKAWRRAGGVLIPKEKDAADISQFRPISLLNVEGKIFFSVLAQRLSTYLEKNKYVDTSVQKAGIPGFSGCLEHTSMIWHQIQAAKKDKRDLHVIFLDLANAFGSVPHNLLWESFNFFHVPSSITTLVKAYFEDLQLCFTTADFITSWQRVEVGIMAGCTISPLAFTMAMEVIIRASRWVVGGERTRNGIRLPPVRAYMDDMTTLTTTAACTRRLLGKLQENIKWARMKIKPNKSRSISIIKGELKNVKFCIGDDPIPTVSEQPVKSLGRWYNSSLKDKDQVQQLRQDIINGLDNINKIPLPGKLKLWCLQFGLLPRVMWPLTVYEVPLTTVEKMERAITAYVKQWLGVPRCLTNISLYGKGVLELPITSLTEEYKCSKVRLQMTLTGSKDRTISEAAPPLSTGRKWTPSGAVQHATAALRHSDIVGHIQMGRGGFGLTTRKPTWCKASASEKRKLVVEEVRRQEEAERTAKAISLAKQGQWMRWEGLEKRKLGWRDLWEMEASNISFIIRATNDVLPSPKNLHLWYGEDPTCALCPTSATLKHILTGCKTSLTQGRYTWRHNQVLKSLAAVLEGKRNAINSLPMRATTSITAAPTFVREGHKKLNHPPLKPEVGQLTMARDWKMLVDIGQQLIFPAEIAATTLRPDLVLWSPSLKSVFIAELTVPWENAVEEAYERKKLRYTELAADAQQRGWKAKVYPVEVGCRGFVASSTIKLLKDLGIHGRALRQTVRSLSEAAERSSQWIWMKRKDPCWAHRSAT

SEQ ID NO: 8848 - protein, 914 aa, Percina caprodes
MQRKRDSCYSRGIKCRLTTLRRAENLRKLRKKKEHTRTRFYKNPFKFVKDLFDKEKSGTLRIPKQELEEYMEKVHHDTKRHEQIAIPHDIPPIRSPEFILETGPPKWKEVESTIRRARSASAPGPNGVPYKLYKNTPDVLRYLWRLMRIVWQKGIIPKAWRRAGGVLIPKEKDATDISQFRPICLLNVEGKIFFSVIAQRLSTYLEKNNYIDTSVQKAGIPGFSGCLEHTSMIWHQIQAAKKEKRDIHVIFLDLANAFGSVPHNLLWESFNFFHVPSSITKLIKAYFADLQLCFTTADFTTSWQRVEVGIMAGCTISPLAFTMAMEVIIRASRWVVGGERTKNGIRLPPIRAYMDDMTILTTTAACTRRLLGKLQENIKWARMKIKPNKSRSISVVKGQLKNVKFCIGDDPIPTVSEQPVKSLGRWYNASLRDKDQVQQLREDITSSLENINKTLLPGKLKLWCLQFGLLPRVMWPLTIYELPITNVEKMERTLTSYVKKWLGVPRCLTNISLYGKGALELPITSLTEEYKCCKVRLQMTLKDSRDQTISNVAPPLLTGRKWTPSDAVRHATSALRHNDIVGHIQFGRGGLDLTVRKPTWHKASVSERRKMVVEEVRRQEEAERSARAVSLAKQGQWMRWEGLERRKLSWRELWDMEASNISFIIRATYDVLPSPKNLHQWYGEDPTCALCPTPATLKHILTGCKTSLTQGRYTWRHNQVLKGLAAALESKRNTTNSLPLRATNSITAPNFIREGQRKPNHPHSKPEAGQLAMARDWKMLVDIGQQLIFPPEIAATTLRPDLVLWSPSLKSVYIIELTVPWENSTVEAYERKKLRYTELAADAQQRGWKASIYPVEVGCRGFVASSTIKLLKTLGIHGQALRQTVRSVSEAAERSSQWIWIKRKDPSWAQRPSM

SEQ ID NO: 8849 - protein, 1175 aa, Hirundichthys speculiger
MVAVSDAGSVCWRHPLSATESIQRMTPLEPARAGAQDGSMIDNTATDLGTNTTTSKNTTHEITAAGHSLQVCICGWEKVTSVTGLKIHQGRKRCLGKQSQGPRIDHYFLRSNTSNQSSEAQRRDANHSSQSISTPVTEEGNASTELQVEEPTQPQRPPKENKIKGHRPSVKWPKAVEKREWETVNNDLTKILEQQVGNAEKKLENIGDIIYHYGEERFGVNSRKTANKIPPPTKSRRQQEIDRLIRERRDLRKQWKKASDPEREGLTLLQGDIKLRLATLRRAENLRKLRKKKEHTRTRFYKNPFKFVKDLFAKDKSGVLKTSKQELEEHLENVYQDTRRHEQLSIPHDIPPIQPPEVNIETGPPKWKEVENTVRRARSGSAPGPNGVPYKLYKNAPDVLRYLWRLMRIIWQKGIIPKAWRRAGGILIPKEKDAADISQFRPISLLNVEGKIFFSVLAQRLSTYLEKNKYIDTAVQKAGIPGFSGCLEHTSMIWHQIQAAKKDKRDLHVIFLDLANAFGSVPHNLLWESFNFFHVPSSITTLVKAYFEDLQLCFTTADFITSWQRVEVGIMAGCTISPLAFTMAMEVIIRASRWVVGGEQTRSGIRLPPVRAYMDDMTTLTTTAACTRRLLGKLQENIKWARMRIKPNKSRSISIIKGELKNVKFCIGDDPIPTVSEQPVKSLGRWYNSSLKDKDQVQQLRQDIINGLDNINKMPLPGKLKLWCLQFGLLPRVMWPLTVYEVPLTTVEKMERAITGYVKQWLGVPRCLTNISLYGKGVLELPITSLTEEYKCSKVRLQMTLTDSRDRTISDAAPPLSTGRKWTPSGAVQHATAALRHSDIVGHVQRGRGGFGLTTSKPTWCKASTSERRKMVVEEVRRQEEAKRTAKAVSLAKQGQWMRWEGLEKRKLGWRDLWEMEASNISFLIRATNDMLPSPKNLHQWYGEDPTCALCPTPATLKHILTGCKTSLTQGRYTWRHNQVLKRLAAVLESKRNTINSLPMKATTSTTAPPTFIREGQKKPNHPPLKPEVGQLTMARDWKMLVDIGQQLIFPAEIAATTLRPDLVLWSPSLKSVYIAELTVPWENAVEEAYERKKLRYTELAADAQQRGWKAKIYPVEVGCRGFVASSTIKLLKDLGIHGQALRQTVRSLSEAAERSSQWIWMKRMDPCWAPRSAI

SEQ ID NO: 8850 - protein, 1070 aa, Collichthys lucidus
MENVCFNSFLTAHETTAAGHSLQVCTCGWAKVTSVTGLKIHQGKKRCLGKQSQGPRIDRYFLRSNTSNQSSEAQRRDKNQSSQSISTPVTEEGNANTELQVEEPTHPQRPPKENKTKGHRPSVKWPKAVEKREWETVNNDLTKILEQQVGTAEKKLENIGDIIYHYGEERFGVNSRKAANKIPPTKSRRQQEIDRLIRERRDLRKEWKKASDPEREGLMLLQGDIKLRLATLRRAENLRKLRRKKEHTRTRFYKNPFKFVKDLFDKDKSGFLKTSKQELEEHLEKVYQDTKRHEQLAIPHDIPPIQPPEVNMETGPPKWKEVESMVRRARSGSAPGPNGVPYKLYKNAPDVLRYLWRLMRIVWQKGLIPKAWRRAGGVLIPKEKDAADISQFRPISLLNVEGKIFFSVLAQRLSTYLEKNKYVDTSVQKAGIPGFSGCLEHTSMIWHQIQAAKKDKRDLHVIFLDLANAFGSVPHNLLWESFNFFHVPSSITTLVKAYFEDLQLCFTRADFITSWQRVEVDIMAGYTISPLAFTMAMEVIIRASRWVVGGERTRNGIRLPPVRAYMDDMTTLTTTAACTRRLLGKLQENIKWARMKIKPNKSRSISIIKGELKNVKFCIGDDPIPTVSEQPVKSLGRWYNSSLKDKDQVQQLRQDIINGLDNINKIPLPGKLKLWCLQFGLLPRVMWPLTVYEVPLTTVEKMERAITAYVKQWLGVPRCLTNISLYGKGVLELPITSLTEEYKCSKVRLQMTLTGSKDRTISEAAPPLSTGRKWTPSGAVQHATAALRHSDIVGHIQMGRGGFGLTTRKPTWCKASASEKRKLVVEEVRRQKEAERTAKAISLAKQGQWMRWEGLEKRKLGWRDLWEMEASNISFIIRATNDVLPSPKNLHLWYGEDPTCALCPTSATLKHILTGCKTSLTQGRYTWRHNQVLKSLAAVLEGKRNAINSLPMRATTSITAAPTFVREGQKKLNHPPLKPEVGQLTMARDWKMLVDIGQQLIFPAEIAATTLRPDLVLWSPSLKSVFIAELTVPWENAVEEAYERKKLRYTELAADAQQRGWKAKVYPVEV

SEQ ID NO: 8851 - protein, 1176 aa, Carassius auratus
MAAVSDAASVCWRHPLNATESEQRNIPPEPARAGAQDGSMTDSMVTDSGTDMTTSKNTAHETTTAAAGHSLQVCTCGWAKITSFRGLRTHQGKRGCLREQRQGPRIDQYFLRSNQSNQSIEAQRRDKNQSSQSISTSVPEEDNTSTEMPVEEPTQPQRPPKEEKIKGHRPSVKWPKAVEKREWEIVNNDLTKILEQQVGTAEKKLERMVDIIYHYGEERFGVNARRSNKAISAPAKSRRQQEIEILVRERRQLRKQWKKASDAEREGLMLLQGDIKCRLATLRRAENLRKLRKKKEHTRTRFYKNPFKFVKDLFAKEKSGILKIPKEELEEHLEKGNHDPKRHEQIVIPHDIPPIQPPEFNLETGPPKWKEVESTVRRARSASAPGPNGVPYKLYKNAPDVLRYLWRLMRIVWQKGIIPKGWRRAGGVLIPKEKDATDIGQFRPICLLNVEGKIFFSVIARRLSTYLEKNKYIDTSVQKAGIPGFSGCLEHTSMIWHQIQAAKKDKRDIHVIFLDLANAFGSVPHNLLWESFNFFHVPSSVTSLVKAYFEDLQLCFTTADFTTSWQRVEVGIMAGCTISPLAFTMAMEVIIRASRWVVGGERTKNGIRLPPIRAYMDDMTTLTTTAACTRRLLGKLQENIKWARMKIKPNKSRSISIVKGQLKNVKFCIGDDPIPTVSEQPVKSLGRWYNASLGDKDQVQQVRQDITNSLEDINSTLLPGKLKLWCLQFGLLPRVMWPLTVYELPITTVEKMERTMTSYIKKWLGVPRCLTNISLYGKGVLELPITSLTEEYKCSKVRLQMTLKDSRDQTISNAVPLLVTGRKWTPSDAVQQATSALKHSDIVGHVQLGRGGFGLTASKPTWRKASTSERRKMVVEEVRRQEETERSAKAVSLVRQGQWMRWEGLERRKLSWRELWEMEASNISFIIRATYDVLPSPKNLNQWYGEDPTCALCPTPATLKHILAGCKTCLTQGRYTWRHNQVLKSLAAALESQRNTTNSLPLRAIDSITAPTFIREGQKKPKHPPTKTEAGQLAMARDWKMLVDIGQQLIFPPEIAVTTLRPDLVLWSPSLKTVYIIELTVPWENSTDEAYERKKLRYIELAADAQQRGWKAKVYPVEVGCRGFVASSTIRLLKDLGIHGQALRQTIKSVSEAAERSSQWIWIKRKDPCWAQRAST

SEQ ID NO: 8852 - protein, 1176 aa, Gobiocypris rarus
MVAVSDAASVCWSHPPNATESEQRNIPLEPARAGAQDGSMTDSMVTDPGMDMTTSKNTAHETTTTAIGLSLQMCTCGWEKITSYRGLRTHQGKRGCLKEQGQGPRIDQYFLRSNQSNQSIEAQQLDKNQSLQSISTPVTEEGNTSTGMQVEEPTQLQRPPKEDKIKGHRPSVKWPKTVEKREWEIVNNDLTKILEQQVGTAEKKLERMGNLIYHYGEERFGVNTRRSDKATPATAKSRRQQEIERLVKERRQLRKQWKKAPDVEKEGLMLLQGDIKCRLATLRRAEFLRKLRKTKEHTRTRFYKNPFKFVKDIFAKEKNGTLKISKQELEKHLEKVHHDTKRHEQIVIPQDIPPIQPPEFNLETGPPKWKEVESTVRHARSASAPGPNGVPYKLYKNAPDVLRYLWRLMRIVWQKRIIPKAWRRAGGVLIPKEKDATDISQFRPICLLNVEGKIFFSVIAQRLSTYLEKNKYIDTSVQKAGIPGFSGCLEHSSMIWHQIQAAKKDKRDIHVIFLDLANAFGSVPHNLLWESFNFFQVPSSVTSLVKAYFEDLQLCFTTADFTTSWQCVEVGIMAGCTISPLAFTMAMEVIIRASRWVVGGERTKNGIRLPPIRAYMDDMTILTTTAACTRRLLGKLQENIQWARMKIKPNKSRSISIVKGQLKNVKFCIGDDPIPTVSEQPVKSLGRWYNASLRDKDQVKQVRQDITNSLENINSTLLPGKLKLWCLQFGLLPRAMWPLTIYELPITTVEKMERTITSYVKKWLGVPRCLTNISLYGRGVLELPITSLTEEFKCAKVRLQMTLKDSKDQTISNAVPSLLTGRKWTPSNAVQQATSALRHSDIVGHVQLGRGGFGLTASKPTWHKASTSERRKMVVEEVRRQEEVQRTAKVVSLAKQGQCTRWEGLERRKLSWRELWEMEARNISFIIRATYDVLPSPKNLCQWYGEDPTCPLCSTPATLKHILSSCKTSLTQGRYTWRHNQVLKSLAAALESKRITTNSLPLRAANSIRAPTFIREGQKKPNHPPTKPEAGELAMARDWKMLVDIGQQLIFPPEIAVTTLRPDLVLWSPSLKSVYIIELTVPWENLVEEAYERKKLRYIELVADAQQRGWKAKVYPVEVGCRGFMSSSTIRLLKDLGIHGQTLRQTIRSVSEVAERSSQWIWTKRKDPGWVQRATT

SEQ ID NO: 8853 - protein, 1176 aa, Carassius auratus
MAAVSDAASVCWRHPLNATESEQRNIPPEPARAGAQDGSMTDSMVTDSGTDMTTSKNTAHETTTAAAGHSLQVCTCGWAKITSFRGLRTHQGKRGCLREQRQGPRIDQYFLRSNQSNQSIEAQRRDKNQSSQSISTSVPEEDNTSTEMPVEEPTQPQRPPKEEKIKGHRPSVKWPKAVEKREWEIVNNDLTKILEQQVGTAEKKLERMVDIIYHYGEERFGVNARRSNKAISAPAKSRRQQEIEILVRERRQLRKQWKKASDAEREGLMLLQGDIKCRLATLRRAENLRKLRKKKEHTRTRFYKNPFKFVKDLFAKEKSGILKIPKEELEEHLEKGNHDPKRHEQIVIPHDIPPIQPPEFNLETGPPKWKEVESIVRRARSASAPGPNGVPYKLYKNAPDVLRYLWRLMRIVWQKGIIPKGWRRAGGVLIPKEKDATDIGQFRPICLLNVEGKIFFSVIARRLSTYLEKNKYIDTSVQKAGIPGFSGCLEHTSMIWHQIQAAKKDKRDIHVIFLDLANAFGSVPHNLLWESFNFFHVPSSVTSLVKAYFEDLQLCFTTADFTTSWQRVEVGIMAGCTISPLAFTMAMEVIIRASRWVVGGERTKNGIRLPPIRAYMDDMTTLTTTAACTRRLLGKLQENIKWARMKIKPNKSRSISIVKGQLKNVKFCIGDDPIPTVSEQPVKSLGRWYNASLGDKDQVQQVRQDITNSLEDINSTLLPGKLKLWCLQFGLLPRVMWPLTVYELPITTVEKMERTMTSYIKKWLGVPRCLTNISLYGKGVLELPITSLTEEYKCSKVRLQMTLKDSRDQTISNAVPLLVTGRKWTPSDAVQQATSALKHSDIVGHVQLGRGGFGLTASKPTWRKASTSERRKMVVEEVRRQEETERSAKAVSLVRQGQWMRWEGLERRKLSWRELWEMEASNISFIIRATYDVLPSPKNLNQWYGEDPTCALCPTPATLKHILAGCKTCLTQGRYTWRHNQVLKSLAAALESQRNTTNSLPLRAIDSITAPTFIREGQKKPKHPPTKTEAGQLAMARDWKMLVDIGQQLIFPPEIAVTTLRPDLVLWSPSLKTVYIIELTVPWENSTDEAYERKKLRYIELAADAQQRGWKAKVYPVEVGCRGFVASSTIRLLKDLGIHGQALRQTIKSVSEAAERSSQWIWIKRKDPCWAQRAST

SEQ ID NO: 8854 - protein, 1104 aa, Gobiocypris rarus
MCTCGWEKITSYRGLRTHQGKRGCLKEQGQGPRIDQYFLRSNQSNQSIEAQQLDKNQSLQSISTPVTEEGNTSTGMQVEEPTQLQRPPKEDKIKGHRPSVKWPKTVEKREWEIVNNDLTKILEQQVGTAEKKLERMGNLIYHYGEERFGVNTRRSDKATPATAKSRRQQEIERLVKERRQLRKQWKKAPDVEKEGLMLLQGDIKCRLATLRRAEFLRKLRKKKEHTRTRFYKNPFKFVKDIFAKEKNGTLKISKQELEKHLEKVHHDTKRHEQIVIPQDIPPIQPPEFNLETGPPKWKEVESTVRHARSASAPGPNGVPYKLYKNAPDVLRYLWRLMRIVWQKRIIPKAWRRAGGVLIPKEKDATDISQFRPICLLNVEGKIFFSVIAQRLSTYLEKNKYIDTSVQKAGIPGFSGCLEHSSMIWHQIQAAKKDKRDIHVIFLDLANAFGSVPHNLLWESFNFFQVPSSVTSLVKAYFEDLQLCFTTADFTTSWQCVEVGIMAGCTISPLAFTMAMEVIIRASRWVVGGERTKNGIRLPPIRAYMDDMTILTTTAACTRRLLGKLQENIQWARMKIKPNKSRSISIVKGQLKNVKFCIGDDPIPTVSEQPVKSLGRWYNASLRDKDQVKQVRQDITNSLENINSTLLPGKLKLWCLQFGLLPRAMWPLTIYELPITTVEKMERTITSYVKKWLGVPRCLTNISLYGRGVLELPITSLTEEFKCAKVRLQMTLKDSKDQTISNAVPSLLTGRKWTPSNAVQQATSALRHSDIVGHVQLGRGGFGLTASKPTWHKASTSERRKMVVEEVRRQEEVQRTAKVVSLAKQGQCTRWEGLERRKLSWRELWEMEARNISFIIRATYDVLPSPKNLCQWYGEDPTCPLCSTPATLKHILSSCKTSLTQGRYTWRHNQVLKSLAAALESKRITTNSLPLRAANSIRAPTFIREGQKKPNHPPTKPEAGELAMARDWKMLVDIGQQLIFPPEIAVTTLRPDLVLWSPSLKSVYIIELTVPWENLVEEAYERKKLRYIELVADAQQRGWKAKVYPVEVGCRGFMSSSTIRLLKDLGIHGQTLRQTIRSVSEVAERSSQWIWTKRKDPGWVQRATT

SEQ ID NO: 8855 - protein, 1174 aa, Larimichthys polyactis
MMAVSDAVSVCWRHPLSATESLQSMTPLEPARAGAQDGSMIDNTATDPGTNTTMSKNTAHETTAAGQSLQVCTCGWAKVTSVTGLKIHQGKKRCLGKQSQGPRIGQYFLRSNTSNQSSEAQRRDKNQSSQSISTPVTEEGNASTELQVEEPTQPQRPPKENKIKGHRPSVKWPKAVEKREWETVNNDLTKILEQQVGTAEKKLENIGDIIYHYGEERFGVNSRKAANKIPPTKSRRQQEIDRLIRERRDLRKQWKKASDPEREGLKLLQGDIKLRLATLRRAENLRKLRRKKEHTRTRFYKNPFKFVKDLFDKDKSGFLKTSKQELEEHLEKVYQDTKRHEQLAIPHDIPPIQPPEVNMETGPPKWKEVESTVRRARSGSAPGPNGVPYKFYKNAPDVLRYLWRLMRIIWQKGLIPKAWRRAGGVLIPKEKDAADISQFRPISLLNVEGKIFFSVLAQRLSTYLEKNKYIDTSVQKAGIPGFSGCLEHTSMIWHQIQAAKKDKRDLHVIFLDLANAFGSVPHNLLWESFNFFHVPSSITTLVKAYFEDLQLCFTTADFITSWQRVEVGIMAGCTISPLAFTMAMEVIIRASRWVVGGERTRNGIRLPPVRAYMDDMTTLTTTAACTRRLLGKLQENIKWARMNIKPNKSRSISIIKGELKNVKFCIGDNPIPTVSEQPVKSLGRWYNSSLKDKDQVQQLRQDIINGLDNINKIPLPGKLKLWCLQFGLLPRVMWPLTVYEVPLTTVEKMERAITGYVKQWLGVPRCLTNISLYGKGVLELPITSLTEEYKCSKVRLQMTLTDSKDRTISEAAPPLSTGRKWTPSGAVQHATAALRHSDIVGHIQMGRGGFGLTTSKPTWCKASTSEKRKMVVEEVRRQEEAERTAKAVSLAKQGQWTRWEGLEKRKLGWRDLWKMEASNISFIIRATNDVLPSPKNLHLWYGEDPTCALCPTAATLKHILTGCKTSLTQGRYTWRHNQVLKSLAAVLEGKRNTINSLPMRATTPITAPPTFVREGQEKSNHPPLKPEVGQLTMARDWKMLVDIGQQLIFPAEIAATTLRPDLVLWSPSLKSVFIAELTVPWENAVEEAYERKKLRYTELAADAQQRGWKAKVYPVEVGCRGFVASSTIKLLKDLGIHGQVLRQTVRSLSEAAERSSQWIWMKRKDPCWAHRSAT

SEQ ID NO: 8856 - protein, 1176 aa, Gobiocypris rarus
MVAVSDAASVCWSHPPNATESEQRNIPLEPARAGAQDGSMTDSMVTDPGMDMTTSKNTAHETTTTAIGLSLQMCTCGWEKITSYRGLRTHQGKRGCLKEQGQGPRIDQYFLRSNQSNQSIEAQQLDKNQSLQSISTPVTEEGNTSTGMQVEEPTQLQRPPKEDKIKGHRPSVKWPKTVEKREWEIVNNDLTKILEQQVGTAEKKLERMGNLIYHYGEERFGVNTRRSDKATPATAKSRRQQEIERLVKERRQLRKQWKKAPDVEKEGLMLLQGDIKCRLATLRRAEFLRKLRKKKEHTRTRFYKNPFKFVKDIFAKEKNGTLKISKQELEKHLEKVHHDTKRHEQIVIPQDIPPIQPPEFNLETGPPKWKEVESTVRHARSASAPGPNGVPYKLYKNAPDVLRYLWRLMRIVWQKRIIPKAWRRAGGVLIPKEKDATDISQFRPICLLNVEGKIFFSVIAQRLSTYLEKNKYIDTSVQKAGIPGFSGCLEHSSMIWHQIQAAKKDKRDIHVIFLDLANAFGSVPHNLLWESFNFFQVPSSVTSLVKAYFEDLQLCFTTADFTTSWQCVEVGIMAGCTISPLAFTMAMEVIIRASRWVVGGERTKNGIRLPPIRAYMDDMTILTTTAACTRRLLGKLQENIQWARMKIKPNKSRSISIVKGQLKNVKFCIGDDPIPTVSEQPVKSLGRWYNASLRDKDQVKQVRQDITNSLENINSTLLPGKLKLWCLQFGLLPRAMWPLTIYELPITTVEKMERTITSYVKKWLGVPRCLTNISLYGRGVLELPITSLTEEFKCAKVRLQMTLKDSKDQTISNAVPSLLTGRKWTPSNAVQQATSALRHSDIVGHVQLGRGGFGLTASKPTWHKASTSERRKMVVEEVRRQEEVQRTAKVVSLAKQGQCTRWEGLERRKLSWRELWEMEARNISFIIRATYDVLPSPKNLCQWYGEDPTCPLCSTPATLKHILSSCKTSLTQGRYTWRHNQVLKSLAAALESKRITTNSLPLRAANSIRAPTFIREGQKKPNHPPTKPEAGELAMARDWKMLVDIGQQLIFPPEIAVTTLRPDLVLWSPSLKSVYIIELTVPWENLVEEAYERKKLRYIELVADAQQRGWKAKVYPVEVGCRGFMSSSTIRLLKDLGIHGQTLRQTIRSVSEVAERSSQWIWTKRKDPGWVQRATT

SEQ ID NO: 8857 - protein, 899 aa, Oxygymnocypris stewartii
MLLQGDIKCRLATLRRAENLRKLRKKKEHTRTRFYKNPFVKDLFAKEKSGILKISKQELEEHLEKVHHDTKRHEQIVIPHDIPPIQPPEFNLEAGPPKWKEVESTVRRARSASAPGPNGVPYKLYKKAPDVLRYLWRLMRVVWQKGIIPKAWRRAGGVLILKEKDATEISQFRPICLLNVEGKIFFSMIAQRLSTYLEKNKYIDTAVQKAGIPGFSGCLEHTSMIWHQIQAAKKDKRDIHVIFLDLANAFGSVPHSLLWESFNFFHVPSSVTSLVKAYFEDLQLCFTTADFTTSWQRVEVGIMAGCTISPLAFTMAMEVIIRASRWVVGGERTKNGIRLPPIRAYMDDMTILTTTAACTRRLLGKLQENIKWARMKIKPNKSRSISIVKGQLKNVKFCIGNDPIPTVSEQPLKSLGRWYNASLRDKDQVQQVRQDFTNNLDNINRTLLPGKLKLWCLQFGLFPRVMWPLTIYELPLTTVEKMERTMTSYVKKWLGVPRCLTNISLYGKGVLELPITSLTEEYKCSKVRLQMTLKDSRDQTISNAVPLLLTGRKWTPSDTVQQATSALRHSDIVGHVQLGRGGFGLTASKPIWRKASTSERRKMVVEEVRRQEEAERSTKAVSLVKQGQWMRWEGLERRKLSWRELWEMEASNISFIIRATYDVLPSPKNLHQWYGEDPICALCPTPATLKHILTGCKTSLIQGRYTWRHNQVLKSLAAALESKRNTTNSLPLRATNSITAPTFIREGQKKPNHLPTKPEVGQLAMARDWKMLVDVGQQLIFPPEIAATTLRPDLVLWSPSLKSVYITELTVPWENSTEEAYERKKLRYTELAADAQQRGWKAKVYPVEVGCRGFVASSTIRLLKDLGIHGQALRQTIRSVSEAAERSSQWIWIKRKDHC

SEQ ID NO: 8858 - protein, 1176 aa, Carassius auratus
MAAVSDAASVCWRHPLNATESEQRNIPPEPARAGAQDGSMTDSMVTDSGTDMTTSKNTAHETTTAAAGHSLQVCTCGWAKITSFRGLRTHQGKRGCLREQRQGPRIDQYFLQSNQSNQSIEAQRRDKNQSSQSISTSVPEEDNTSTEMPVEEPTQPQRPPKEEKIKGHRPSVKWPKAVEKREWEIVNNDLTKILEQQVGTAEKKLERMVDIIYHYGEERFGVNARRSNKAISAPAKSRRQQEIEILVRERRQLRKQWKKASDAERDGLMLLQGDIKCRLATLRRAENLRKLRKKKEHTRTRFYKNPFKFVKDLFAKEKSGILKIPKEELEEHLEKGNHDPKRHEQIVIPHDIPPIQPPEFNLETGPPKWKEVESIVRRARSASAPGPNGVPYKLYKNAPDVLRYLWRLMRIVWQKGIIPKGWRRAGGVLIPKEKDVTDIGQFRPICLLNVEGKIFFSVIARRLSTYLEKNKYIDTSVQKAGIPGFSGCLEHTSMIWHQIQAAKKDKRDIHVIFLDLANAFGSVPHNLLWESFNFFHVPSSVTSLVKAYFEDLQLCFATADFTTSWQRVEVGIMAGCTISPLAFTMAMEVIIRASRWVVGGERTKNGIRLPPIRAYMDDMTTLTTTAACTRRLLGKLQENIKWARMKIKPNKSRSISIVKGQLKNVKFCIGDDPIPTVSEQPVKSLGRWYNASLGDKDQVQQVRQDITNSLEDINSTLLPGKLKLWCLQFGLLPRVMWPLTVYELPITTVEKMERTMTSYIKKWLGVPRCLTNISLYGKGVLELPITSLTEEYKCSKVRLQMTLKDSRDQTISNAVPLLVTGRKWTPSDAVQQATSALKHSDIVGHVQLGRGGFGLMASKPTWRKASTSERRKMVVEEVRRQEETERSAKAVSLVKQGQWMRWEGLERRKLSWRELWEMEASNISFIIRATYDVLPSPKNLNQWYGEDPTCALCPTPATLKHILAGCKTCLTQGRYTWRHNQVLKSLAAALESQRNTTNSLPLRAINSITAPTFIREGQKKPKHPPTKTEAGQLAMARDWKMLVDIGQQLIFPPEIAVTTLRPDLVLWSPSLKTVYIIELTVPWENSTDEAYERKKLRYIELATDAQQRGWKAKVYPVEVGCRGFVASSTIRLLKDLGIHGQALRQTIKSVSEAAERSSQWIWIKRKDPCWAQRAST

SEQ ID NO: 8859 - protein, 958 aa, Pimephales promelas
MIALGFFPITNTFRSLFFFVHLAGITRIQVKQNLKLIIFYCVLIYRRPGPACLFLENFAAFLSSIIKLENVLILWDFNLHIDSSCAVASEFITLTESFHFKQCVSGPTHIKGHTLDLVFSLGLNIDQLSGMDINNVIQPPEFNLETGPPKWKEVESTVRRARSASAPGPNGVPYKLYKNAPDVLRYLWRLMRIVWQKGIIPKVWRRAGGVLIPKEKDATDVSQFRPICLLNVEGKTFFSVIARRLSTYLEKNNYIDTSIQKAGIPGFSGCLEHTSMIWHQIQAAKKDKKDIHVIFLDLANAFGSVPHNLLWESFKFFHVPSSVTSLVKAYFEDLQLCFTTADFTTSWQRVEVGIMAGCTISPLAFTMAMEVIIRASKWVVGGERTKNGIHLPPIRAYMDDMTTLTTTAACTRRLLGKLQENIKWARMKIKPNKSRSISIVKGQLKDVKFCIGDDPIPTVSEQPVKSLGRWYNASLRDKDQVQQVRQDITNSLENINNTLLPGKLKLWCLQFGLLPRVMWPLTIYELPITTVEKMERTMTSYVKKWLGVPRCLTNISLYGKGVLELPITSLTEEYKCSKVRLQMTLKDSRDQTISNAVPPLLTGRKWKPSDAVQQATSALRHSDIVGHVQLGRGGLGLTTSKPTWRKASTAERRKMVVEEVRRQEEAERSSKAVSLAKQGQWMRWEGLERRKRSWRELWEMDASNISFIIRATYDVLPSPKNLHQWYGEDPTCALCPTPATLKHILVGCKTSLTQGRYTWRHNQVLKSLAAALESQRDATNSLPLRATKSITAPIFIREGQEKPNHPPTKPETGQLAMARDWKMPVDIGQQLIFPPEIAVTTLRPDLVLWSPSLKSVYIIELTVPWENATDEAYERKKLRYIGLAADAQQRGWKAKVYPVEVGCRGFVASSTIRLLKDLGIRGQALRQTIRSVSEASERSSQWIWTKRKDPCWAQRAST

SEQ ID NO: 8860 - protein, 1176 aa, Carassius auratus
MAAVSDAASVCWRHPLNATESEQRNIPPEPARAGAQDGSMTDSMVTDSGTDMTTSKNTAHETTTAAAGHSLQVCTCGWAKITSFRGLRTHQGKRGCLKEQRQGPRIDQYFLRSNQSNQSIEAQRRDKNQSSQSISTSVPEEDNTSTEMPVEEPTQPQRPPKEEKIKGHRPSVKWPKAVEKREWEIINNDLTKILEQQVGTAEKKLERMVDIIYHYGEEHFGVNARRSNKAISAPAKSRRQQEIEILVRERRQLRKQWKKASDAEREGLMLLQGDIKCRLATLRRAENLRKLRKKKEHTRTRFYKNPFKFVKDLFAKEKSGILKIPKEELEEHLEKGNHDPKRHEQIVIPHDIPPIQPPEFNLETGPPKWKEVESTVRRARSASAPGPNGVPYKLYKNAPDVLRYLWRLMRIVWQKGIIPKGWRRAGGVLIPKEKDATDIGQFRPICLLNVEGKIFFSVIARRLSTYLEKNKYIDTSVQKAGIPGFSGCLEHTSMIWHQIQAAKKDKRDIHVIFLDLANAFGSVPHNLLWESFNFFHVPSSVTSLVKAYFEDLQLCFTTADFTTSWQRVEVGIMAGCTISPLAFTMAMEVIIRASRWVVGGERTKNGIRLPPIRAYMDDMTTLTTTAACTRRLLGKLQENIKWARMKIKPNKSRSISIVKGQLKNLKFCIGDDPIPTVSEQPVKSLGRWYNASLGDKDQVQQVRQDITNSLEDINSTLLPGKLKLWCLQFGLLPRVMWPLTVYELPITTVEKMERTMTSYIKKWLGVPRCLTNISLYGKGVLELPITSLTEEYKCSKVRLQMTLKDSRDQTISNAVPLLVTGRKWTPSDAVQQATSALKHSDIVGHVQLGRGGFGLTASKPTWRKASTSERRKMVVEEVRRQEETERSAKAVSLVRQGQWMRWEGLERRKLSWRELWEMEASNISFIIRATYDVLPSPKNLNQWYGEDPTCALCPTPATLKHILAGCKTCLTQGRYTWRHNQVLKSLAAALESQRNTTNSLPLRAIDSITAPTFIREGQKKPKHPPTKTEAGQLAMARDWKMLVDIGQQLIFPPEIAVTTLRPDLVLWSPSLKTVYIIELTVPWENSTDEAYERKKLRYIELAADAQQRGWKAKVYPVEVGCRGFVASSTIRLLKDLGIHGQALRQTIKSVSEAAERSSQWIWIKRKDPCWAQRAST

SEQ ID NO: 8861 - protein, 1176 aa, Carassius auratus
MAAVSDAASVCWRHPLNATESEQRNIPPEPARAGAQDGSMTDSMVTDSGTDMTTSKNTAHETTTAAAGHSLQVCTCGWAKITSFRGLRTHQGKRGCLREQRQGPRIDQYFLRSNQSNQSIEAQRRDKNQSSQSISTSVPEEDNTSTEMPVEEPTQPQRPPKEEKIKGHRPSVKWPKAVEKREWEIVNNDLTKILEQQVGTAEKKLERMVDIIYHYGEERFGVNARRSNKAISAPAKSRRQQEIEILVRERRQLRKQWKKASDAEREGLMLLQGDIKCRLATLRRAENLRKLRKKKEHTRTRFYKNPFKFVKDLFAKEKSGILKIPKEELEEHLEKGNHDPKRHEQIVIPHDIPPIQPPEFNLETGPPKWKEVESIVRRARSASAPGPNGVPYKLYKNAPDVLRYLWRLMRIVWQKGIIPKGWRRAGGVLIPKEKDATDIGQFRPICLLNVEGKIFFSVIARRLSTYLEKNKYIDTSVQKAGIPGFSGCLEHTSMIWHQIQAAKKDKRDIHVIFLDLANAFGSVPHNLLWESFNFFHVPSSVTSLVKAYFEDLQLCFTTADFTTSWQRVEVGIMAGCTISPLAFTMAMEVIIRASRWVVGGERTKNGIRLPPIRAYMDDMTTLTTTAACTRRLLGKLQENIKWARMKIKPNKSRSISIIKGQLKNVKFCIGDDPIPTVSEQPVKSLGRWYNASLGDKDQVQQVRQDITNSLEDINSTLLPGKLKLWCLQFGLLPRVMWPLTVYELPITTVEKMERTMTSYIKKWLGVPRCLTNISLYGKGVLELPITSLTEEYKCSKVRLQMTLKDSRDQTISNAVPLLVTGRKWTPSDAVQQATSALKHSDIVGHVQLGRGGFGLTASKPTWRKASTSERRKMVVEEVRRQEETERSAKAVSLVRQGQWMRWEGLERRKLSWRELWEMEASNISFIIRATYDVLPSPKNLNQWYGEDPTCALCPTPATLKHILAGCKTCLTQGRYTWRHNQVLKSLAAALESQRNTTNSLPLRAIDSITAPTFIREGQKKPKHPPTKTEAGQLAMARDWKMLVDIGQQLIFPPEIAVTTLRPDLVLWSPSLKTVYIIELTVPWENSTDEAYERKKLRYIELAADAQQRGWKAKVYPVEVGCRGFVASSTIRLLKDLGIHGQALRQTIKSVSEAAERSSQWIWIKRKDPCWAQRAST

SEQ ID NO: 8862 - protein, 1175 aa, Oxygymnocypris stewartii
MAAVSDAVSVCWRHPPNATENEQRNIPLEPAREGAQDGSMTDSMVTDPGTDMTTSKNTAHETTAAAGHSLQVCTCGWAKITSFRGLRTHQGKRGCLREQRQWPRIDQYFLRSNQSNQSIEARRRDKNQSSQSISTIVTEEGNTSTEMPVEEPTQPQRPPKEGKIKGHRLSVKWPKAVEKREWEIVNNDLTKILERQVGTAEKKLERMGDIIYHYGEERFGVNTRRSGKVTPAPAKSRRQQEIERLVRERRQLRKQWKKASNAEREGLMLLQGDIKCRLATLRRAENLRKLRKKKEHTRTRFYKNPFKFVKDLFAKEKSGILKISKQELEEHLEKVHHDTKRHEQIVIPHDIPPIQPPEFNLEAGPPKWKEVESTVRRARSASAPGPNGVPYKLYKKAPDVLRYLWRLMRIVWQKGIIPKAWRRAGGVLIPKEKDATEISQFRPICLLNVEGKIFFSMIAQRLSTYLEKNKYIDTAVQKAGIPGFSGCLEHTSMIWHQIQAAKKDKRDIHVIFLDLANAFGSVPHNLLWESFNFFHVPSSVTSLVKAYFEDLQLCFTTADFTTSWQRVEVGIMAGCTISPLAFTMAMEVIIRASRWVVGGERTKNGIRLPPIRAYMDDMTILTTTAACTRRLLGKLQENIKWARMKIKPNKSRSISIVKGQLKNVKFCIGDDPIPTVSEQPVKSLGRWYNASLRDKDQVQQVRQDFTNNLDNINRTLLPGKLKLWCLQFGLFPRVMWPLTIYELPLTTVEKMERTMTSYVKKWLGVPRCLTNISLYGKGVLELPITSLTEEYKCSKVRLQMTLKDSRDQTISNAVPLLLTGRKWTPSDAVQQATSALRHSDIVGHVQLGRGGFGLTASKPTWRKASTSERRKMVVEEVRRQEEAERSAKAVSLIKQGQWMRWEGLERRKLSWRELWEMEASNISFIIRATYDVLPSPKNLHQWYGEDPICALCPTPATLKHILTGCKTSLIQGRYTWRHNQVLKSLAAALESKRNTTNSLPLRATNSITAPTFIREGQKKPNHLPTKPEVGQLAMARDWKMLVDVGQQLIFPPEIAATTLRPDLVLWSPSLKSVYITELTVPWENSTEEAYERKKLRYTELAADAQQRGWKAKVYPVEVGCRGFVASSTIRLLKDLGIHGQALRQTIRSVSEAAERSSQWIWIKRKDHCWAQRAST

SEQ ID NO: 8863 - protein, 1176 aa, Carassius auratus
MAAVSDAASVCWRHPLNATESEQRNIPPEPARAGAQDGSMTDSMVTDSGTDMTTSKNTAHETTTAAAGHSLQVCTCGWAKITSFRGLRTHQGKRGCLKEQRQGPRIDQYFLRSNQSNQSIEAQRRDKNQSSQSISTSVPEEDNTSTEMPVEEPTQPQRPPKEEKIKGHRPSVKWPKAVEKREWEIINNDLTKILEQQVGTAEKKLERMVDIIYHYGEERFGVNARRSNKAISAPAKSRRQQEIEILVRERRQLRKQWKKASDAEREGLMLLQGDIKCRLATLRRAENLRKLRKKKEHTRTRFYKNPFKFVKDLFAKEKSGILKIPKEELEEHLEKGNHDPKRHEQIVIPHDIPPIQPPEFNLETGPPKWKEVESTVRRARSASAPGPNGVPYKLYKNAPDVLRYLWRLMRIVWQKGIIPKGWRRAGGVLIPKEKDATDIGQFRPICLLNVEGKIFFSVIARRLSTYLEKNKYIDTSVQKAGIPGFSGCLEHTSMIWHQIQAAKKDKRDIHVIFLDLANAFGSVPHNLLWESFNFFHVPSSVTSLVKAYFEDLQLCFTTADFTTSWQRVEVGIMAGCTISPLAFTMAMEVIIRASRWVVGGERTKNGIRLPPIRAYMDDMTTLTTTAACTRRLLGKLQENIKWARMKIKPNKSRSISIVKGQLKNVKFCIGDDPIPTVSEQPVKSLGRWYNASLGDKDQVQQVRQDITNSLEDINSTLLPGKLKLWCLQFGLLPQVMWPLTVYELPITTVEKMERTMTSYIKKWLGVPRCLTNISLYGKGVLELPITSLTEEYKCSKVRLQMTLKDSRDQNISNAVPLLVTGRKWTPSDAVQQATSALKHSDIVGHVQLGRGGFGLTASKPTWRKASTSERRKMVVEEVRRQEETERSAKAVSLVRQGQWMRWEGLERRKLSWRELWEMEASNISFIIRATYDVLPSPKNLNQWYGEDPTCALCPTPATLKHILAGCKTCLTQGRYTWRHNQVLKSLAAALESQRNTTNSLPLRAIDSITAPTFIREGQKKPKHPPTKTEAGQLAMARDWKMLVDIGQQLIFPPEIAVTTLRPDLVLWSPSLKTVYIIELTVPWENSTDEAYERKKLRYIELAADAQQRGWKAKVYPVEVGCRGFVASSTIRLLKDLGIHGQALRQTIKSVSEAAERSSQWIWIKRKDPCWAQRAST

SEQ ID NO: 8864 - protein, 1176 aa, Carassius gibelio
MAAVSDAASVCWRHPLNATESEQRNIPPEPARAGAQDGSMTDSMVTDSGTDMTTSKNTAHETTTAAAGHSLQVCTCGWAKITSFRGLRTHQGKRGCLREQRQGPRIDQYFLRSNQSNQSIEAQRRDKNQSSQSISTSVPEEDNTSTEMPVEEPTQPQRPPKEEKIKGHRPSVKWPKAVEKREWEIVNNDLTKILEQQVGTAEKKLERMVDIIYHYGEERFGVNARRSNKAISAPAKSRRQQEIEILVRERRQLRKQWKKASDAEREGLMLLQGDIKCRLATLRRAENLRKLRKKKEHTRTRFYKNPFKFVKDLFTKEKSGILKIPKEELEEHLEKGNHDPKRHEQIVIPHDIPPIQPPEFNLETGPPKWKEVESIVRRARSASAPGPNGVPYKLYKNAPDVLRYLWRLMRIVWQKGIIPKGWRRAGGVLIPKEKDATDIGQFRPICLLNVEGKIFFSVIARRLFTYLEKNKYIDTSVQKAGIPGFSGCLEHTSMIWHHIQAAKKDKRDIHVIFLDLANAFGSVPHNLLWESFNFFHVPSSVTSLVKAYFEDLQLCFTTADFTTSWQRVEVGIMAGCTISPLAFTMAMEVIIRASRWVVGGERTKNGIRLPPIRAYMDDMTTLTTTAACTRRLLGKLQENIKWARMKIKPNKSRSISIVKGQLKNVKFCIGDDPIPTVSEQPVKSLGRWYNASLGDKDQVQQVRQDITNSLEDINSTLLPGKLKLWCLQFGLLPRVMWPLTVYELPITTVEKMERTMTSYIKKWLGVPRCLTNISLYGKGVLELPITSLTEEYKCSKVRLQMTLKDSRDQTISNAVPLLVTGRKWTPSDAVQQATSALKHSDIVGHVQLGRGGFGLTASKPTWRKASTSERRKMVVEEVRRQEETERSAKAVSLVRQGQWMRWEGLERRKLSWRELWEMEASNISFIIRATYDVLPSPKNLNQWYGEDPTCALCPTPATLKHILAGCKTCLTQGRYTWRHNQVLKSLAAALEIQRNTTNSLPLRAIDSITAPTFIREGQKKPKHPPTKTEAGQLAMARDWKMLVDIGQQLIFPPEIAVTTLRPDLVLWSPSLKTVYIIELTVPWENSTDEAYERKKRRYIELAADAQQRGWKAKVYPVEEGCRGFVASSTIRLLKDLGIHGQALRQTIKSVSEAAERSSQWIWIKRKDPCWAQRAST

SEQ ID NO: 8865 - protein, 1029 aa, Carassius auratus
MPVEEPTQPQRPPKEEKIKGHRPSVKWPKAVEKREWEIINNDLTKILEQQVGTAEKKLERMVDIIYHYGEERFGVNARRSNKAISAPAKSRRQQEIEILVRERRQLRKQWKKASDAEREGLMLLQGDIKCRLATLRRAENLRKLRKKKEHTRTRFYKNPFKFVKDLFAKEKSGILKIPKEELEEHLEKGNHDPKRHEQIVIPHDIPPIQPPEFNLETGPPKWKEVESTVRRARSASAPGPNGVPYKLYKNAPDVLRYLWRLMRIVWQKGIIPKGWRRAGGVLIPKEKDATDIGQFRPICLLNVEGKIFFSVIARRLSTYLEKNKYIDTSVQKAGIPGFSGCLEHTSMIWHQIQAAKKDKRDIHVIFLDLANAFGSVPHNLLWESFNFFHVPSSVTSLVKAYFEDLQLCFTTADFTTSWQRVEVGIMAGCTISPLAFTMAMEVIIRASRWVVGGERTKNGIRLPPIRAYMDDMTTLTTTAACTRRLLGKLQENIKWARMKIKPNKSRSISIVKGQLKNLKFCIGDDPIPTVSEQPVKSLGRWYNASLGDKDQVQQVRQDITNSLEDINSTLLPGKLKLWCLQFGLLPRVMWPLTVYELPITTVEKMERTMTSYIKKWLGVPRCLTNISLYGKGVLELPITSLTEEYKCSKVRLQMTLKDSRDQTISNAVPLLVTGRKWTPSDAVQQATSALKHSDIVGHVQLGRGGFGLTASKPTWRKASTSERRKMVVEEVRRQEETERSAKAVSLVRQGQWMRWEGLERRKLSWRELWEMEASNISFIIRATYDVLPSPKNLNQWYGEDPTCALCPTPATLKHILAGCKTCLTQGRYTWRHNQVLKSLAAALESQRNTTNSLPLRAIDSITAPTFIREGQKKPKHPSTKTEAGQLAMARDWKMLVDIGQQLIFPPEIAVTTLRPDLVLWSPSLKTVYIIELTVPWENSTDEAYERKKLRYIELAADAQQRGWKAKVYPVEVGCRGFVASSTIRLLKDLGIHGQALRQTIKSVSEAAERSSQWIWIKRKDPCWAQRAST

SEQ ID NO: 8866 - protein, 1176 aa, Carassius gibelio
MAAVSDAASVCWRHPLNATESEQRNIPPEPARAGAQDGSMTDSMVTDSGTDMTTSKNTAHETTTAAAGHSLQVCTCGWAKITSFRGLRTHQGKRGCLREQRQGPRIDQYFLRSNQSNQSIEAQRRDKNQSSQSISTSVPEEDNTSTEMPVEEPTQPQRPPKEEKIKGHRPSVKWPKAVEKREWEIVNNDLTKILEQQVGTAEKKLERMVDIIYHYGEERFGVNARRSNKAISAPAKSRRQQEIEILVRERRQLRKQWKKASDAEREGLMLLQGDIKCRLATLRRAENLRKLRKKKEHTRTRFYKNPFKFVKDLFAKEKSGILKIPKEELEEHLEKGNHDPKRHEQIVIPHDIPPIQPPEFNLETGPPKWKEVESIVRRARSASAPGPNGVLYKLYKNAPDVLRYLWRLMRIVWQKGIIPKGWRRAGGVLIPKEKDATDIGQFRPICLLNVEGKIFFSVIARRLSTYLEKNKYIDTSVQKAGIPGFSGCLEHTSMIWHQIQAAKKDKRDIHVIFLDLANAFGSVPHNLLWESFNFFHVPSSVTSLVKAYFEDLQLCFTTADFTTSWQRVEVGIMAGCTISPLAFTMAMEVIIRASRWVVGGERTKNGIRLPPIRAYMDDMTTLTTTAACTRRLLGKLQENIKWARMKIKPNKSRSISIVKGQLKNVKFCIGDDPIPTVSEQPVKSLGRWYNASLGDKDQVQQVRQDITNSLEDINSTLLPGKLKLWCLQFGLLPRVMWPLTVYELPITTVEKMERTMTSYIKKWLGVPRCLTNISLYGKGVLELPITSLTEEYKCSKVRLQMTLKDSRDQTISNAVPLLVTGRKWTPSDAVQQATSALKHSDIVGHVQLGRGGFGLTASKPTWRKASTSERRKMVVEEVRRQEETERSAKAVSLVRQGQWMRWEGLERRKLSWRELWEMEASNISFIIRATYDVLPSPKNINQWYGEDPTCALCPTPATLKHILAGCKTCLTQGRYTWRHNQVLKSLAAALEIQRNTTNSLPLRAIDSITAPTFIREGQKKPKHPPTKTEAGQLAMARDWKMLVDIGQQLIFPPEIAVTTLRPDLVLWSPSLKTVYIIELTVPWENSTDEAYERKKLRYIELAADAQQRGWKAKVYPVEVGCRGFVASSTIRLLKDLGIHGQALRQTIKSVSEAAERSSQWIWIKRKDPCWAQRAST

SEQ ID NO: 8867 - protein, 909 aa, Collichthys lucidus
MLLQGDIKLRLATLRRAENLRKLRRKKEHTRTRFYKNPFKFVKDLFDKDKSGFLKTSKQELEEHLEKVYQDTKRHEQLAIPHDIPPIQPPEVNMETGPPKWKEVESMVRHARSGSAPGPNGVPYKLYKNAPDVLRYLWRLMRIVWQKGLIPKAWRRAGGVLIPKEKDAADISQFRPISLLNVEGKIFFSVLAQRLSTYLEKNKYVDTSVQKAGIPGFSGCLEHTSMIWHQIQAAKKDKRDLHVIFLDLANAFGSVPHNLLWESFNFFHVPSSITTLVKAYFEDLQLCFTTADFITSWQRVEVGIMAGCTISPLAFTMAMEVIIRASRWVVGGERTRNGIRLPPVRAYMDDMTTLTTTAACTRRLLGKLQENIKWARMKIKPNKSRSISIIKGELKNVKFCIGDDPIPTVSEQPVKSLGRWYNSSLKDKDQVQQLRQDIINGLDNINKIPLPGKLKLWCLQFGLLPRVMWPLTVYEVPLTTVEKMERAITAYVKQWLGVPRCLTNISLYGKGVLELPITSLTEEYKCSKVRLQMTLTGSKDRTISEAAPPLSTGRKWTPSGAVQHATAALRHSDIVGHIQMGRGGFGLTTRKPTWCKASASEKRKLVVEEVRRQEEAERTAKAISLAKQGQWMRWEGLEKRKLGWRDLWEMEASNISFIIRATNDVLPSPKNLHLWYGEDPTCALCPTSATLKHILTGCKTSLTQGRYTWRHNQVLKSLAAVLEGKRNAINSLPMRATTSITAAPTFVREGHKKLNHPPLKPEVGQLTMARDWKMLVDIGQQLIFPAEIAATTLRPDLVLWSPSLKSVFIAELTVPWENAVEEAYERKKLRYTELAADAQQRGWKAKVYPVEVGCRGFVASSTIKLLKDLGIHGRALRQTVRSLSEAAERSSQWIWMKRKDPCWAHRSAT

SEQ ID NO: 8868 - protein, 1175 aa, Oxygymnocypris stewartii
MAAVSDAVSVCWRHPPNATENEQRNIPLEPARAGAQDGSMTDSMVTDPGTDMTTSKNTAHETTAAAGHSLQVCTCGWAKITSFRGLRTHQGKRGCLREQRQWPRIDQYFLRSNQSNQSIEARRRDKNQSSQSISTIVTEEGNTSTEMPVEEPTQPQRPPKEGKIKGHRLSVKWPKAVEKREWEIVNNDLTKILERQVGTAEKKLERMGDIIYHYGEERFGVNTRRSGKVTPAPAKSRRQQEIERLVRERRQLRKQWKKASNAEREGLMLLQGDIKCRLATLRRAENLRKLRKKKEHTRTRFYKNPFKFVKDLFAKEKSGILKISKQELEEHLEKVHHDTKRHEQIVIPHDIPPIQPPEFNLEAGPPKWKEVESTVRRARSASAPGPNGVPYKLYKKAPDVLRYLWRLMRIVWQKGIIPKAWRRAGGVLIPKEKDATEISQFRPICLLNVEGKIFFSMIAQRLSTYLEKNKYIDTAVQKAGIPGFSGCLEHTSMIWHQIQAAKKDKRDIHVIFLDLANAFGSVPHNLLWESFNFFHVPSSVTSLVKAYFEDLQLCFTTANFTTSWQRVEVGIMAGCTISPLAFTMAMEVIIRASRWVVGGERTKNGIRLPPIRAYMDDMTILTTTAACTRRLLGKLQENIKWARMKIKPNKSRSISIVKGQLKNVKFCIGDDPIPTVSEQPVKSLGRWYNASLRDKDQVQQVRQDFTNNLDNINRTLLPGKLKLWCLQFGLFPRVMWPLTIYELPLTTVEKMERTMTSYVKKWLGVPRCLTNISLYGKGVLELPITSLTEEYKCSKVRLQMTLKDSRDQTISNAVPLLLTGRKWTPSDAVQQATSALRHSDIVGHVQLGRGGFGLTASKPTWRKASTSERRKMVVEEVRRQEEAERSAKAVSLIKQGQWMRWEGLERRKLSWRELWEMEASNISFIIRATYDVLPSPKNLHQWYGEDPICALCPTPATLKHILTGCKTSLIQGRYTWRHNQVLKSLAAALESKRNTTNSLPLRATNSITAPTFIREGQKKPNHLPTKPEVGQLAMARDWKMLVDVGQQLIFPPEIAATTLRPDLVLWSPSLKSVYITELTVPWENSTEEAYERKKLRYTELAADAQQRGWKAKVYPVEVGCRGFVASSTIRLLKDLGIHGQALRQTIRSVSEAAERSSQWIWIKRKDHCWAQRAST

SEQ ID NO: 8869 - protein, 1175 aa, Oxygymnocypris stewartii
MAAVSDAVSVCWRHPPNATENEQRNIPLEPARAGAQDGSMTDSMVTDPGTDMTTSKNTAHETTAAAGHSLQVCTCGWAKITSFRGLRTHQGKRGCLREQRQWPRIDQYFLRSNQSNQSIEARRRDKNQSSQSISTIVTEEGNTSTEMPEEEPTQPQRPPKEGKIKGHRLSVKWPKAVEKREWEIVNNDLTKILERQVGTAEKKLERMGDIIYHYGEERFGVNTRRSGKVTPAPAKSRRQQEIERLVRERRQLRKQWKKASNAEREGLMLLQGDIKCRLATLRRAENLRKLRKKKEHTRTRFYKNPFKFVKDLFAKEKSGILKISKQELEEHLEKVHHDTKRHEQIVIPHDIPPIQPPEFNLEAGPPKWKEVESTVRRARSASAPGPNGVPYKLYKKAPDVLRYLWRLMRIVWQKGIIPKAWRRAGGVLIPKEKDATEISQFRPICLLNVEGKIFFSMIAQRLSTYLEKNKYIDTAVQKAGIPGFSGCLEHTSMIWHQIQAAKKDKRDIHVIFLDLANAFGSVPHNLLWESFNFFHVPSSVTSLVKAYFEDLQLCFTTADFTTSWQRVEVGIMAGCTISPLAFTMAMEVIIRASRWVVGGERTKNGIRLPPIRAYMDDMTILTTTAACTRRLLGKLQENIKWARMKIKPNKSRSISIVKGQLKNVKFCIGDDPIPTVSEQPVKSLGRWYNASLRDKDQVQQVRQDFTNNLDNINRTLLPGKLKLWCLQFGLFPRVMWPLTIYELPLTTVEKMERTMTSYVKKWLGVPRCLTNISLYGKGVLELPITSLTEEYKCSKVRLQMTLKDSRDQTISNAVPLLLTGRKWTPSDAVQQATSALRHSDIVGHVQLGRGGFGLTASKPTWRKASTSERRKMVVEEVRRQEEAERSAKAVSLIKQGQWMRWEGLERRKLSWRELWEMEASNISFIIRATYDVLPSPKNLHQWYGEDPICALCPTPATLKHILTGCKTSLIQGRYTWRHNQVLKSLAAALESKRNTTNSLPLRATNSITAPTFIREGQKKPNHLPTKPEVGQLAMARDWKMLVDVGQQLIFPPEIAATTLRPDLVLWSPSLKSVYITELTVPWENSTEEAYERKKLRYTELAADAQQRGWKAKVYPVEVGCRGFVASSTIRLLKDLGIHGQALRQTIRSVSEAAERSSQWIWIKRKDHCWAQRAST

SEQ ID NO: 8870 - protein, 1001 aa, Carassius auratus
MPVEEPTQPQRPPKEEKIKGHRPSVKWPKAVEKREWEKINNDLTKILEQQVGTAEKKLERMVDIIYHYGEERFGVNARRSNKAISAPAKSWRQQEIEIMVRERRQLRKQWKKASDAEREGLMLLQGDIKCRLATLRRAENLRKLRKKKEHTRTRFYKNPFKFVKDLFAKEKSRILKIPKEELEEHLEKGNHDPKRHEQIVIPHDIPPIQPPEFNLETGPPKWKEVESTVRRARSASAPGPNGVPYKLYKNAPDVLRYLWRLMRIVWQKGIIPKGWRRAGGVLIPKEKDATDIGQFRPICLLNVEGKIFFSVIAWRLSTYLEKNKYTDTSVQKAGIPGFSGCLEHTSMIWHQIQAAKKDKRDIHVIFLDLANAFGSVPHNLLWESFNFFHVPSSVTSLVKAYFEDLQLCFTTADFTTSWQRVEVGIMAGCTISPLAFTMAMEVIIRASRWVVGGERTKNGIRLPPIRAYMDDMTTLTTTAASTRRLLGKLQENIKWARMKIKPNKSRSISIVKGQLKNVKFCIGDDPIPTVSEQPVKSLGRWYNASLGDKDQVQQVRQDITNSLEDINSTLLPGKLKLWCLQFGLLPRVMWTLTVYELPITTVEKMERTMTSYIKKWLGVPRCLTNISLYGKGVLDLPITSLTEEYKCSKVRLQMTLKDSRDQTISNAVPLLVTGRKWTPSDAVQQATSALKHSDIVGHVQLGRGGFGLMASKPTWRKASTSERRKMVVEEVRRQEETERSAKAVSLVRQGQWMRWEGLERRKLSWRELWEMEASNISFIIRATYDVLPSPKNLNQWYGEDPTCALCPTPATLKHILAGCKTCLTQGRYTWRHNQVLKSLAAALESQRNTTNSLPLRAIDSITAPTFIREGQKKPKHPPTKTEAGQLAMARDWKMLVDIGQQLIFPPEIAVTTLRPDLVLWSPSLKTVYIIELTVPWENSTDEAYERKKLHNIELAADAKQRGWKAKVYPVEVGCRGFVASSRGSRGLMVRGLDSQLKGCGF

SEQ ID NO: 8871 - protein, 1107 aa, Collichthys lucidus
MMAVSDAVSVCWRHPLSATESLQRMTPLEPARAGAQDGSMIDNTATDPGTNTTMSKNMAHETTAAGHSLQVCTCGWAKVMSVTGLKIHQGKKRCLGKQSQGPRIDRYFLRSNTSNQSSEAQRRDKNQSSQSISTPVTEEGNANTELQVEEPTQPQRPPKENKTKGHRPSVKWPKAVEKREWETVNNDLTKILEQQVGTAEKKLENIGDIIYHYGEERFEVNSRKAANKIPPTKFRRQQEIDRLIRERRDLRKQWKKASDPEREGLMLLQGDIKLRLATLRRAENLRKLRRKKEHTRTRFYKNPFKFVKDLFDKDKSGFPKTSKQELEEHLEKVYQDTKRHEQLAIPHDIPPIQPPEVNMETGPPKWKEVESTVRRARSGSAPGPNGVPYKLYKNAPDVLRYLWRLMRIVWQKLLIPKAWRRAGGVLIPKEEDAADSQFRPISLLNVEGKIFFSVLAQRLSTYLEKNKYVDTSVQKAGIPGFSGCLEHTSMIWHQIQAAKKDKRDLHVIFLDLANAFGSVPHNLLWESFNFFHVPSSITTLVKAYFEDLQLCFTTADFITSWQRVEVGIMAGCTISPLAFTMAMEVIIRASRWVVGGERTRNGIRLPPVRVYMDDMTTLTTTAACTRRLLGKLQENIKWARMKIKPNKSRSISIIKGELKNVKFCIGDDPIPTVSEQPVKSLGRWYNSSLKDKDQVQQLRQDIINGLNNINKIPLPGKLKLWCLQFGLLPRVMWPLTVYEVPLTTVEKMERAITGYVKQWLGVPRCLTNISLYGKGVLELPITSLTEEYKCSKVRLQMTLTDSKDRTISEAAPPLSTGRKWTPSGAVQHATAALRHSDIVGHIQMGRGGFGLTTSKPTWCKASASEKRKMVVEEVRRQEEAERTAKAISLAKQGQWMRWEGLEKRKLGWRDLWEMEASNISFIIRATNDVLPSPKNLHLWYGEDPTCALCPTSATLKHILTGCKTSLTQGRYTWRHNQVLKSLAAVLEGKRNTINSLPMRATTSITAAPTFVREGQKKLNHPPLKPEVGQLTMARDWKMLVDIGQQLIFPAEIAATTLRPDLVLWSPSLKSVFIAELTVPWENAVEEAYERKKLRYTELAADAQQRGC

SEQ ID NO: 8872 - protein, 1182 aa, Amblyraja radiata
MIAVPNAVSVSWRHPLNATKSKLKRIPLEPARAGAEDGSPIDNTVTDPGTETTTGKESMAHETSTTAAGHKLQVCICGWEKITSVKGLKIHQGRKKCLREQRHGPRIDQYFLRSNQSNQSSEAQRQDSNQSSQSISTHVTEEGDTSTEMPVEEPTQQRQRPPLEGKIKGHKPGVKWPKAVEMKEWETVNSDLIHILEQQAGTAVEKLARMGNTIYSYGEERFGVSKGRGGKKLPTPIKSRRQQEIERLIRERRQLKKQWKKATEAEREGLMLLQEDIKSRLATLRKAENLRKLRKKKEHTRTRFYKDPFKFIKDLFAKEKSGTLKTSKRELEEHLEKAHQDTKRHEQLVIPHDIPPIQPPEFNLDTSPPRWKEVENTVRRARAASAPGPNGVPYKLYKNAPDVLRFLWKLMRVVWKKQTIPKAWRRAGGVLIPKEKDASDISQFRPICLLNVEGKIFFSIVSQRLSTYLVTNKYIDTPVQKAGIPGFSGCLEHTSMIWHQIQAAKKEKRDLHVIFLDLANAFGSVPHELLWESFAFFHVPELITTLVKSYFQDLQLCFTTADFSTTWQRLEVGIMAGCTVSPLAFTMAMEVIIRASKWVVGGERTRAGLRLPPIRAYMDDMTTLTTTAACTKRLLGKLQENIKWARMKIKPSKSRSISIVKGVLRDTRFCIGDDPIPTVSEQPVKSLGRWYNASLKDKEQVQQLRQEIVNGLENINQTLLPGKLKLWCLQFGLLPRTMWPLTIYEAPITTVEKMERAITSYAKKWLGVPRCLTNIGLYGKGVLELPLTSLTEEYKCSKVRLQMTLRDSRDKTISAVAPPLVTGRKWTPSDAVQQASSALRHKDIVGQVQQGRGGFGLTTSKPTWRKATTSERRTLVVEEVRRQEEAARSAKAVSLAKQGQWMQWEGVEWRKISWKELWEMEASKISFIISATYDVLPSPKNLHQWYGEDPTCALCPTPATLKHIMVGCKTSLTQGRYTWRHNQVLKSLASALENRRCATNSLPPSASNPPPPTLRATTFVREGQKTSKHPSTRSEEGNLCRARDWRMLVDIGRQLVFPPEIASTNLRPDLVFWSPSQKTAYIIELTVPWENSVEEAYERKKLRYAELAAEATQRGWNTKVYPVEVGCRGFVASSTIRLLKELGIHGQALRKTIRSLSEAAERSSRWIWLKRKDPCWAPSISG

SEQ ID NO: 8873 - protein, 1173 aa, Oncorhynchus tshawytscha
MLAVSDAVSVCWRHPLSATESQQRNIPLELARAGAQDGSMTDHTVTDPGTETTTSRNTAHETTITAAGHTLQVCSCGWERVTSARGLRIHQGRKRCLGEQREGPRIDQYILRSSQSNQSNEAQRRDANQSSQSISTPVTEEDNTGTEMPVGELTQPQRPLKEKKIKGHKPSVKWPKAVEKREWETINNNLTKILEQQVGTAEKKLERMGDIIYHYGEERFGVNERRSGKTPPTPAKSRRQQEIEILVRERRQLRKQWKKASDAEREGIMLLQADIKCRLATLRRAENLRKLRRKKEHSRTRFYKKPFKFVKDLFAKEKCRILKTPKPELEEHLEKVHQDMKRHEQIIIPHDIPPIQSPEFNLDTDPPKWREVENVVRRARVASAPGPNGVPYKLYKNAPDVLRFLWRLMRIVWQKEIIPKAWRRAGGVLIPKEKDATDISQFRPISLLNVEGKIFFSIIAQRLSTYLERNKYIDTSVQKAGIPGFSGCLEHTSMIWHQIQTAKKDKRDLYVIFLDLANAFGSVPHELLWESFNIFHVPEPITTLVKAFFQDLQLCFTTPDFTTTWQRLEVGIMAGCTISPLAFTMAMEVIIRASRWVVGGERTKEGVRLPPIRAYMDDMTTLTTTAACTRRLLAKLQDNIKWARMKIKPSKSRSISIVKGQLKDVRFCIGDDPIPTVSEQPINSLGRWYNESLRDKDQVQQVRQDIADGLENINKTLLPGRLKLWCLQFGLLPQVMWPLTVYEVPITTVEKMERTITSYVKKWLGVPRCLSNIGLYGKGVLELPLTSLTEEYKCSKVRLQMTLKDSKDQTISKAAPPLQTGRKWTSSKAVQQATSALRHQDIVGNIQHGRGGFGLAASKPTFHKATTSERRKLVVEEVRRQEETARSAKAVSLAKQGQWTRWEGLERRKINWSELWQMEASNISFIIRAVYDVLPSPKNLHQWYGEDSTCPLCPAPATLRHIMPGCKTSLSQGRYTWRHNQVLKSLAAALETKSATNSLPPKTSNPVKTTTFIREGQKRPKYPPTKPETGHLAMARDWKMLVDIGQQLIFPSEIASTNLRPDMVLWSPSRKAVYIIELTVPWENSVEEAYERKKLRYTELAADATQRGWNAKVWPVEVGCRGFVASSTIRLLKELGIHGQALRQTVRAVSQAAERGSQWIWIKQKDPCWAITS

SEQ ID NO: 8874 - protein, 964 aa, Oncorhynchus gorbuscha
MGDIIYEYGTERFGVEEAKGGRKVPTPAVSRRQQEIKRLVQERRQLKKQWKKASEVEKEGIEALQADIKTQLASLHRAENLRKRRRKKEQTRTRFYKDPFKFLKSLFTKEKSGALKTTKKDLEEHLRITNVDSKRHEHLAIPSDIPPIEPPEHHIETSPPTWKEVEDTVRRARTASGPGPNGVPYKVYKNTPDVLRFLWRLMRTAWQKKIIPKVWRRAGGVLIPKEKDAVNISQFRPISLLNVEGKIFFRVIAQRMAEYLQRNTYVDASVQKAGISGFSGCLEHSSMIWHQIQMAKVEKRDLHVVFLDLANAFGSVPHELLWSAFRFFHIPDTITNLVKSYFQDLQFCFTTSEFTTSWQCLNVGIMAGCTISPLAFTMAMEVIIRSSKWVAGGQRVDSGFRLPPLRAYMDDITTLTTTVPCTRRLLRKLENISWARMKIKPSKSRSISIVKGVLSDLKFFIGDDQIPTVSEQPVKSLGRWYDASLKDKDQVQQLRKDISSSLQSIDNTQLPGKLKAWCLQFGLLPRVLWPLALYEVPVSTVEKMERGVTGYLKKWLGVPRCLTTIGLYGDGVLKLPLTSLTEEFKCAKTRLQMTLNESRDPVVSNNAPTLATGRKWRPGKAVQEATAALRHADIVGHVQQGRGGLGLTSRAAWSKATAPERRKMVVQEVRHQEETARWAKAVSLAKQGQWTRWDSVEKRKISWKDLWAMEARRLSFSIRATYDVLPTPVNLHQWYGEDPDCALCSMPANLRHILTGCKTSLTQGRYTWRHNQVLKNLASALEDKRAATNSLPPTAASHSLRTNFVREGAKPPKSGSTPLERDQLRLARDWKMLADIGRQLVFPPEIATTTLRPDMVLWSRSLNKVFIIELTVPWENSVDEAYERKHLRYADLAAEARHHGWNTEVRPVEVGCRGFVATSTTRLLRDLGIKGQSQRSAIKAVSEAAEGSSQWLWMKRKDPSWAPK

SEQ ID NO: 8875 - protein, 1178 aa, Hirundichthys speculiger
MLAVSDAASVCWRHPLSATESQIRNIPLEPARAGAQDGSLIDHTATDLGTKTTMRKKNTAHETPTTAAGHTLQVCSCGWKKVTSARGLKIHQGRKRCLGEQRQELRIDQYFLRSNRSSQSNEAQRQDTNHSSQSISTPVIEEDNTSTDMPVDELNQSQRPPKEEKIKGHRPNVKWPKAVEKKEWETINNDLIKILEQQKGTAEKKLERMGDIIYHYGEDRFGVSIRRNGKAQPAPAKSRRQQEIEKLVRERRQLRKQWKKASEAEKEGLMLLQADIKCRLITLRRAENLRKLRKKKEHLRTRFYKNPFKFVKDLFAKDKSGILKTPKRVLEEHLEKVHQDPKRHEQIIIPHDIPPIQPPKVKLDTDPPKWKEVENIVRRARAASAPGPNGVPYRLYKNAPDVLLRFLWRLMRIVWQKEIIPKAWRRAGGVLIPKEKDSTDINQFRPICLLNVEGKIFFSIIAQRLSTYLEKNNYVDTSVQKAGIPGFSGCLEHTSMIWHQIQAAKKDKRDLYVIFLDLANAFGSVPHKLLWESFNFFHVPESITTLVKAYFQDLQLCFTTPDFTTTWQRLEVGIMAGCTISPLAFTMAMEVIIRASRWVVGGGERTKNGLRLPPIRAYMDDMTTLTTTPACTKRLLAKLQENIKWARMQVKPSKSRSVAIVKGQLKDVKFCIGDDPIPTVSEQPVKSLGRWYSASLKDTDQVQQLRQDIANGLERINRTLLPGKLKLWCLQFGLLPRVMWPLTMYEVPITAVEKMERTITSYAKKWLGVPRCLSNISLYGKGVLELPLTSLTEEYKCSKVRLEMTLRDSRDQTIRSAAPPVITGRKWTPSNAVQQATSALRHQDILGHIQHGRGGFGLAASKPSWRKATTSERRKLVVEEVRRQEETVRSTKAVSLAKQGQWMRWEGLERRKINWSELWQMDTCNISFIIRAVYDVLPTPKNLHQWYGEDPTCPLCPAPATLRHILTGCKTSLTQGRYTWRHNQVLKSLAAAVEIKRNATNSLPPRSTNPLETTTFIIREGQKKPKHTTTKPETGHLAMARDWKMLVDVGQQLIFPSEIATTNLRPDMVLWSPSRRSVFIIELTVPWENSVEEAYERKKLRYTELAADAIQHGWNAKVCPVEVGCRGFVASSTIRLLKELGIHGQALRQTIRSVSEAAERTSHWLWIKRKDPCWAIRT

SEQ ID NO: 8876 - protein, 953 aa, Oncorhynchus kisutch
MEDVNSSTEVTTEVEPTTGVELTKPPRPAVERRLPGHRPYVKWPGASDKKLWETVNTDLTLTLEKLRGTVEKKLERMGDIIYEYGTERFGVEEAKGGRKVPTPPVSRRQQELKRLVQERRQLKKQWKKASEVEKEGIEALQADIKTRLASLRRAENLRKRRRKKEQTRTRFYKDPFKFRKSLFTKEKSGALKTTKKDLEEHLRTTNFDSKQHEHLAIPSDIPPIEPPEHHIETSPPTWKEVENTVRRARTASAPGPNGVPYKVYKNAPDVLRFLWRLMRTGWKNKIIPKVWRRAGGVLIPKEKDAVNISQFRPISLLNVEGKIFFRVIAQRMAEYLQRNAYVDTSVQKAGISGFSGCLEHSSMIWHQIQMAKVEKRDLHVVFLDLANAFGSVPHELLWSAFRFFHIPDTITTLVKSYFQDLQFCFTTSEFTTSWQCLNVGIMAGCTISPLAFIMAMEVIIRSSKWVALRAYMDDITTLTTTVPCTRRLLRKLEENISWARMKIKPSKSRSISIVKGVLSDLKFFIGDDQIPTVSEQPVKSLGRWYDASLKDKDQEQQLRKDISSSLQSIDNTQLPGKLKAWCLQFGLLPRVLWPLAVYEVPISTVENMERGVTGYLKKWLGVPRCLNTIGLYGDGVLKLPLTSLTEEFKCSKTRLQMTLNESRDPVVSNNAPTLATGRKWRPGKAVQEATAALRHADIVCHVQQGRGGLGLTSRAAWSKATAPERWKMVVQEVRHQEEAARWAKAVSLSKQGQWTRWDSVEKRKISWKDLWAMEARRLSFSIRATYDVLPTPVNLHQWYGEDPDCALCSMPANLRHILTGCKTSLTQGRYTWRHNQVRKNLASALEDKRAATNSLPPPAASHPLRTNFVREGAKPPKRGSTPLERDQLRLARDWKMLADSGRQLVFPPEIATTTLRPDMVLWSRSLKKVFIIELTVPWEDSGVGYHQQGNSYD

SEQ ID NO: 8877 - protein, 1178 aa, Pimephales promelas
MLRSMLETPALATKRQHMRIPLESARAGAEEDSLTDTMVTTGLETTTSNESTAQENTTATVTSSAATAGHKEMQVCVCGWRKVTSYHGLRIHQGKKGCLGIERQRPRIDHFLRKRPNQSSEAQQLDANHSLQCISTAVMEDVNPSTEVTTEVEPTTGVEITHPPRPVVERRLLGHRPCVKWPGASDKKLWETVNTDLTLTLEKLRGTVEKKLESMGNIIYEYGVESFGVQEAKGRRKVPTPPVSRRQQEIKRLVQERRQLKKQWKKASEVEKEGIEALQADIKTRLASLRRAENLRKRRRKKEQTRTRFYKDPFKFLKSLFTEEKSGALKTTKKDLEEYLRTTNFDSKRHEHLAIPSDIPPIEPPEYHIETSPPTWKEVENIVRRARTASAPGPNGVPYKVYRNAPDVLRFLWRLMRTAWQKKKIPKVWRRAGGVLIPKEKDAETISQFRPISLLKVEGKIFFKVIAQRMAEFLQKNAYVDTSVQKAGISGFSGCLEHSSMIWHQIQMAKVEKRDLHVVFLDLANAFGSVPHELLWSAFRFFHIPDTITTLVRSYFQDLQFCFTTSEFTTSWQTLNVGIMAGCTISPLAFIMAMEVIIRASRWVVGGQRVNSGYRLPPLRAYMDDITTLTTTVPCTRRLLRKLEENISWARMKIKPSKSRSISIVKGKLSKLKFFIGHDQIPTVSEQPVKSLGRWYDASLKDKDQVQQLRKDISSSLQAIDNTQLPGKLKAWCLQFGLLPRVLWPLVVYEVPISTVEKMERGVTGYLKWLGVPRCLTTIGLYGDGVLKLPLTSLTEEFKCAKTRLQMTLNESRDLVVSNNAPTLATGRKWRPGKAVQEATAALKHADILGHVQHGRGGLGLTSHAVWSKATAPERRKMVVQEVRQQEEAARWAKAVSLAKQGQWTRWDSVEKRKVSWKDLWAMEARRLSFSIRATYDVLPTPVNLHQWYGEDPECALCSMPANLRHILTGCKTSLTQGRYTWRHNQVLKTLASALENKRAATNSLPPPAASHPLRMTFVREGAKPPKSSSTPLDRDQLRLARDWKMLADIGRQLVFPPEIATTTLRPDMVLWSRSLKKAFIIELTVPWEDSVDEAYERKHLRYAELAAEARRHGWNTEIRPVEVGCRGFVATSTIRLLRDLGIKGQSQRSAIRAVSEAAEVSSQWLWIKRKDPSWAPK

SEQ ID NO: 8878 - protein, 911 aa, Amblyraja radiata
MLLQEDIKSRLATLRKAENLRKLRKKKEHTRTRFYKDPFKFIKDLFAKEKSGTLKTSKRELEEHLEKAHQDTKRHEQLVIPHDIPPIQPPEFNLDTSPPRWKEVENTVRRARAASAPGPNGVPYKLYKNAPDVLRFLWKLMRVVWKKQTIPKAWRRAGGVLIPKEKDASDISQFRPICLLNVEGKIFFSIVSQRLSTYLVTNKYIDTSVQKAGIPGFSGCLEHTSMIWHQIQAAKKEKRDLHVIFLDLANAFGSVPHELLWESFAFFHVPELITTLVKSYFQDLQLCFTTADFSTTWQRLEVGIMAGCTVSPLAFTMAMEVIIRASKWVVGGERTRAGLRLPPIRAYMDDMTTLTTTAACTKRLLGKLQENIKWARMKIKPSKSRSISIVKGVLRDTRFCIGDDPIPTVSEQPVKSLGRWYNASLKDKEQVKQLRQEIVNGLENINQTLLPGKLKLWCLQFGLLPRTMWPLTIYEAPITTVVKMERTITSYAKKWLGVPRCLTNIGLYGKGVLELPLTSLTEEYKCSKVRLQMTLRDSRDKTISAVAPPLVTGRKWTPSDAVQQASSALRHKDIMGQVQQGRGGFGLTTSKPTWRKATTSERRTLVVEEVRRQEEAARNAKAVSLAKQGQWMQWEGVERRKISWKELWEMEASKISFIIRATYDVLPSPKNLHQWYGEDPTCALCPTPATLKHIMVGCKTSLTQGRYTWRHNQVLKSLASALENRRCATNSLPPRASNPPPSLRATTFVREGQKTSKHPSTRSEEGNLCRARDWRMLADIGRQLVFPPEIASTNLRPVLVFWSPSQKTAYIIELTVPWENSVEEAYERKKLRYAELAAEATQRGWNTKVYPVEVGCRGFVASSTIRLLKELGIHGQALRKTIRSLSEAAERSSRWIWLKRKDPCWAPSISG

SEQ ID NO: 8879 - protein, 1175 aa, Amblyraja radiata
MIAVPNAVSVSWRHPLNATKSKLKRIPLEPARAGAEDGSPIDNTVTDPGTETTTDMENMAHETSTTAAGHKLQVCICGWEKITSVKGLKIHQGRKKCLREQRHGPRIDQYFLRSNQSNQSSEAQRQDSNQSSQSISTHVTEEGDTSTEMPVEEPTQQRQRPPLEGKIKGHKPGVKWPKAVEKKEWETVNSDLIHILEQQAGTAVEKLERMGNTIYSYGEERFGVSKGRGGKKLPTPIKSRRQQEIERLIRERRQLKKQWKKATEAEREGLMLLQEDIKSRLATLRKAENLRKLRRKKEHTRTRFYKDPFKFIKDLFAKEKSGTLKTSKRELEEHLEKAHQDTKRHEQLVIPHDIPPIQPPEFNLDTSPPRWKEVENTVRRARAASAPGPNGVPYKLYKNAPDVLRFLWKLMRVVWKKQTIPKAWRRAGGVLIPKEKDASDISQFWPICLLNVEGKIFFSIVSQRLSTYLVTNKYIDTSVQKAGIPGFSGCLEHTSMIWHQIQAAKKEKRDLHVIFLDLANAFGSVPHELLWESFAFFHVPELITTLVKSYFQDLQLCFTTADFSTTWQRLEVGIMAGCTVSPLAFTMAMEVIIRASKWVVGGERTRAGLRLPPIRAYMDDMTTLTTTAACTKRLLGKLQENIKWARMKIKPSKSRSISIVKGVLRDTRFCIGDDPIPTVSEQPVKSLGRWYNASLKDKEQVEQLRQEIVNGLENINQTLLPGKLKLWCLQFGLLPRTMWPLTIYEAPITTVEKMERTITSYAKKWLGVPRCLTNIGLYGKGVLELPLTSLTEEYKCSKVRLQMTLRDSRDKTISAVAPPLVTGRKWTPSDAVQQASSALRHKDIVGQVQQGRGGFGLTTSKPTWRKATTSERRTLVVEEVRRQEEAARSAKAVSLAKQGQWMQWEGVERRKISWKELWEMEASKISFIIRATYDVLPSPKNLHQWYGEDPTCALCPTPATLKHIMVGCKTSLTQGRYTWRHNQVLKSLASALENRRCTTNSLPPRASNPLPLRATTFVREGQKTSKHPSTRSEEGNLCRMLADIGRQLVFPPEIASTNLRPDLVFWSPSQKTAYIIELTVPWENSVEEAYERKKLRYAELAAEATQRGWNTKVYPVEVGCRGFVASSTIRLLKELGIHGQALRKTIRSLSEAAERSSRWIWLKRKDPCWTPSISG

SEQ ID NO: 8880 - protein, 1179 aa, Amblyraja radiata
MIAVPNAVSVSWRHPLNATKSKLKRIPLEPARAGAEDGSPIDNTVTDPGTETTTDKESMAHETSTTAAGHKLQVCICGWEKITSVKGLKIHQGRKKCLREQRHGPRIDQYFLRSNQSNQSSEAQRQDSNQSSQSISTHVTEEGDTSTEMPVEEPTQQRQRPPLEGKIKGHKPGVHWPKAVEKKEWETVNSDLIHILEQQAGTAVEKLERMGNTIYSYGEERFGVSKGRGGKKLPTPIKSRRQQEIERLIRERRQLKKQWKKATEAEREGLMLLQEDIKSRLATLRKAENLRKLRRKKEHTRTRFYKDPFKFIKDLFAKEKSGTLKTSKRELEEHLEKAHQDTKRHEQLVIPHDIPPIQPPEFNLDTSPPRWKEVENTVRRARAASAPGPNGVPYKLYKNAPDVLRFLWKLMRVVWKKQTIPKAWQRAGGVLIPKEKDASDISQFRPICLLNVEGKIFFSIVSQRLSTYLVTNKYIDTSVQKAGIPGFSGCLEHTSMIWHQIQAAKKEKRDLHVIFLDLANAFGSVPHELLWESFAFFHVPELITTLVKSYFQDLQLCFTTADFSTTWQRLEVGIMAGCTVSPLAFTMAMEVIIRASKWVVGGERTRAGLRLPPIRAYMDDMTTLTTTAACTKRLLGKLQENIKWARMKIKPSKSRSISIVKGVLRDTRFCIGDDPIPTVSEQPVKSLGRWYNASLKDKEQVEQLRQEIVNGLENINQTLLPGKLKLWCLQFGLLPRTMWPLTIYEAPITTVEKMERTITSYAKKWLGVPRCLTNIGLYGKGVLELPLTSLTEEYKCSKVRLQMTLRDSRDKTISAVAPPLVTGRKWTPSDAVQQASSALRHKDIVGQVQQGRGGFGLTTSKPTWRKATTSERRTLVVEEVRRQEEAARSAKAVSLAKQGQWMQWEGVERRKISWKELWEMEASKISFIIRATYDVLPSPKNLHQWYGEDPTCALCPTPATLKHIMVGCKTSLTQGRYTWRHNQVLKSLASALENRRCATNSLPPRASNPPLRATTFVREGQKTSKHPSTRSEEGNLCRARDWRMLADIGRQLVFPPEIASTNLRPDLVFWSPSQKTAYIIELTVPWENSVEEAYERKKLRYSELAAEATQRGWNTKVYPVEVGCRGFVASSTIRLLKELGIHGQALRKTIRSLSEAAERSSRWIWLKRKDPCWAPSISG

SEQ ID NO: 8881 - protein, 1181 aa, Amblyraja radiata
MIAVPNAVSVSWRHPLNATKSKLKRIPLEPARAGAEDGSPIDNTVTDPGTETTTDKESMAHETSTTAAGHKLQVCICGWEKITSVKGLKIHQGRKKCLREQRHGPRIDQYFLRSNQSNQSSEAQRQDSNQSSQSISTHVTEEGDTSTEMPVEEPTQQRQRPPLEGKIKGHKPGVKWPKAVEKKEWETVNSDLIHILEQQAGTAVEKLERMGNTIYSYGEERFGVSKGRGGKKLPTPIKSRRQQEIERLIRERRQLKKQWKKATEAEREGLMLLQEDIKSRLATLRKAENLRKLRKKKEHTRTRFYKDPFKFIKDLFAKEKSGTLKTSKRELEEHLEKAHQDTKRHEQLVIPHDIPPIQPPEFNLDTSPPRWKEVENTVRRARAASAPVPNGVPYKLYKNAPDVLRFLWKLMRVVWKKQTIPKAWRRAGGVLIPKEKDASDISQFRPICLLNVEGKIFFSIVSQRLSTYLVTNKYIDTSVQKAGIPGFSGCLEHTSMIWHQIQAAKKEKRDLHVIFLDLANAFGSVPHELLWESFAFFHVPELITTLVKSYFQDLQLCFTTADFSTTWQRLEVGIMAGCTVSPLAFTMAMEVIIRASKWVVGGERTRAGLRLPPIRAYMDDMTTLTTTAACTKRLLGKLQENIEWARMKIKPSKSRSISIVKGVLRDTRFCIGDDPIPAVSEQPVKSLGRWYNASLKDKEQVQQLRQEIVNGLENINQTLLPGKLKLWCLQFGLLPRTMWPLTIYEAPITTVEKMERTITSYAKKWLGVPRCLTNIGLYGKGVLELPLTSLTEEYKCSKVRLQMTLRDSRDKTISAVAPPLVTGRKWTPSDAVQQASSALRHKDIVGQVQQGRGGFGLTTSKPTWRKATTSERRTLVVEEVRRQEEAARSAKAVSLAKQGQWMQWEGVERRKISWKELWEMEASKISFIIRATYDVLPSPKNLHQWYGEDPTCALCPTPATLKHIMVGCKTSLTQGRYTWRHNQVLKSLASALENRRCATNSLPPRASNPPPPLRATTFVREGQKTSKHPSTRSEEGNLCRARDWRMLADIGRQLVFPPEIASTNLRPDLVFWSPSQKTAYIIELTVPWENSAEEAYERKKLRYAELAAEATQRGWNTKVYPVEVGCRGFVASSTIRLLKELGIHGQALRKTIRSLSEAAERSSRWIWLKRKDPCWAPSISG

SEQ ID NO: 8882 - protein, 1051 aa, Amblyraja radiata
MIAVPNAVSVSWRHPLNATKSKLKRIPLEPARAGAEDGSPIDTTVTDPGTETTTDKESMAHETSTTAAGHKLQVCICGWEKITSVKGLKIHQGRKKCSREQRHGPRIDQYFLRSNQSNQSSEAQRQDSNQSSQSISTHVTEEGDTSTEMPVEEPTQQRQRPPLEGKIKGHKPGVKWPKAVEKKEWETVNSDLIHILEQQAGTAVEKLERMGNTIYSYGEERFGVSKGRGGKKLPTPIKSRRQQEIERLIRERRQLKKQWKKATEAEREGLMLLQEDIKSRLATLRKAENLRKLRRKKEHTRTRFYKDPFKFIKDLFAKEKSGTLKTSKRELEEHLEKAHQDTKRHEQLVIPHDIPPIQPPEFNLDTSPPRWKEVENTVRRARAASAPGPNGVPYKLYKNAPDVLRFLWKLMRVVWKKQTIPKAWRRAGGVLIPKEKDASDISQFRPICLLNVEGKIFFSIVSQRLSTYLVTNKYIDTSVQKAGIPGFSGCLEHTSMIWHQIQAAKKEKRDLHVIFLDLANAFGSVPHELLWESFAFFHVPELITTLVKSYFQDLQLCFTTADFSTTWQRLEVGIMAGCTVSPLAFTMAMEVIIRASKWVVGGERTRAGLRLPPIRAYMDDMTTLTTTAACTKRLLGKLQENIKWARMKIKPSKSRSISIVKGVLRDTRFCIGDDPIPTVSEQPIKSLGRWYNASLKDKEQVEQLRQEIVNGLENINQTLLPGKLKLWCLQFGLLPRTMWPLTIYEAPITTVEKMERTITSYAKKWLGVPRCLTNIGLYGKGVLELPLTSLTEEYKCSKVRLQMTLRDSRDKTISAVAPPLVTGRKWTPSDAVQQASSALRQKDIVGQVQQGRGGFGLTTSKPTWRKATTSERRTLVVEEVRRQEEATRSAKAFSLAKQGQWMQWEGNLCRARDWRMLADIGRQLVFPPEIASTNLRPDLVFWSPSQKTAYIIELTVPWENSVEEAYERKKLRYAELAAEATQRGWNTKVYPVEVGCRGFVASSTIRLLKELGIHGQALRKTIRSLSEAAERSSRWIWLKRKDPCWAPSISG

SEQ ID NO: 8883 - protein, 868 aa, Amblyraja radiata
MLLQEDIKSRLATLRKAENLRKLRKKKEHTRTRFYKDPFKFIKDLFAKEKSGTLKTSKRELEEHLEKAHQDTKRHEQLVIPHDIPPIQPPEFNLDTSPPRWKEVENTVRRARAASAPGPNGVPYKLYKNAPDVLRFLWKLMRVVWKKQTIPKAWRRAGGVLIPKEKDASDISQFRPICLLNVEGKIFFSIVSQRLSTYLVTNKYIDTSVQKAGIPGFSGCLEHTSMIWHQIQAAKKQKIDLHVIFLDLANAFGSVPHELLWESFAFFHVPELITTLVKSYFQDLQLCFTTADFSTTWQRLEVGIMAGCTVSPLAFTMAMEVIIRASKWVVGGERTRAGLRLPPIRAYMDDMTTLTTTAACTKRLLGKLQENIKWARMKIKPSKSRSISIVMGVLRDTRFCIGDDPIPTVSEQPVKSLGRWYNASLKDKEQVEQLRQEIVNGLENINQTLLPGKLKLWCLQFGLLPRTMWPLTIYEAPITTVEKMERTITSYAKKWLGVPRCLTNIGLYGKGVLELPLTSLTEEYKCSKVRLQMTLRDSRDKTISAVAPPLVTGRKWTPSDAVQQASSALRHNDIVGQVQQGRGGFGLTTSKPTWRKATTSERRTLVVEEVRRQEEAARSAKAVSLAKQGQWMQWEGVERRKISWKELWEMEASKLSFIIRATYDVLPSPKNLHQWYGEDPTCALCPNPATLKHIMVGCKTSLTQGRYTWRHNQVLKSLASALENRRCATNSLPPRASNPPPPLRATTFVREGQKTSKHPSTRSEEGNLCRARDWRMLADIGRQLVFPPEIASTNLRPDLVFWSPLKKTAYIIELTVPWENSVEEAYERKKLRYAELHHQRQRSVAGTPKSIQLKWDAEDLLRHLPSDC

SEQ ID NO: 8884 - protein, 1179 aa, Amblyraja radiata
MIAVPNAVSVSWRHPLNATKSKLKRIPLEPARAGAEDGSPIDNTVTDPGTETTTDKESMAHETSTTAAGHKLQVCICGWEKITSVKGLKIHQGRKKCLREQRHGPRIDQYFLRSNQSNQSSEAQRQDSNQSSQSISTHVTEEGDTSTEMPVEEPTQQRQRPPLEGKIKWHKPGVKWPKAVEKKEWETVNSDLIHILEQQAGTAVEKLERMGNTIYSYGEERFGVSKGRGGKKLPTPIKSRRQQEIERLIRERRQLKKQWKKATEAEREGLMLLQEDIKSRLATLRKAENLRKLRRKKEHTRTRFYKDPFKFIKDLFAKEKSGTLKTSKRELEEHLEKAHQDTKRHEQLVIPHDIPPIQPPEFNLDTSPPRWKEVENTVRRARAASAPGPNGVPYKLYKNAPDVLRFLWKLMRVVWKKQTIPKAWRRAGGVLIPKEKDASDISQFRPICLLNVEGKIFFSIVSQRLSTYLVTNKYIDTSVQKAGIPGFSGCLEHTSMIWHQIQAAKKEKRDLHVIFLDLANAFGSVPHELLWESFAFFHVPELITTLVKSYFQDLQLCFTTADFSTTWQRLEVGIMAGCTVSPLAFTMAMEVIIRASKWVVGGERTRAGLRLPPIRAYMDDMTTLTTTAACTKRLLGKLQENIKWARMKIKPSKSRSISIVKGVLRDTRFCIGDDPIPTVSEQPVKSLGRWYNASLKDKEQVEQLRQEIVNGLENINQTLLPGKLKLWYLQFGLLPRTMWPLTIYEAPITTVEKMERTITSYAKKWLGVPRCLTNIGLYGKGVLELPLTSLTEEYKCSKVRLQMTLRDSRDKTISAVAPPLVTGRKWMPSDAVQQASSALRHKDIVGQVQQGRGGFGLTTSKPTWRKATTSERRTLVVEEVRRQVEAARSAKAVSLAKQGQWMQWEGVERRKISWKELWEMEASKISFIIRATYDVLPSPKNLHQWYGEDPTCALCPTPATLKHIMVGCKTSLTQGRYTWRHNQVLKSLASALENRRCATNSLPPRASNPPLRATTFVREGQKTSKHPSTRSEEGNLCTAHDWRMLADIGRQLVFPPEIASTNLRPDLVFWSPSQKTAYIIELTVPWENSVEEAYERKKLCYAELAAEATQRGWNTKVYPVEVGCRGFVASSTIRLLKELGNHGQALRKTIRSLSEAAERSSRWIWLKRKDPCWAPSISG

SEQ ID NO: 8885 - protein, 1170 aa, Oncorhynchus mykiss
MLAVSDAISVCWRHPLSATESQQRNIPLEPARAGAQDGSTTDHMVTDPGTETTTSRNTAHETTITAAGHTLQACSCGWERVTSARGLRIHQGRKRCLGEQRQGPRIDQYFLRSSQSNQSNEAQRRDANQSSQSISTPVTEEDNTSTEMPVDELTQPQRPLKQEKIKGHRPSVKWPKAVEKREWETINNDLTKILEQQVGTAEKKLERMGDIIYHYGEERFGVNERRSGKTPPAPAKSRRQQEIEILVRERRQLRKQWKKVSDAEREGLMLLQADIKCRLATLRRAENLRKLRRKKEHSRTQFYKNPFKFVKDLFAKEKCGILKTPKPELEEHLEKVHQDMKRHEQIIIPHDIPPIQPPEFNLDTDPPKWREVENVVRRARAASAPGPNGVPYKLYKNAPDVLRFLWRLMRIVWQKEIIPKAWRRAGGVLIPKEKDATDISQFRPISLLNVEGKIFFSIIAQRLSTYLERNKYIDTSVQKAGIPGFSGCLEHTSMIWHQIQTAKKDKRDLYVIFLDLANAFGSVPHELLWESFNFFHVPEPITTLVKAYFQDLQLCFTTPDFTTTWQRLEVGIMAGCTISPLAFTMAMEVIIRASRWVVGGERTKEGLRLPPIRAYMDDMTTLTTTAACTRRLLAKLQDNIKWARMKIKPSISIVKGQLKDVRFCIGDDPIPTVSEQPIKSLGRWYNESLRDKDQVQQVRQDIADGLENINKTLLPGRLKLWCLQFGLLPRVMWPLTVYEVPITTVEKMERTITSYVKKWLGVPRCLSNIGLYGKGVLELPLTSLTEEYKCSKVRLQMTLKDSKDQTISKAAPPLQTGRKWTSSKAVQQATSALRHQDIVGNIQHGRGGFGLAASKPTFHKATTSERRKLVVEEVRRQEETARSAKAVSLAKQGQWTRWEGLERRKINWSELWQMEASNISFIIRAVYDVLPSPKNLHQWYGEDSTCPLCPAPATLRHIMTGCKTSLSQGRYTWRHNQVLKSLAAALETKRSATNSLPPKTSNPVKTTTFIREGQKRPKYPPTKPETGHLAMARDWKMLVDIGQQLIFPPEIASTNLRPDMVLWSPSRKAVYIIELTVPWENSVEEAYERKKLRYTELAADATQRGWNAKVWPVEVGCRGFVASSTIRLLKELGIHGQALRQTVRAVSQAAERGSQWIWIKRKDPCWAITS

SEQ ID NO: 8886 - protein, 903 aa, Oncorhynchus gorbuscha
MLLQADIKCRLATLRRAENLRKLRRKKEHSRTRFYKNPFKFVKDLFAKEKCGILKTTKPELEEHLEKVHQDMKRHEQIIIPHDIPPIQPPEFNLDTDPPKWREVENVVRRARAASAPGPNGVPYKLYKNAPDVLRFLWRLMRIVWQKEIIPKAWRRAGGVLIPKEKDATDISQFRPISLLNVEGKIFFSIIAQRLSTYLERNKYIDTSVQKAGIPGFSGCLEHTSMIWHQIQTAKKDKRDLYVIFLDLANAFGSVPHELLWESFNIFHVPEPITTLVKAYFQDLQLCFTTPDFTTTWQRLEVGIMAGCTISPLAFTMAMEVIIRASRWVVGGERTKEGLRLPPIRAYMDDMTTLTTTAACTRRLLAKLQDNIKWARMKIKPSKSRSISIVKGQLKDVRFCIGDDPIPTVSEQPIKSLGRWYNESLRDKDQVQQVRQDIADGLENINKTLLPGRLKLWCLQFGLLPRIMWPLTVYEVPITTVEKMERTITSYVKKWLGVPRCLSNIGLYGKGVLELPLTSLTEEYKCSKVRLQMTLKDSKDQTISKAAPPLQTGRKWTSSNAVQQATSALRHQDIVGNIQHGRGGFGLAASKPTFHKATTSERRKLVVEEVRRQEETARSAKAVSLAKQGQWTRWEGLERRKINWSELWQMEASNISFIIRAVYDVLPSPKNLHQWYGEDSTCPAPATLRHIMTGCKTSLSQGRYTWRHNQVLKSLAAALETKRSATNSLPPKTSNPVKTTTFIREGQKRPKYPPTKPETGHLAMARDWKMLVDIGQQLIFPPEIASTNLRPDMVLWSPSRKAVYIIELTVPWENSVEEAYERKKLRYTELAADATQRGWNAKVWPVEVGCRGFVASSIIRLLKELGIHGQALRQTVRAVSQAAERGSQWIWIKRKDPCWAITS

SEQ ID NO: 8887 - protein, 925 aa, Salvelinus namaycush
MLLQADIKCRLATLRRAENLRKLRRKKEHSRTRFYKKTFKFVKDLFAKEKCGILKTPKPELEEHLEKVHQDTKRHEQIIIPHDIPPIQPPEFNLDTDPPKWKEVENVVRRARAASAPGPNGVPYKLYKNAPDVLRFLWRLMRIVWQKEIIPKAWRRAGGVLIPKEKDATDISQFRPISLLNVEGKIFFSIIAQRLSTYLERNKYIDTSVQKAGIPGFSGCLEHTSMIWHQIQTAKKDKRDLYVIFLDLANAFGSVPHELLWESFNFFHVPEPITTLVKAYFQDLQLCFTTPDFTTTWQRLEVGIMAGCTISPLAFTMAMEVIIRASRWVVGGERTKEGLRLPPIRAYMDDMTTLTTTAACTRRLLAKLQDNIKWAWMKITPSKSRSISIVKGQLKDVRFCIGDDPISTVSEQPVKSLGRWYNESLRDKDQVQQVRQDIADGLENINKTLLPGKLKLWCLQFGLLPRVMWPLTVYEVPITTVEKMERTITSYVKKWLGVPRCLSNIGLYGKGVLELPLTSLTEEYKCSKVRLQMTLKDSKDQTISKAAPPLQTGWKWTSSKAVQQATSALRHQDIVGNIQHGRGGFGLAASKPTFHKATTSERRKLVVEEVRRQEETARSAKAVSLAKQGQWTRWEGLERRKINWSELWQMEGSNISFIIRAVYDVLPSPKNLHQWYGEDPTCPLCPAPATLRHIMTGCKTSLSQGRYTWRHNQVLKSLAAALETKRSATNSLPPKTSNPVKTTTLIREGQKRPKHPPTKPETGHLGMARDWKMLVDIGQQLIFPPEIASTNLRPDMVLWSPSRKAVYIIELTVPWENSVEEAYERKKLRYTELAADATQHGWNAKVWPVEVGCRGFVASSTIRLLKELGIHGQALRQTVRAVSQAAERQPVDLDQTEGPLLGYNFMTPHPHLRTQFRSLQLEEGI

SEQ ID NO: 8888 - protein, 912 aa, Oncorhynchus gorbuscha
MQREGLMLLQADIKCRLATLRRAENLRKLRRKKEHSRTRFYKNPFKFVKDLFAKEKCGILKTTKPELEEHLKKVHQDMKRHEQIIIPHDIPPIQPPEFNLDTDPPKWREVENVVRRARAASAPGPNGVPYKLYKNAPDVLRFLWRLMRIVWQKEIIPKAWRRAGGVLIPKEKDATDISQFRPISLLNVEGKIFFSIIAQRLSTYLERNKYIDTSVQKAGIPGFSGCLEHTSMIWHQIQTAKKDKRDLYVIFLDLANAFGSVPHELLWESFNIFHVPEPITTLVKAYFQDLQLCFTTPDFTTTWQRLEVGIMAGCTISPLAFTMAMEVIIRASRWVVGGERTKEGLRLPPIRAYMDDMTTLTTTAACTRRLLAKLQDNIKWARMKIKPSKSRSISIVKGQLKDVRFCIGDDPIPTVSEQPIKSLGRWYNESLRDKDQVQQVRQDIADGLENINKTLLPGRLKLWCLQFGLLPRIMWPLTVYEVPITTVEKMERTITSYVKKWLGVPRCLSNIGLYGKGVLELPLTSLTEEYKCSKVRLQMTLKDSKDQTISKAAPPLQTGRKWTSSNAVQQATSALRHQDIVGNIQHGRGGFGLAASKPTFHKATTSERRKLVVEEVRRQEETARSAKAVSLAKQGQWTRWEGLERRKINWSELWQMEASNISFIIRAVYDVLPSPKNLHQWYGEDSTCPLCPAPATLRHIMTGCKTSLSQGRYTWRHNQVLKSLAAALETKRSATNSLPPKTSNPVKTTTFIREGQKRPKYPPTKPETGHLAMARDWKMLVDIGQQLIFPPEIASTNLRPDMVLWSPSRKAVYIIELTVPWENSVEEAYERKKLRYTELAADATQRGWNAKVWPVEVGCRGFVASSIIRLLKELGIHGQALRQTVRAVSQAAERGSQWIWIKRKDPCWAITS

SEQ ID NO: 8889 - protein, 1174 aa, Oncorhynchus tshawytscha
MLAVSDAVSVCWRHPLSATENQQRNIPLEPARAGAQDGSTTDHTVTDPGTETTTSRNTAHETTITAAGHTLQVCSCGWERVTLARGFRIHQGRKRCLGEQRQGPRIDQYFLRSSQSNQSNEAQRRDANQSSQSISTPVTEEDNTSTEMLVGELTQPQRPLKEEKIKGHRPSVKWPKAVEKREWETINNDLTKILEQQVGTAEKKLERMGDIIYHYGEERFGVNKRRSGKTPPAPAKSRRQQEIEILVRERRQLRKQWKKASDAEREGLMLLQADIKCRLATLRRAENLRKLRRKKEHSRTRFYKNPFKFVKDLFAKEKCRFLKTPKPELEEHLEKVHQDMKRHEQIIIPHDIPPIQSPEFNLDTDPPKWREVENVVRRARAASAPGPNGIPYKLYKNALDVLRFLWRLMRIVWQKEIIPKAWRRAGGVLIPKEKDATDISQFRAISLLNIEGKIIFSIIAQRLSTYLERNKYIDTSVQKSGILGFSGCLEHTSMIWHQIQTAKKDKRDLYVIFLDLANAFGSVPHELLWVSFNIFHVPEPITTLVKAYFQDLQLCFTTPDFTTTWQCLEVGIMAGCTISPLAFTMAMEVIIRASRWVVGGERTKEGLRLPPIRAYMDDMTTLTTTAACTRQLLAKLQDNIKWARMKIKPSKSRSISIVKGQLKDVRFCIGDDPIPTVSKQPIKSLGRWYNESLRDKDQVQQVRQDIADGLENINKTLLPGRLKLWCLQFGLLPRAMWPLTVYEVPITTVEKMERTITSYVKKWLGVPRCLSNIGLYGKGVLELPLTSLTEEYKCSKVRLQMTLKDSKDQTISKAAPPLQTGQKWTSSKAVQQATSALRHQDIVGNIQHGRGGFGLAASKPTFHKATTSERRKLVVEEVRRQEETARSAKAVSLAKQGQWTRWEGLERRKINWSELWQMEASNISFIIRAVYDVLPSPKNLHQWYGEDSTCPLCPAPATLRHIMTGCKTSLSQGRYTWRHNQVLKSLAAALETKRSATNSLPPKTSNPVKTTTFIREGQKRPKYPPTKPETGHLAMARDWKMLVDIGQQLIFPSEIASTNLRPDMVLWSPSQKAVYIIELTVTWENSVEEAYERKKLCYTELAADAAQRGWNAKVWPVEVGCRGFVASSTIRLLKELGIHGQALRQTVRAVSQAAERGSQWIWIKQKDPCWAITS

SEQ ID NO: 8890 - protein, 1174 aa, Oncorhynchus mykiss
MLAVSDAISVCWRHPLSATESQQRNIPLEPARAGAQDGSTTDHMVTDPGTETTTSRNTAHETTITAAGHTLQACSCGWERVTSARGLRIHQGRKRCLGEQRQGPRIDQYFLRSSQSNQSNEAQRRDANQSSQSISTPVTEEDNTSTEMPVDELTQPQRPLKQEKIKGHRPSVKWPKAVEKREWETINNDLTKILEQQVGTAEKKLERMGDIIYHYGEERFGVNERRSGKTPPAPAKSRRQQEIEILVRERRQLRKQWKKASDAEREGLMLLQADIKCRLATLRRAENLRKLRRKKEHSRTQFYKNPFKFVKDLFAKEKCGILKTPKPELEEHLEKVHQDMKRHEQIIIPHDIPPIQPPEFNLDTDPPKWREVENVVRRARAASAPGPNGVPYKLYKNAPDVLRFLWRLMRIVWQKEIIPKAWRRAGGVLIPKEKDATDISQFRPISLLNVEGKIFFSIIAQRLSTYLERNKYIDTSVQKAGIPGFSGCLEHTSMIWHQIQTAKKDKRDLYVIFLDLANAFGSVPHELLWESFNFFHVPEPITTLVKAYFQDLQLCFTTPDFTTTWQRLEVGIMAGCTISPLAFTMAMEVIIRASRWVVGGERTKEGLRLPPIRAYMDDMTTLTTTAACTRRLLAKLQDNIKWARMKIKPSKSRSISIVKGQLKDVRFCIGDDPIPTVSEQPIKSLGRWYNESLRDKDQVQQVRQDIADGLENINKTLLPGRLKLWCLQFGLLPRVMWPLTVYEVPITTVEKMERTITSYVKKWLGVPRCLSNIGLYGKGVLELPLTSLTEEYKCSKVRLQMTLKDSKDQTISKAAPPLQTGRKWTSSKAVQQATSALRHQDIVGNIQHGRGGFGLAASKPTFHKATTSERRKLVVEEVRRQEETARSAKAVSLAKQGQWTRWEGLERRKINWSELWQMEASNISFIIRAVYDVLPSPKNLHQWYGEDSTCPLCPAPATLRHIMTGCKTSLSQGRYTWRHNQVLKSLAAALETKRSATNSLPPKTSNPVKTTTFIREGQKRPKYPPTKPETGHLAMARDWKMLVDIGQQLIFPPEIASTNLRPDMVLWSPSRKAVYIIELTVPWENSVEEAYERKKLRYTELAADATQRGWNAKVWPVEVGCRGFVASSTIRLLKELGIHGQALRQTVRAVSQAAERGSQWIWIKRKDPCWAITS

SEQ ID NO: 8891 - protein, 969 aa, Oncorhynchus tshawytscha
MPVGELTQLQRPLKEEKIKGHRPSVKWPKAVEKREWETINNDLTKILEQQVGTAEKKLERMGDIIYHYGEERFGVNERRSGKTPPAPAKSRRQQEIEILVSERRQLRKQWKKASDAEREGLMLLQADIKCRLATLRRAENLRKLRRKKEHSRTRFYKNPFKFVKDLFAKEKCGILKTPKPELEEHLEKVHQDMKRHEQIIIPHDIPPIQSPEFNLDTDPPKWREVENVVRRARAASAPGPNGVPYKLYKNAPDVLRFLWRLMRIVWQKEIIPKAWRRAGGVLIPKEKDATDISQFRPISLLNVEGKIFFSIIAQRLSTYLERNKYIDTSVQKAGIPGFSGCLEHTSMIWHQIQTAKKDKRDLYVIFLDLANAFGSVPHELLWESFNIFHVPEPITTLVKAYFQDLQLCFTTPDFTTTWQRLEVGIMAGCTISPLAFTMAMEVIIRASRWVVGGERTKEGLRLPPIRAYMDDMTTLTTTTACTRRLLAKLQDNIKWARMKIKPSKSRSISIVKGQLKDVRFCIGDDPIPTVSEQPIKSLGRWYNESLRDKDQVQQVRQDIADGLENINKTPLPGRLKLWCLQFGLLPRVMWPLTVYEVPITTVEKMERTITSYVKKWLGVPRCLSNIGLYGKGVLELPLTSLTEEYKWSKVRLQMTLKDSKDQTISKAAPPLQTGQKWTSSKAVQQATSALRHQDIVGNIQHGRRGFGLAASKPTFHKATTSERRKLVVEEVCRQEETARSAKAVSLAKQGQWTRWEGLERRKINWRELWQMESSNISFIIRAVYDVLPSPKNLHQWYGEDCTCPLCPTPATLRHIMTGCKTSLSQGRYTWRHNQVLKSLAAALETKRSATISLPPKTSNPVKTTTFIREGQKTPKYPPTKPETGHLAMARDWKMLVDISQQLIFPSEIASTNLRPDMVLWSPSRKAVYIIELTVPWENSVEEAYERKKLRYTELAADATQHLNWAWDTS

SEQ ID NO: 8892 - protein, 906 aa, Oncorhynchus tshawytscha
MLLQADIKCRLATLRRAENLRKLRRKKEHSRTRYYKKNVKFVKDLFAKEKCGILKTPKPELEEHQEKVHQDMKRHEQIIIPHDIPPIQPTEFNLDTDPAKWKEVENVVRRARAASAPGPNGVPYKLYKNAPDVLRFLWRLMRIVWQKEIIPKAWRRAVGVLIPKEKDATDISQFRPISLLNVEGKIFFSIIAQRLSTYLERNKYIDTSVQKAGIPGFSGCLEHTSMIWHQIQTAKKDKRDLYVIFLDLANAFGSVPHELLWESFNIFHVPEPITTLVKAYFQDLQLCFTTPDFTTTWQRLEVGIMAGCTISPLAFTMAMEVIIKASRWVVGGERTKEGLRFPPIRAYMDDMTTLTTTVACTRRLLAKLQDNMNWARMKIKPSKSRSISIVKGQLKDVRFCIGDDLIPTVSEKPIKSLGRWYNESLRDKDQVQQVRQDIADGLENINKTLLPGRLKLWCLQFGLLPRVMWPLTVYEVPITTVEKMERTITSYVKKWLGVPRCLSNIGLYDKGVLELPLTSLTEEYKCSKVRLQMTLKDSKDQTISNAAPPLQTGRKWTSSKAVQKATSALRHQDIVGNIQHGRGGFGLAASKPTFHKATTSERRKLVVEEVRRQEETARSAKAVSLAKQGQWTRWEGLERRKINWSELWQMEASNISFIIRAVYDVLPSPKNLHQWYGEDSTCPLCPASATLRHIMTGCKTSLSQGRYTWRHNQVLKSLAAALETKRSATNSLAPKTSNPVKTTTCIQEGQKRPKYPPTKPETGHLAMARDWKMLVDIGQQLIFPSEIASTNLRPDMVLWSPSRKAVYIIELTVPWENSVEEAYERKKLRYTELAADATQRGWNAKVWPVEVGCRGFVASSTIRLLKELGIHGQVLRQTVRAVSEAAERGSQWIWIKRKDPCWAITS

SEQ ID NO: 8893 - protein, 1107 aa, Oncorhynchus mykiss
MFIFEPFHCRFCFMFWIIVLLEDKSPSQSQVFCRLHQVFFQYFLRSSQSNQSNEAQRRDANQSSQSISTPVTEEDNTSTEMPVDELTQPQRPLKQEKIKGHRPSVKWPKAVEKREWETINNDLTKILEQQVGTAEKKLERMGDIIYHYGEERFGVNERRSGKTPPAPAKSRRQQEIEILVRERRQLRKQWKKASDAEREGLMLLQADIKCRLATLRRAENLRKLRRKKEHSRTQFYKNPFKFVKDLFAKEKCGILKTPKPELEEHLEKVHQDMKRHEQIIIPHDIPPIQPPEFNLDTDPPKWREVENVVRRARAASAPGPNGVPYKLYKNAPDVLRFLWRLMRIVWQKEIIPKAWRRAGGVLIPKEKDATDISQFRPISLLNVEGKIFFSIIAQRLSTYLERNKYIDTSVQKAGIPGFSGCLEHTSMIWHQIQTAKKDKRDLYVIFLDLANAFGSVPHELLWESFNFFHVPEPITTLVKAYFQDLQLCFTTPDFTTTWQRLEVGIMAGCTISPLAFTMAMEVIIRASRWVVGGERTKEGLRLPPIRAYMDDMTTLTTTAACTRRLLAKLQDNIKWARMKIKPSKSRSISIVKGQLKDVRFCIGDDPIPTVSEQPIKSLGRWYNESLRDKDQVQQVRQDIADGLENINKTLLPGRLKLWCLQFGLLPRVMWPLTVYEVPITTVEKMERTITSYVKKWLGVPRCLSNIGLYGKGVLELPLTSLTEEYKCSKVRLQMTLKDSKDQTISKAAPPLQTGRKWTSSKAVQQATSALRHQDIVGNIQHGRGGFGLAASKPTFHKATTSERRKLVVKEVRRQEETARSAKAVSLAKQGQWTRWEGLERRKINWSELWQMEASNISFIIRAVYDVLPSPKNLHQWYGEDSTCPLCPAPATLRHIMTGCKTSLSQGRYTWRHNQVLKSLAAALETKRSATNSLPPKTSNPVKTTTFIREGQKRPKYPPTKPETGHLAMARDWKMLVDIGQQLIFPPEIASTKLRPDMVLWSPSRKAVYIIELTVPWENSVEEAYERKKLRYTELAADATQRGWNAKVWPVEVGCRGFVASSTIRLLKELGIHGQALRQTVRAVSQAAERGSQWIWIKRKDPCWAITS

SEQ ID NO: 8894 - protein, 967 aa, Oncorhynchus tshawytscha
MGDIIYHYGEERFGVNERRSGKTPPAPAKSRRQQEIEILVRERRQLRKQWKKASDAEREGLMLLQADIKCRPATLRRAENLRKLRRKKEHSRTRFYKKPYKFVKDLFAKEKCGILKTPKPELEEHLEKVHQDMKRHEQIIIPHDIPPIQPTEFNLDTDPPKWREVENVVRRARAASAPGPNGVPYKLYKNALDVLHFLWRLMRIVWQKEIIPKAWRRAGGVLIPKEKDATDISQFGAISLLNVEGKIFFSIIAQRLSTYLERNKYIDTSVQKAGIPGFSGCLEHTSMIWHQIQTAKKDKRDLYVIFLDLANAFGSVPHELLWESFNIFHVPEPITTLVKAYFQDLQLCFTTPDFTTTWQRLEVGIMAGCTISPLACTMAMEVIIRASRWVVGGERTKEGLRLPPIRAYMDDMTTLTTTAACTRRLLAKLQDNIKWARMKIKPSKSRSISIVKGQLKDVRFCIGDDPIPTVSEQPIKSLGRWYNESLRDKDQVQQVRQDIADGLENINKTLLPGRLKLWCLQFGLLPRVMWPLTVYEVTITTVEKMERTITSYVKKWLGVPRCLSNIGLYGKGVLELPLTSLTEEYKCSKVRLQMSLKDSKDQTISKAAPLLQTGRKWTSSKAVQQATSALRHQDIVGNIQHGRGGFGLAASKPTFHKATTSERRKLVVEEVRREEETARSAKAVSLAKQGQWTRWEGLERRKINWSELWQMEASNISFIIRAVYDVLPSPKNLHQWYGEDSTCPLCPAPATLRHIMTGCKTSLSQGRYTWRHNQVLKSLATALETKRSATNSLPPKTSNPVKTTTFIREGQKRPKYPPTKPETGHLAMARDWKMLVDIGQQLIFPSEIASTNLRPDMVLWSPSRKAVYIIELTVPWENSVEEAYERKKLRYTELAADVTQRGWNAKVWPVEVGCRGFEASSTIGLLKELGIHGQALRQTVRAVSQTAERGSQWIWIKRKDPCWAITS

SEQ ID NO: 8895 - protein, 1027 aa, Oncorhynchus mykiss
MPVDELTQPQRPLKQEEIKGHRPSVKWPKAVEKREWETINNDLTKILEQQVGTAEKKLERMGDIIYHYGEERFGVNERRSGKTPPAPAKSRRQQEIEILVRERRQLRKQWKKASDAEREGLMLLQADIKCRLATLRRAENLRKLRRKKEHSRTQFYKNPFKFVKDLFAKEKCGILKTPKPELEEHLEKVHQDMKRHEQIIIPHDIPPIQPPEFNLDTDPPKWREVENVVQRARAASAPGPNGVPYKLYKNAPDVLRFLWRLMRIVWQKEIIPKAWRRAGGVLIPKEKDATDISQFRPISLLNVEGKIFFSIIAQRLSTYLERNKYIDTSVQKAGIPGFSGCLEHTSMIWHQIQTAKKDKRDLYVIFLDLANAFGSVPHELLWESFNFFHVPEPITTLVKAYFQDLQLCFTTPDFTTTWQRLEVGIMAGCTISPLAFTMAMEVIIRASRWVVGGERTKEGLRLPPIRAYMDDMTTLTTTAACTRRLLAKLQDNIKWARMKIKPSKSRSISIVKGQLKDVRFCIGDDQIPTVSEQPIKSLGRWYNESLRDKDQVQQVRQDIADGLENINKTLLPGRLKLWCLQFGLLPRVMWPLTVYEVPITTVEKMERTITSYVKKWLGVPRCLSNIGLYGKGVLELPLTSLTEEYKCSKVRLQMTLKDSKDQTISKAAPPLQTGRKWTSSKAVQQATSALRHQDIVGNIQHGRGGFGLAASKPTFHKATTSERRKLVVKEVRRQEETARSAKAVSLAKQGQWTRWEGLERRKINWSELWQMEASNISFIIRAVYDVLPSPKNLHQWYGEDSTCPLCPAPATLRHIMTGCKTSLSQGRYTWRHNQVLKSLAAALETKRSATNSLPPKTSNPVKTTTFIREGQKRPKYPPTKPETGHLAMARDWKMLVDIGQQLIFPPEIASTKLRPDMVLWSPSRKAVYIIELTVPWENSVEEAYERKKLRYTELAADATQRGWNAKVWPVEVGCRGFVASSTIRLLKELGIHGQALRQTVRAVSQAAERGSQWIWIKRKDPCWAITS

SEQ ID NO: 8896 - protein, 1174 aa, Oncorhynchus mykiss
MLAVSDAVSVCWRHPLSATESQQRNIPLEPARAGAQDGSMTDHMVTDPGTETTTSRNTAHETTITAAGLTLQACSCGWERVTSARGLRIHQGRKRCLGEQRQGPRIDQYFLRSSQSNQSNEAQRRDANQSSQSISTPVTEEDNTSTEMPVDELTQPQRPLKQEKIKGHRPSVKWPKAVEKREWETINNDLTKILEQQVGTAEKKLERMGDIIYHYGEERFGVNERRSGKTPPAPAKSRRQQEIEILVRERRQLRKQWKKAFDAEREGLMLLQADIKCRLATLRRAENLRKLRRKKEHSRTQFYKNPFKFVKDLFAKEKCGILKTPKPELEEHLEKVHQDMKRHEQIIIPHDIPPIQPPEFNLDTDPPKWREVENVVRRARAASAPGPNGVPYKLYKNAPDVLRFLWRLMRIVWQKEIIPKAWRRAGGVLIPKEKDATDISQFRPISLLNVEGKIFFSIIAQRLSTYLERNKYIDTSVQKAGIPGFSGCLEHTSMIWHQIQTAKKDKRDLYVIFLDLANAFGSVPHELLWESFNFFHVPEPITTLVKAYFQDLQLCFTTPDFTTTWQRLEVGIMAGCTISPLAFTMAMEVIIRASRWVVGGERTKEGLRLPPIRAYMDDMTTLTTTAACTRRLLAKLQDNIKWARMKIKPSKSRSISIVKGQLKDVRFCIGDDPIPTVSEQPIKSLGRWYNESLRDKDQVQQVRQDIADGLENINKTLLPGRLKLWCLQFGLLPRVMWPLTVYEVPITTVEKMERTITSYVKKWLGVPRCLSNIGLYGKGVLELPLTSLTEEYKCSKVRLQMTLKDSKDQTISKAAPPLQTGRKWTSSKAVQQATSALRHQDIVGNIQHGRGGFGLAASKPTFHKATTSERRKLVVKEVRRQEETARSAKAVSLAKQGQWTRWEGLERRKINWSELWQMEASNISFIIRAVYDVLPSPKNLHQWYGEDSTCPLCPAPATLRHIMTGCKTSLSQGRYTWRHNQVLKSLAAALETKRSATNSLPPKTSNPVKTTTFIREGQKRPKYPPTKPETGHLAMARDWKMLVDIGQQLIFPPEIASTKLRPDMVLWSPSRKAVYIIELTVPWENSVEEAYERKKLRYTELAADATQRGWNAKVWPVEVGCRGFVASSTIRLLKELGIHGQALRQTVRAVSQAAERGSQWIWIKRKDPCWAITS

SEQ ID NO: 8897 - protein, 766 aa, Oncorhynchus gorbuscha
MRIVWQKEIIPNSCRRAGGVLIPKEKDVTDISQFRPISLLNVEGKIFFSIIAQRLSTYLERNKYIDTSVQKAGIPGLSGCLEHTSMIWHQIQTAKKDKRDLYVIFLDLANAFGSVPHELLWESFNIFHVPEPITTLVKAYFQDLQLCFTTPDFTTTWQRLEVGIMAGCTISPLAFTMAMEVIIRASRWVVGGERTKEGLRLPPIRAYMDDMTTLTTTAACTRRLLAKLQDNIKWARMKIKPSKSRSISIVKGQLKDVRFCIGDDAIPTVSEQPIKSLGRWYNESLRDKDQVQQVRQDIADGLENINKTLLPGRLKLWCLQFGLLPRVMWPLTVYEVPITTVEKMERTITSYVKKWLGVPRCLSNIGLYGKGVLELPLTSLTEEYKCSKVRLQMTLKDSKDQTISKAAPPLQTGRKWTSSKAVQQATSALRHQDIVGNIQHGRGGFGLAASKPTFHKATTSERRKLVVEEVRRQEETARSAKAVSLAKQGQWTRWEGLERRKINWSELWQIEASNISFIIRAVYDVLPSPKNLHQWYGEDSTCPLCPAPATLRHIMTGCKTSLSQGRYTWRHSQVLKSLAAALETKRSATNSLPPKTSNPVKTTTFIREGQKRPKYPPTKPETGHLAMARDWKMLVDIGQQLIFPPEIASTNLRPDMVLWSPSRKAVYIIELTVPWENSVEEAYERKKLRYTELTADATQRGWNAKVWPVEVGCRGFVASSIIRLLKELGIHGQALRQTVRAVSQAAERGSQWIWIKRKDPCWAITS

SEQ ID NO: 8898 - protein, 1174 aa, Oncorhynchus nerka
MLAVSDAVSVCWRHPLSATESQQRNIPLEPARAGAQDGSTTDHTVTDPGMETTTSRNTAHETTITAAGHTLQVCSCGWERVTSARGLRIHQGRKRCLGEQRQGPRIDQYFLRSSQSNQSNEAQRRDANQSSQSISTPVTEEDNTSTEMPVDELTQPQRPLKEEKIKGHRPSVKWPKAVEKREWETINNDLTKILEQQVGTAEKKLERMGDIIYHYGEERFGVNERRSGKTPPLPAKSRRQQEIEILVRERRQLRKQWKKASDAEREGLMLLQADIKCRLATLRRAENLRKLRRKKVHSRTRFYKNPFKFVKDLFAKEKCGILKTPKPELEEHLEKVHQDMKRHEQIVIPHDIPPIQPPEFNLDTDPPKWREVENVVRRARAASAPGPNGVPYKLYKNAPDVLRFLWRLMRIVWQKEIIPKAWRRAGGVLIPKEKDATDISQFRPISLLNVEGKIFFSIIAQRLSTYLERNKYIDTSVQKAGIPGFSGCLEHTSMIWHQIQTAKKDKRDLYVIFLDLANAFGSVPHELLWESFNIFHVPEPITTLVKAYFQDLQLCFTTPDFTTTWQRLEVGIMAGCTISPLAFTMAMEVIIRASRWVVGGERTKEGLRLPPIRAYMDDMTILTTTAACTRRLLAKLQDNIKWARMKIKPSKSRSISIVKGQLKDVRFCIGDDPIPTVSEQPIKSLGRWYNESLRDKDQVQQVRQDIADGLENINKTLLPGRLKLWCLQFGLLPRVMWPLTVYEVPITTVEKMEQTITSYVKKWLGVPRCLSNIGLYGKGVLELPLTSLTEEYKCSKVRLQMTLKDSKDQTINKAAPLLQTGRKWTSSKAVQQATSALRHQDIVGNIQHGRGGFGLAASKPTFHKATTSERRKLVVEEVRRQEETARSAKAVSLAKQGQWTRWEGLERRKINWSELWQMEASNISFIIRAVYDVLPSPKNLHQWYGEDSTCPLCPAPATLRHIMTGCKTSLSQGRYTWRHNQVLKSLAAALETKRSATNSLPPKTSNPVKTTTFIREGQKRPKYPPTKPETGHLAMARDWKMLVDIGQQLIFPPEIASTNLRPDMVLWSPSRKAVYIIELTVPWENSVEEAYERKKLRYTELAADTTQRGWNAKVWPVEVGCRGFVASSIIRLLKELGIHGQALRQTVRAVSQAAERGSQWIWIKRKDPCWAITS

SEQ ID NO: 8899 - protein, 1174 aa, Oncorhynchus mykiss
MLAVSDAVSVCWRHPLSATESQQRNIPLEPARAGAQDGSMTDHMVTDPGTETTTSRNTAHETTITAAGLTLQACSCGWERVTSARGLRIHQGRKRCLGEQRQGPRIDQYFLRSSQSNQSNEAQRRDANQSSQSISTPVTEEDNTSTEMPVDELTQPQRPLKQEKIKGHRPSVKWPKAVEKREWETINNDLTKILEQQVGTAEKKLERMGDIIYHYGEERFGVNERRSGKTPPAPAKSRRQQEIEILVRERRQLRKQWKKASDAEREGLMLLQADIKCRLATLRRAENLRKLRRKKEHSRTQFYKNPFKFVKDLFAKEKCGILKTPKPELEEHLEKVHQDMKRHEQIIIPHDIPPIQPPEFNLDTDPPKWREVENVVRRARAASAPGPNGVPYKLYKNAPDVLRFLWRLMRIVWQKEIIPKAWRRAGGVLIPKEKDATDISQFRPISLLNVEGKIFFSIIAQRLSTYLERNKYIDTSVQKAGIPGFSGCLEHTSMIWHQIQTAKKDKRDLYVIFLDLANAFGSVPHELLWESFNFFHVPEPITTLVKAYFQDLQLCFTTPDFTTTWQRLEVGIMAGCTISPLAFTMAMEVIIRASRWVVGGERTKEGLRLPPIRAYMDDMTTLTTTAACTRRLLAKLQDNIKWARMKIKPSKSRSISIVKGQLKDVRFCIGDDPIPTVSEQPIKSLGRWYNESLRDKDQVQQVRQDIADGLENINKTLLPGRLKLWCLQFGLLPRVMWPLTVYEVPITTVEKMERTITSYVKKWLGVPRCLSNIGLYGKGVLELPLTSLTEEYKCSKVRLQMTLKDSKDQTISKAAPPLQTGRKWTSSKAVQQATSALRHQDIVGNIQHGRGGFGLAASKPTFHKATTSERRKLVVKEVRRQEETARSAKAVSLAKQGQWTWWEGLERRKINWSELWQMEASNISFIIRAVYDVLPSPKNLHQWYGEDSTCPLCPAPATLRHIMTGCKTSLSQGRYTWRHNQVLKSLAAALETKRSATNSLPPKTSNPVKTTTFIREGQKRPKYPPTKPETGHLAMARDWKMLVDIGQQLIFPPEIASTKLRPDMVLWSPSRKAVYIIELTVPWENSVEEAYERKKLRYTELAADATQRGWNAKVWPVEVGCRGFVASSTIRLLKELGIHGQALRQTVRAVSQAAERGSQWIWIKRKDPCWAITS

SEQ ID NO: 8900 - protein, 951 aa, Oncorhynchus nerka
MWRSSVHLFCVSQRHGGWNQTSQIWTRQTKGQISTGLMSNASDAEREGLMLLQADIKCRLATLRRAENLRKLRRKKVHSRTRFYKNPFKFVKDLFAKEKCGILKTPKPELEEHLEKVHQDMKRHEQIVIPPIQPPEFNLDTDHPKWREVENVVRRARAASAPGPNGVPYKLYKNAPDVLRFLWRLMRIVWQKEIIPKAWRRAAGVLIPKEKDATDISQFRPISLLNVEGKIFFSIIAQRLSTYLERNKYIDTSVQKAGIPGLSGCLEHTSMIWHQIQTAKKDKRDLYVIFLDLANAFGSVPHELLWESFNIFHVPEPITTLVKAYFQDLQLCFTTPDFTTTWQRLEVGIMAGCTISPLAFTMAMEVIIRASRWVVSGERTKEGLRLPPIRAYMDDMTTLTTTAACTRRLLAKLQDNIKWARMKIKPSKSRSISIVKGQLKDVRFCIGDDPIPTVSEQPIKSLGRWYNESLRDKDQVQQVRQDIADGLENINKTLLPGRLKLWCLQFGLLPRVLWPLTVYEVPITTVKKMERTITSYVKKWLGVPRCLSNIGLYGKGVLELPLTSLTEEYKCSKVRLQMTLKDSKDQTISKAAPPLQTGRKWTSSKAVQQATSALRHQDIVGNIQHGRGGFGLAASKPTFHKATTSERRKLVVEEVRRQEETARSAKAVSLAKQGQWTRWEGLERRKINWSELWQMEASNISFIIRAVYDVLPSPKNLHQWYGEDSTCPLCPAPATLRHIMTGCKTSLSQGRYTWRHNQVLKSLAAALETKRSATNSLPPKTSNPVKTTTFIREGQKMPKYPSTNPETGHLAMARDWKMLVDIGQQLIFPPEIASTNIRPDMVLWSPSRKAVYIIELTVPWENSVEEAYERKKLRYTELAADATQRGWNAKVWPVEVGCRGFVASSIIRLLKELGIHGQALRQTVRAVSQAAERGSQWIWIKRKDPCWAITS

SEQ ID NO: 8901 - protein, 906 aa, Oncorhynchus nerka
MLLQADIKCRLATLRRAENLRKLRRKKVHSRTRFYKKPFKFVKDLFAKEKCGILKTPKPELEEHLEKVHQDMKRHEQIVIPHDIPPIQPPEFNLDTDPPKWREVENVVRRARAASAPGPNGVPYKLYKNAPDVLRFLWRLMRIVWQKEIIPKAWRRAGGVLIPKEKDATDISQFRPISLLNVEGKIFFSIIAQRLSTYLERNKYIDTSVQKAGIPGFSGCLEHTSMIWHQIQTAKKDKRDLYVIFLDLANAFGSVPHELLWESFNIFHVPEPITTLVKAYFQDLQLCFTTPDFTTTWQRLEVGIMAGCTISPLAFTMAMEVIIRASGWVVGGERTKEGLRLPPIRAYMDDMTILTTTAACTRRLLAKLQDNIKWARMKIKPSKSRSISIVKGQLKDVRFCIGDDPIPTVSEQPIKSLGRWYNESLRDKDQVQQVRQDIADGLENINKTLLPGRLKLWCLQFGLLPRVMWPLTVYEVPITTVEKMERTITSYVKKWLGVPRCLSNIGLYGKGVLELPLTSLTEEYKCSKVRLQMTLKDSKDQTISKAAPLLQTGRKWTSSKAVQQATSALRHQDIVGNIQHGRGGFGLAASKPTFHKATTSERRKLVVEEVRRQEETARSAKAVSLAKQGQWTRWEGLERRKINWSELWQMEASNISFIIRAVYDVLPSPKNLHQWYGEDSTCPLCPAPATLRHIMTGCKTSLSQGRYTWRHNQVLKSLAAALETKRSATNSLPPKTSNPVKTTTFIREGQKRPKYPPTKPETGHLAMARDWKMLVVIGQQLIFPPEIASTNLRPDMVLWSPSRKAVYIIELTVPWENSVEEAYERKKLRYTELAADATQRGWNAKVWPVEVGCRGFVASSIIRLLKELGIHGQALRQTVRAVSQAAERGSQWIWIKRKDPCWAITS

SEQ ID NO: 8902 - protein, 1174 aa, Oncorhynchus nerka
MLAVSDAVSVCWRHPLSATESQQRNIPLEPARAGAQDGSTTDHTVTDPGTETTTSRNTAHETTITAAGHTLQVCSCGWERVTSARGLRIHQGRKRCLGEQRQGPRIDQYFLRSSQSNQSNEAQRRDANQSSQSISTPVTEEDNTSTEMPVDELTQPQRLLKEEKIKGHRPSVKWPKAVEKREWETINNDLTKILEQQVGTAEKKLERMGDIIYHYGEERFGVNERRSGKTPPLPAKSRRQQEIEILVRERRQLRKQWKKASDAEREGLMLLQADIKCRLATLRRAENLRKLRRKKVHSRTRFYKNPFKFVKDLFAKEKCGILKTPKPELEEHLEKVHQDMKRHEQIVIPHDIPPIQPPEFNLDTDPPKWREVENVVRRARAASAPGPNGVPYKLYKNAPDVLRFLWRLMRIVWQKEIIPKAWRRAGGVLIPKEKDATDISQFRPISLLNVEGKIFFSIIAQRLSTYLERNKYIDTSVQKAGIPGFSGCLEHTSMIWHQIQTAKKDKRDLYVIFLDLANAFGSVPHELLWESFNIFHVPEPITTLVKAYFQDLQLCFTTPDFTTTWQRLEVGIMAGCTISPLAFTMAMEVIIRASRWVVGGERTKEGLRLPPIRAYMDDMTILTTTAACTRRLLAKLQDNIKWARMKIKPSKSRSISIVKGQLKDVRFCIGDDPIPTVSEQPIKSLGRWYNESLRDKDQVQQVRQDIADGLENINKTLLPGRLKLWCLQFGLLPRVMWPLTVYEVPITTVEKMERTITSYVKKWLGVPRCLSNIGLYGKGVLELPLTSLTEEYKCSKVRLQMTLKDSKDQTISKAAPLLQTGRKWTSSKAVQQATSALRHQDIVGNIQHGRGGFGLAASKPTFHEATTSERRKLVVEEVRRQEETARSAKAVSLAKQGQWTRWEGLERRKINWSELWQMEASNISFIIRAVYDVLPSPKNLHQWYGEDSTCPLCPAPATLRHIMTGCKTSLSQGRYTWRHNQVLKSLAAALETKRSATNSLPPKTSNPVKTTTFIREGQKRPKYPPTKPETGHLAMARDWKMLVDIGQQLIFPPEIASTNLRPDMVLWSPSRKAVYIIELTVPWENSVEEAYERKKLRYTELAADATQRGWNAKVWPVEVGCRGFVASSIIRLLKELGIHGQALRQTVRAVSQAAERGSQWIWIKRKDPCWAITS

SEQ ID NO: 8903 - protein, 766 aa, Salvelinus namaycush
MRIVWQKEIIPKAWRRAGGLLIPKEKDATDISQFRPISLLNVEGKIFFSIIAQRLSTYLERNKYIDTSVQKAGIPGFSGCLEHTSMIWHQIQTAKKNKRDLYVIFLDLANAFDSVPHELLWESFNFFHVPEPITTLVKVYFQDLQLCFTTPDFTTTWQRLEVGIMAGCTISPLAFTMAMEVIIRASRWVVGGERTKEGLRLPPIRAYMDDMTTLTTTAACTRRLLAKLQDNIKWAQMKIKPSKSRSISIVKGQLKDVRFCIGDDPIPTVSEQPVKSLGRWYNESLRDKDQVQQVRQDIADGLENINKTLLPGKLKLWCLQFGLLPWVMWPLTVYEVPITTVEKMERTITSYVKKWLGVPRCLSNIGLYGKGVLELPLTSLTEEYKCSKVRLQMTLKDSKDQTISKAAPPLQTGRKWTSSKAVQQATSALRHQDIVGNIQHGRGGFGLAASKPTFHKATTSERRKLVVEEVRRQEETARSAKAVSLAKQGQWTRWEGLERRKINWSELWQMEASNISFIIRAVYDVLPSPKNLHQWYGEDPTCPLCPAPATLRHIMTGCKTSLSQGRYTWRHNQVLKSLAAALETKRSATNSLPPKTSNPVKTTTFIREGQKRPKHPPTKPETGHLGMARDWKMLVDIGQQLIFPPEIASTNFRPDMVLWSPSRKAVYIIELTVPWENSVEEAYEHKKLRYTELAADATQRGWNAKVWPVEVGCRGFVASSTIRLLKELGIHGQALRQTVRAVSQAAERGSQWIWIKRKDPCWAITS

SEQ ID NO: 8904 - protein, 1174 aa, Oncorhynchus nerka
MLAVSDAVSVCWRHPLSATESQQRNIPLEPARAGAQDGSTTDHTVTDPGTETTTSRNTAHETTITAAGHTLQVCSCGWERVTSARGLRIHQGRKRCLGEQRQGPRIDQYFLRSSQSNQSNEAQRRDANQSSQSISTPVTEEDNTSTEMPVDELTQPQRPLKEEKIKGHRPSVKWPKAVEKREWETINNDLTKILEQQVGTAEKKLERMGDIIYHYGEERFGVNERRSGKTPPLPAKSRRQQEIEILVRERRQLRKQWKKASDAEREGLMLLQADIKCRLATLRRAENLRKLRRKKVHSRTRFYKNPFKFVKDLFAKEKCGILKTPKPELEEHLEKVHQDMKRHEQIVIPHDIPPIQPPEFNLDTDPPKWREVENVVRRARAASAPGPNGVPYKLYKNAPDVLRFLWRLMRIVWQKEIIPKAWRRAGGVLIPKEKDATDISQFRPISLLNVEGKIFFSIIAQRLSTYLERNKYIDTSVQKAGIPGFSGCLEHTSMIWHQIQTAKKDKRDLYVIFLDLANAFGSVPHELLWESFNIFHVPEPITTLVKAYFQDLQLCFTTPDFTTTWQRLEVGIMAGCTISPLAFTMAMEVIIRASRWVVYGERTKEGLRLPPIRAYMDDMTILTTTAACTRRLLAKLQDNIKWARMKIKPSKSRSISIVKGQLKDVRFCIGDDPIPTVSEQPIKSLGRWYNESLRDKDQVQQVRQDIADGLENINKTLLPGRLKLWCLQFGLLPRVMWPLTVYEVPITTVEKMERTITSYVKKWLGVPRCLSNIGLYGKGVLELPLTSLTEEYKCSKVRLQMTLKDSKDQTISKAAPLLQTGRKWTSSKAVQQATSALRHQDIVGNIQHGRGGFGLAASKPTFHEATTSERRKLVVEEVRRQEETARSAKAVSLAKQGQWTRWEGLERRKINWSELWQMEASNISFIIRAVYDVLPSPKNLHQWYGEDSTCPLCPAPATLRHIMTGCKTSLSQGRYTWRHNQVLKSLAAALETKRSATNSLPPKTSNPVKTTTFIREGQKRPKYPPTKPETGHLAMARDWKMLVDIGQQLIFPPEIASTNLRPDMVLWSPSRKAVYIIELTVPWENSVEEAYERKKLRYTELAADATQRGWNAKVWPVEVGCRGFVASSIIRLLKELGIHGQALRQTVRAVSQAAERGSQWIWIKRKDPCWAITS

SEQ ID NO: 8905 - protein, 1174 aa, Oncorhynchus nerka
MLAVSDAVSVCWRHPLSATESQQRNIPLEPARAGAQDGSTTDHTVTDPGTETTTSRNTAHETTITAAGHTLQVCSCGWERVTSARGLRIHQGRKRCLGEQRQGPRIDQYFLRSSQSNQSNEAQRRDANQSSQSISTPVTEEDNTSTEMPVDELTQPQRPLKEEKIKGHRPSVKWPKAVEKREWETINNDLTKILEQQVGTAEKKLERMGDIIYHYGEERFGVNERRSGKTPPLPAKSRRQQEIEILVRERRQLRKQWKKASDAEREGLMLLQADIKCRLATLRRAENLRKLRRKKVHSRTRFYKNPFKFVKDLFAKEKCGILKTPKPELEEHLEKVHQDMKRHEQIVIPHDIPPIQPPEFNLDTDPPKWREVENVVRRARAASAPGPNGVPYKLYKNAPDVLRFLWRLMRIVWQKEIIPKAWRRAGGVLIPKEKDATDISQFRPISLLNVEGKIFFSIIAQRLSTYLERNKYIDTSVQKAGIPGFSGCLEHTSMIWHQIQTAKKDKRDLYVIFLDLANAFGSVPHELLWESFNIFHVPEPITTLVKAYFQDLQLCFTTPDFTTTWQRLEVGIMAGCTISPLAFTMAMEVIIRASRWVVGGERTKEGLRLPPIRAYMDDMTILTTTAACTRRLLAKLQDNIKWARMKIKPSKSRSISIVKGQLKDVRFCIGDDPIPTVSEQPIKSLGRWYNESLRDKDQVQQVRQDIADGLENINKTLLPGRLKLWCLQFGLLPRVMWPLTVYEVPITTVEKMERTITSYVKKWLGVPRCLSNIGLYGKGVLELPLTSLTEEYKCSKVRLQMTLKDSKDQTISKAAPLLQTGRKWTSSKAVQQATSALRHQDIVGNIQHGRGGFGLAASKPTFHEATTSERRKLVVEEVRRQEETARSAKAVSLAKQGQWTRWEGLERRKINWSELWQMEASNISFIIRAVYDVLPSPKNLHQWYGEDSTCPLCPAPATLRHIMTGCKTSLSQGRYTWRHNQVLKSLAAALETKRSATNSLPPKTSNPVKTTTFIREGQKRPKYPPTKPETGHLAMARDWKMLVDIGQQLIFPPEIASTNLRPDMVLWSPSRKAVYIIELTVPWENSVEEAYERKKLRYTELAADATQRGWNAKVWPVEVGCRGFVASSIIRLLKELGIHGQALRQTVRAVSQAAERGSQWIWIKRKDPCWAITS

SEQ ID NO: 8906 - protein, 1174 aa, Oncorhynchus nerka
MLAVSDAVSVCWRHPLSATESQQRNIPLEPARAGAQDGSTTDHTVTDPGTETTTSRNTAHETTITAAGHTLQVCSCGWERVTSARGLRIHQGRKRCLGEQRQGPRIDQYFLRSSQSNQSNEAQRRDANQSSQSISTPVTEEDNTSTEMPVDELTQPQRPLKEEKIKGHRPSVKWPKAVEKREWETINNDLTKILEQQVGTAEKKLERMGDIIYHYGEERFGVNERRSGKTPPLPAKSRRQQEIEILVRERRQLRKQWKKASDAERDGLMLLQADIKCRLATLRRAENLRKLRRKKVHSRTRFYKNPFKFVKDLFAKEKCGILKTPKPELEEHLEKVHQDMKRHEQIVIPHDIPPIQPPEFNLDTDPPKWREVENVVRRARAASAPGPNGVPYKLYKNAPDVLRFLWRLMRIVWQKEIIPKAWRRAGGVLIPKEKDATDISQFRPISLLNVEGKIFFSIIAQRLSTYLERNKYIDTSVQKAGIPGFSGCLEHTSMIWHQIQTAKKDKRDLYVIFLDLANAFGSVPHELLWESFNIFHVPEPITTLVKAYFQDLQLCFTTPDFTTTWQRLEVGIMAGCTISPLAFTMAMEVIIRASRWVVGGERTKEGLRLPPIRAYMDDMTILTTTAACTRRLLAKLQDNIKWARMKIKPSKSRSISIVKGQLKDVRFCIGDDPIPTVSEQPIKSLGRWYNESLRDKDQVQQVRQDIADGLENINKTLLPGRLKLWCLQFGLLPRVMWPLTVYEVPITTVEKMERTITSYVKKWLGVPRCLSNIGLYGKGVLELPLTSLTEEYKCSKVRLQMTLKDSKDQTISKAAPLLQTGRKWTSSKAVQQATSALRHQDIVGNIQHGRGGFGLAASKPTFHEATTSERRKLVVEEVRRQEETARSAKAVSLAKQGQWTRWEGLERRKINWSELWQMEASNISFIIRAVYDVLPSPKNLHQWYGEDSTCPLCPAPATLRHIMTGCKTSLSQGRYTWRHNQVLKSLAAALETKRSATNSLPPKTSNPVKTTTFIREGQKRPKYPPTKPETGHLAMARDWKMLVDIGQQLIFPPEIASTNLRPDMVLWSPSRKAVYIIELTVPWENSVEEAYERKKLRYTELAADATQRGWNAKVWPVEVGCRGFVASSIIRLLKELGIHGQALRLTVRAVSQAAERGSQWIWIKRKDPCWAITS

SEQ ID NO: 8907 - protein, 1174 aa, Salvelinus namaycush
MLAVSDAASVCWRHPLSATESQQRNIPLEPARAGAQDGSTTDHTATDPGMETTTSRNTAHETTITAAGHTLQVCSCGWERVTSARGLRIHQGRKRCLVEQRQGPRIDQYFLRSSQSNQSNDAQRRDANQSSQSISTPVTEEDNTSTEMPVDELTQPQRPLKEEKVKGHRPSVKWPQAVEKREWETINNDLTKILEQQVGTAEKKLERMGDIIYHYGEERFGVNERRSGKTPPAPAKSRRQQEIEILVRERRQLRKQWKKASDAEREGLMLLQADIKCRLATLRRAENLRKLRRKKEHSRTRFYKNPFKFVKDLFAKEKCGILKTPKPELEEHLEKVHQDTKRHEQIIIPHDIPPIQPPEFNLDTDPPKWKEVENVVRRARAASAPGPNGVPYKLYKNAPDVLRFLWRLMRIVWQKEIIPKAWRRAGGVLIPKEKDATDISQFRPISLLNVEGKIFFSIIAQRLSTYLERNKYIDTSVQKAGIPGFSGCLEHTSMIWHQIQTAKKDKRDLYVIFLDLANAFGSVPHELLWESFNFFHVPEPITTLVKAYFQDLQLCFTTPDFTTTWQRLEVGIMAGCTISPLAFTMAMEVIIRASRWVVGGERTKEGLRLPPIRAYMDDMTTLTTTAACTRRLLAKLQANIKWARMKIKPSKSRSISIVKGQLKDLRFCIGDDPIPAVSEQPVKSLGRWYNESLRDKDQVQQVRQDIADGLENINKTLLPGKLKLWCLQFGLLPRVMWPLTVYEVPITTVEKMERTITSYVKKWLGVPRCLSNIGLYGKGVLELPLTSLTEEYKCSKVRLQMTLKDSKDQTISKAAPPLQTGRKWTSSKAVQQAISALRHQDIVGNIQHGRGGFGLAASKPTFHNATTSERRKLVVEEVRRQEETARSAKAVSLAKQGQWTRWEGLERRKINWSELWQMEASNISFIIRAVYDVLPSPKNLHQWYGEDPTCPLCPAPATLRHIMTGCKTSLSQGRYTWRHNQVLKSLAAALETKRSATNSLPPKTSNPVKTTTFIREGQKKPKHPPTKPETGHLGMARDWKMLVDIGQQLIFPPEIASTNLRPDMVLWSASRKAVYIIELTVPWENSVEEAYERKKLRYTELAADATQRGWNAKVWPVEVGCRGFVASSTIRLLKELGIHGQALRQTVRAVSQAAERGSQWIWIKRKDPCWAIIS

SEQ ID NO: 8908 - protein, 906 aa, Salvelinus namaycush
MLLQADIKCRLATLRRAENLRKLRRKKEHSRTRFYKNPFKFVKDLFAKEKCGILKTPKPELEEHLEKVHQDTKRHEQIIIPHDIPPIQPPEFNLDTDPPKWKEVENVVRRARAASAPGPNGVPYKLYKNAPDVLRFLWRLMRIVWQKEIIPKAWRRAGGVLIPKEKDATDISQFRPISLLNVEGKIFFSIIAQRLSTYLERNKYIDTSVQKAGIPGFSGCLEHTSMIWHQIQTAKKDKRDLYVIFLDLANAFGSVPHELLWESFNFFHVPEPITTLVKAYFQDLQLCFTTPDFTTTWQRLEVGIMAGCTISPLAFTMAMEVIIRASRWVVGGERTKEGLRLPPIRAYMDDMTTLTTTAACTRRLLAKLQANIKWARMKIKPSKSRSISIVKGQLKDLRFCIGDDPIPAVSEQPVKSLGRWYNESLRDKDQVQQVRQDIADGLENINKTLLPGKLKLWCLQFGLLPRVMWPLTVYEVPITTVEKMERTITSYVKKWLGVPRCLSNIGLYGKGVLELPLTSLTEEYKCSKVRLQMTLKDSKDQTISKAAPPLQTGRKWTSSKAVQQAISALRHQDIVGNIQHGRGGFGLAASKPTFHNATTSERRKLVVEEVRRQEETARSAKAVSLAKQGQWTRWEGLERRKINWSELWQMEASNISFIIRAVYDVLPSPKNLHQWYGEDPTCPLCPAPATLRHIMTGCKTSLSQGRYTWRHNQVLKSLAAALETKRSATNSLPPKTSNPVKTTTFIREGQKKPKHPPTKPETGHLGMARDWKMLVDIGQQLIFPPEIASTNLRPDMVLWSASRKAVYIIELTVPWENSVEEAYERKKLRYTELAADATQRGWNAKVWPVEVGCRGFVASSTIRLLKELGIHGQALRQTVRAVSQAAERGSQWIWIKRKDPCWAIIS

SEQ ID NO: 8909 - protein, 1137 aa, Salvelinus namaycush
MAQRLITRLRTQEWKRQRVGTQHETTITAAGHTLQVCSCGWERVTSARGLRIHQGRKRCLGEQRQGPRIDQYFLRSSQSNQSNEAQRRDANQSSQSISTPVTEEDNTSTEMPVDELTQPQRPLKEEKVKGHRPSVKWPKAVEKREWETINNDLTKILEQQIGTAEKKLERMGDIIYHYGEERFGVNERRSGKTPPAPAKSRRQQEIEILVRERRQLRKQWKKASDAEREGLMLLQADIKCRLATLRRAENLRKLRRKKEHSRTRFYKKPFKFVKDLFAKEKCGILKTPKPELEEHLEKVHQDTKRHEQIIIPHDIPPIQPPEFNLDTDPPKWKEVENVVRRARAASAPGPNGVPFKLYKNAPDVLRFLWRLMRIVWQKEIIPKAWRRAGGVLIPKEKDATDISQFRPISLLNVEGKIFFSIIAQRLSTYLERNKYIDTSVQKAGIPGFSGCLEHTSMIWHQIQTAKKDKRDLYVIFLDLANAFGSVPHELLWESFNFFHVPEPITTLVKAYFQDLQLCFTTPDFTTTWQRLEVGIMAGCTISPLAFTMAMEVIIRASRWVVGGERTKEGLRLPPIRAYMDDMTTLTTTAACTRRLLAKLQDNIKWARMKIKPSKSRSISIVKGQLKDVRFCIGDDPIPTVSEQPVKSLGRWYNESLRDKNQVQQVRQDIADGLENINKTLLPGKLKLWCLQFGLLPRVMWPLTVYEVPITTVEKMERTITSYVKKWLGVPRCLSNIGLYGKGVLELPLTSLTEEYKCSKVRLQMTLKDSKDQTISKAAPPLQTGRKWTSSKAVQQATSALRHQDIVGNIQHGRGGFGLAASKPTFHKATTSERRKLVVEEVRRQEETARSAKAVSLAKQGQWTRWEGLERRKINWSELWQMEASNISFIIRAVYDVLPSPKNLHQWYGEDPTCPLCPAPATLRHIMTGCKTSLSQGRYTWRHNQVLKSLAAALETKRSATNSLPPKTSNPVKTTTFIREGQKRPKHPPTKPETGHLGMARDWKMLVDIGQQLIFPPEIASTNLRPDMVLWSPSRKAVYIIELTVPWENSVEEAYERKKLRYTELAADATQRGWNAKVWPVEVGCRGFVASSTIRLLKELGIHGQALRQTVRAVSQAAERGSQWIWIKRKDPCWAITS

SEQ ID NO: 8910 - protein, 1145 aa, Salvelinus namaycush
MLAVSDAASVCWRHPLSATESQQRNIPLEPARAGAQDGSTTDHTAMDPGMETTSSKNTAHETTITAAGHTLQVCSCGWERVTSARGLRIHQGRKRCLGEQRQGPRIDQYFLRSSQSNQSNEAQRRDANQSSQSISTPVSEEDNTSTEMPVDELTQPQRPLKEEKVKGHRPSVKWPKAVEKREWETINNNLTKILEQQVGTAEKKLERMGDIIYHYGEERFGVNERRSGKTPPAPAKSRRQQEIEILVRERRQLRKQWKKASDAEREGLMLLQADIKCRLATLRRAENLRKLRRKKEHSRTRFYKKTFKFVKDLFAKEKCGILKTPKPELEEHLEKVHQDTKRHEQIIIPHDIPPIQPPEFNLDTDPPKWKEVENVVRRARAASAPGPNGVPYKLYKNAPDVLRFLWRLMRIVWQKEIIPKAWRRAGGVLIPKEKDATDISQFRPISLLNVEGKIFFSIIAQRLSTYLERNKYIDTSVQKAGIPGFSGCLEHTSMIWHQIQTAKKDKRDLYVIFLDLANAFGSVPHELLWESFNFFHVPEPITTLVKAYFQDLQLCFTTPDFTTTWQRLEVGIMAGCTISPLAFTMAMEVIIRASRWVVGGERTKEGLRLPPIRAYMDDMTTLTTTAACTRRLLAKLPDNIKWARMKIKPSKSRSISIVKGQLKDVRFCIGDDPIPTVSEQPVKSLGRWYNESLRDKDQVQQVRQDIADGLENINKTLLPGKLKLWCLQFGLLPRVMWPLTVYEVPITTVEKMERTITSYVKKWLGVPRCLSNIGLYGKGVLELPLTSLTEEYKCSKVRLQMTLKDSKDQTISKAAPPLQTGRKWTSSKAVQQATSALRHQDIVGNIQHGRGGFGLAASKPTFHKATTSERRKLVVEEVRRQEETARSAKAVSLAKQGQWTRWEGLERRKINWSELWQMEASNISFIIRAVYDVLPSPKNLHQWYGEDPTCPLCPAPATLRHIMTGCKTSLSQGRYTWRHNQVLKSLAAALETKRSATNSLPPKTSNPVKTTTFIREGQKRPKHPPTKPETGHLGMARDWKMLVDIGQQLIFPPEIASTNLRPDMVLWSPSRKAVYIIELTVPWENSVEEAYERKKLRYTELAADATQRGWNAKVWPVEVGCRGFVASSTIRLLKELGIHGQALQQ

SEQ ID NO: 8911 - protein, 1174 aa, Oncorhynchus mykiss
MLAVSDAVSVCWRHPLSATESQQRNIPLEPARAGAQDGSMTDHMVTDPGTETTTSRNTAHETTITAAGLTLQACSCGWERVTSARGLRIHQGRKRCLGEQRQGPRIDQYFLRSSQSNQSNEAQRRDANQSSQSISTPVTEEDNTSTEMPVDELTQPQRPLKQEKIKGHRPSVKWPKAVEKREWETINNDLTKILEQQVGTAEKKLERMGDIIYHYGEERFGVNERRSGKTPPAPAKSRRQQEIEILVRERRQLRKQWKKASDAEREGLMLLQADIKCRLATLRRAENLRKLRRKKEHSRTQFYKNPFKFVKDLFAKEKCGILKTPKPELEEHLEKVHQDMKRHEQIIIPHDIPPIQPPEFNLDTDPPKWREVENVVRRARAASAPGPNGVPYKLYKNAPDVLRFLWRLMRIVWQKEIIPKAWRRAGGVLIPKEKDATDISQFRPISLLNVEGKIFFSIIAQRLSTYLERNKYIDTSVQKAGIPGFSGCLEHTSMIWHQIQTAKKDKRDLYVIFLDLANAFGSVPHELLWESFNFFHVPEPITTLVKAYFQDLQLCFTTPDFTTTWQRLEVGIMAGCTISPLAFTMAMEVIIRASRWVVGGERTKEGLRLPPIRAYMDDMTTLTTTAACTRRLLAKLQDNIKWARMKIKPSKSRSISIVKGQLKDVRFCIGDDPIPTVSEQPIKSLGRWYNESLRDKDQVQQVRQDIADGLENINKTLLPGRLKLWCLQFGLLPRVMWPLTVYEVPITTVEKMERTITSYVKKWLGVPRCLSNIGLYGKGVLELPLTSLTEEYKCSKVRLQMTLKDSKDQTISKAAPPLQTGRKWTSSKAVQQATSALRHQDIVGNIQHGRGGFGLAASKPTFHKATTSERRKLVVKEVRRQEETARSAKAVSLAKQGQWTRWEGLERRKINWSELWQMEASNISFIIRAVYDVLPSPKNLHQWYGEDSTCPLCPAPATLRHIMTGCKTSLSQGRYTWRHNQVLKSLAAALETKRSATNSLPPKTSNPVKTTTFIREGQKRPKYPPTKPETGHLAMARDWKMLVDIGQQLIFPPEIASTKLRPDMVLWSPSRKAVYIIELTVPWENSVEEAYERKKLRYTELAADATQRGWNAKVWPVEVGCRGFVASSTIRLLKELGIHGQALRQTVRAVSQAAERGSQWIWIKRKDPCWAITS

SEQ ID NO: 8912 - protein, 1174 aa, Salvelinus namaycush
MLAVSDAASVCWRHPLSATESQQRNIPLEPARAGAQDGSTTDHTATDPGMETTTSRNTAHETTITAAGHTLQVCSCGWERVTSARGLRIHQGRKRCLGEQRQGPRIDQYFLRSSQSNQSNEAQRRDANQSSQSISTPVTEEDNTSTEMPVDELTQPQRPLKEEKVKGHRPSVKWPKAVEKREWETINNDLTKILEQQVGTAEKKLERMGDIIYHYGEERFGVNERRSGKTPPAPAKSRRQQEIEILVRERRQLRKQWKKASDAEREGLMLLQADIKCRLATLRRAENLRKLRRKKEHSRTRFYKKTFKFVKDLFAKEKCGILKTPKPELEEHLKKVHQDTKRHEQIIIPHDIPPIQPPEFNLDTDPPKWKEVENVVRRARAASAPGPNGVPYKLYKNAPDVLRFLWRLMRIVWQKEIIPKAWRRAGGVLIPKEKDATDISQFRPISLLNVEGKIFFSIIAQRLSTYLERNKYIDTSVQKAGIPGFSGCLEHTSMIWHQIQTGKKDKRDLYVIFLDLANAFGSVPHELLWESFNFFHVPKPITTLVKAYFQDLQLCFTTPDFTTTWQRLEVGIMAGCTISPLAFTMAMEVIIRASRWVVGGERTKEGLRLPPIRAYMDDMTTLTTTAACTRQLLAKLQDNIKWARMKIKPSKSRSISIVKGQLKDVRFCIGDDPIPTVSEQPVKSLGRWYNESLRDKDQVQQVRQDIADGLENINKTLLPGKLKLWCLQFGLLPRVMWPLTVYEVPITTVEKMERTITSYVKKWLGVPRCLSNIGLYGKGVLELPLTSLTEEYKCSKVRLQMKLKDSKDQTISKNAPPLQTGRKWTSSKAVQQPTSALRHQDIVGNIQHGRGGFGLAASKPTFHKATTSERRKLVVEEVRRQEETARSAKAVSLAKQGQWTRWEGLERRKINWSELWQMEASNISFIIRAVYDVLPSPKNLHQWYGEDPTCPLCPAPATLRHIMTGCKTSLSQGRYTWRHNQVLKSLVAALETKRSATNSLPPKTSNPVKTTTFIREGQKRPKHPPTKPETGHLGMARDWKMLVDIGQQLIFPPEIASTNLRPDMVLWSPSRKAVYIIELTVPWENSVEETYERKKLRYTELAADATQRGWNAKVWPVEVGCRGFVASSTIRLLKELGIHGQALRQTVRAVSQAAERGSQWIWIKRKDPYWAITS

SEQ ID NO: 8913 - protein, 1122 aa, Oncorhynchus mykiss
MVTDPGTETTTSRNTAHETTITAAGHTLQACSCGWERVTSAMGLRIHQGRKRCLGEQRQGPHIDQYFLRSSQSNLSNEAQRRDANQSSQSISTPVTEEDNTSTEMPVDELTQPHRPLKQEKIKGHRPSVKWPKAVEKREWETINNDLTKILEQQVGTAEKKLERMGDIIYHYGEERFGVNERRSGKTPPAPAKSRRQQEIEILVRERRQLRKQWKKASDAEREGLMLLQADIKCRLATLRRAENLRKLRRKKEHSRTQFYKKPFTFVKDLFAKEKCGILKTPKPELEEHLEKVHQDMKRHEQIIIPHDIPPIQPPEFNLDTDPPKWREVENVVRRARAALAPGPNGVPYKLYKNAPDVLRFLWRLMRIVWQKEIIPKAWRRAGGVLIPKENDATDISQFRPISLLNVEGKIFFSIIAQRLSTYLERNKYIDTSVQKAGIPGFSGCLEHTSMIWHQIQTVKKDKRDLYVIFLDLANAFGSVPHELLWEPITTLVKAYFQDLQLCFTTPDFTTTWQRLEVGIMAGCTISPLAFTMAMEVIIRASRWVVGGERTKEGLRLPPIRAYMDDMTTLTTTAACTRRLLAKLQDNIKWARMKIKPSKSRSISIVKGQLKDVRFCIGDDPIPTVSEQPIKSLGRWYNESLRDKDQVQQVRQDIADGLENINKTLLPGRLKLWCLQFGLLPRVMWPLTVYEVPITTVEKMERTITSYVKKWLGVPRCLSNIGLYGKGVLELPLTSLTEEYKCSKVRLQMTLKDSKDQTISKAAPPLQTGWKWTSSKAVQQATSALRHQDIVGNIQHGRGGFGLAASKPTFHKATTSERRKLVVEEVRRQEETARSAKAVSLAKQGQWTWWEGLERRKINWSELWQMEASNISFIIRAVYDVLPSPKNLHQWYGEDSTCPLCPAPATLRHIMTGCKTSLSQGRYTWRHNQVLKSLAAALETKRSATNSLPPKTSNPVKTTTFIWEGQKRPKYPPTKPETGHLAMARDWKMLVDIGQQLIFPPEIASTNLRPDMVLWSPSRKAVYIIELTVLWENSVEEAYERKKLSYTELAADATQRGWNAKVWTVEVGCRGFVASSTIRLLKELGIHGQALRQTVRAVSQAAERGSQWIWIKRKDPCWAITS

SEQ ID NO: 8914 - protein, 1026 aa, Salvelinus namaycush
MPVDELTQPQRPLKEEKVKGYRPSVKWPKAVEKREWETINNDLTKILEQQVGTAEKKLERMGDIIYHGEERFGVNERRSGKTPPAPAKSRRQQEIEILVRERRQLRKQWKKASDAEREGLMLLQADIKCRLATLRRAENLRKLRRKKEHSRTRFYKKNFKFVKELFAKEKCGILKTPKPELEEHLEKVHQDTKRHEQIIIPHDIPPIQPPEFNLDTDPPKWKEVENVVRRARAASAPGPNGVPYKLYKNAPDVLRFLWRLMRIVWQKEIIPKAWRRAGGVLIPKEKDATDISQFRPISLLNVEGKIFFSIIAQRLSTYLERNKYIDTSVQKAGIPGFSGCLEHTSMIWHQIQTAKKDKRDLYVIFLDLANAFGSVPHELLWESFNFFYVPEPITTLVKAYFQDLQLCFTTPDFTTTWQCLEVGIMAGCTISPLAFTMAMEVIIRASRWVVGGERTKEGLRLPPIRAYMDDMTTLTTTAACTRRLLAKLQDNIKWARMKIKPSKSRSISIVKGQLKDVRFCIGDDPIPTVSEQPVKSLGRWYNESLRDKDQVQQVRQDIADGLENINKTLLPGKLKLWCLQFGLLPRVMWPLTVYEVPITTVEKMERTITSYVKKWLGVPRCLSNIGLYGKGVLELPLTSLTEEYKCSKVRLQMTLKDSKDQTISKAAPPLQTGRKWTSSKAVQQATSALRHQDIVGNIQHGRGGFGLAASKPTFHKATTSERRKLVVEEVRRQEETARSAKAVSLAKQGQWTRWEGLERRKINWSELWQMEASNISFIIRAVYDVLPSPKNLHQWYGEDPTCPLCPAPATLRHIMTGCKTSLSQGRYTWRHNQVLKSLAAALETKRSATNSLPPKTSNPVKTTTFIREGQKRPKHPPTKPETGHLGMARDWKMLVDIGQQLIFPPEIASTNLRPDMVLWSPSRKAVYIIELTVSWENSVEEAYERKKLRYTELAADATQRGWNAKVWPVEVGCRGFVASSTIRLLKELGIHGQALRQTVRAVSQAAERGSQWIWIKRKDPCWAITS

SEQ ID NO: 8915 - protein, 1090 aa, Oncorhynchus gorbuscha
MLAVSDAVSVCWRHPLSATESQQRNIPLEPARAGAQDGSTTDHTVTDPGTETTTSRNTAHETTITAAGHTLQVCSCGWERVTSARGLRIHQGRKRCLLEKQRQGPRIDQYFLRSNQSNQSNEAQRRDANQSSQSISTPVTEEDNTSTEMPVDELTQPQRPLKEEKIKGHRPSVKWPKAVEKREWETINNDLTKILEQQVGTAEKKLERMGDIIYHYGEERFGVNERRSGKTPPAPAKSRRQQEIEILVRERRQLRKQWKKASDAEREGLMLLQADIKCRLATLRRAENLRKLRRKKEHSRTRFYKKPFKFVKDLFAKEKCIILKTTKPELEEHLEKVHQDMKRHEQIIIPHDIPHIQPPEFNLDTDPPKWREVENVVRRARAASAPGSNGVPYKLYKNAPDVLRFLWRLMRIVWQKEIIPKAWRRAGGVLIPKEKDATDISQFRPISLLNVEGKIFFSIIAQRLSTYLERNKYIDTSVQKAGIPDFSGCLEHTSMIWHQIQTAKKDKRDLYVIFLDLANAFGSVPHELLWESFNIFHVPEPITTLVKAYFQDLQLCFTTPDFTTTWQRLEVGIMAGCTISPLAFTMAMEVIIRASRWVVGGERTKEGLRLPPIRAYMDDMTTLTTTAACTRRLLAKLQDNIKWARMKIKPSKSRSISIVKGQLKDVRFCIGDDPIPTVSEQPIKSLGRWYNESLRDKDQVQQVRQDIADGLENINKTLLPGRLKLWCLQFGLLPRVMWPITVYEVPITTVEKMERTITSYVKKWLGVPRCLSNIGLYGKGVLELPLTSLTEEYKCSKVRLQMTLKDSKDQTISKAAPPLQTGRKWTSSKAVQQATSALRHQDIVGNIQHGRGGFGLAASKPTFHKTTTSERRKLVVEEVRRQEETARSTKAVSLAKQGQWTRWEGLERRKINWSELWQMEASNISFIIRAVYDVLPSPKNLHQWYGDDSTCPLYPAPATLRHMTGCKTSLSQGRYTWRHNQVLKSLAAALETKRSATNSLPPKTSNPVKTTTFIREGQKRPKYPPTKPETGHLAMARDWKMLVDIGQQLIFPPEIASTNLRPDMVLWSPSRKTVYIIELTVPWENSVEEA

SEQ ID NO: 8916 - protein, 1119 aa, Hirundichthys speculiger
MLAVSNAASVCWRHPLSATESQIRNIPLEPARAGAQDGSLIDHTATDLGTKTTMRKKNTAHETPTTAAGHTLQVCSCGWKKVTSARGLKIHQGRKRCLGESRGRNFALTSTSYEATDQVSRMKHSDRTQNHSSQSISTPVIEEDNTSTDMPVDELNQSQRPPKEEKIKGHRPNVKWPKAVEKKEWETINNDLIKILEQQKGTAEKKLERMGDIIYHYGEDRFGVSIRRNGKAQPAPAKSRRQQEIEKLVRERRQLRKQWKKASEAEKEGLMLLQADIKCRLITLRRAENLRKLRKKKEHLRTRFYKNPFKFVKDLFAKDKSGILKTPKRVLEEHLEKVHQDPKRHEQIIIPHDIPPIQPPKVKLDTDPPKWKEVENIVRRARAASAPGPNGVPYRLYKNAPDVLRFLWRLMRIVWQKEIIPKAWRRAGGVLIPKEKDSTDINQFRPICLLNVEGKIFFSIIAQRLSTYLEKNNYVDTSVQKAGIPGFSGCLEHTSMIWHQIQAAKKDKRDLYVIFLDLANAFGSVPHKLLWESFNFFHVPESITTLVKAYFQDLQLCFTTPDFTTTWQRLEVGIMAGCTISPLAFTMAMEVIIRASRWVVGGERTKNGLRLPPIRAYMDDMTTLTTTPACTKRLLAKLQENIKWARMQVKPNKSRSVAIVKGQLKDVKFCIGDDPIPTVSEQPVKSLGRWYSASLKDTDQVQQLRQDIANGLERINRTLLPGKLKLWCLQFGLLPRVMWPLTMYEVPITAVEKMERTITSYAKKWLGVPRCLSNISLYGKGVLELPLTSLTEEYKCSKVRLEMTLRDSRDQTIRSAAPPVITGRKWTPSNAVQQATSALRHQDILGHIQHGRGGFGLAASKPSWRKATTSERRKLVVEEVRRQEETVRSTKAVSLAKQGQWMRWEGLERRKINWSELWQMDTCNISFIIRAVYDVLPTPKNLHQWYGEDPTCPLCPAPATLRHILTGCKTSLTQGRYTWRHNQVLKSLAAAVEIKRNATNSLPPRSTNPLETTTFIREGQKKPKHTTTKPETGHLAMARDWKMLVDVGQQLIFPSEIATTNLRPDMVLWSPSRRSVFIIELTVPWENSVEEAYERKKTAIHGASSRRNTTWLECKSLSS

SEQ ID NO: 8917 - protein, 1128 aa, Oncorhynchus nerka
MDPGTETTTSRNTAHETTITAAGHTLQVCSCGWERVTSARGLRIHQGRKRCLGEQRQGPRIDQYILRSSQSNQSNEAQRRDANQSSQSISTPVTEEDNTSTEMPVDELTQPQRPLKEEKIKGHRPSVKWPKAVEKREWETINNDLTKILEQQVGTAEKKLERMGDIIYHYGEERFGVNERRSGKTPPPPAKSRRQQEIEILVRERRQLRKQWKKASDAEREGLMLLQADIKCRLATLRRAENLRKLRRKKVHSRTRFYKNPFKFVKDLFAKEKCGILKTPKPELEEHLEKVHQDMKRHEQIVIPHDIPPIQPPEFNLDTDPPKWREVENVVRRARAASAPGPNGVPYKLYKNAPDVLRFLWRLTRIVWQKEIIPKAWRRAGGVLIPKEKDATDISQFRPISLLNVEGKIFFSIIAQRLSTYLERNKYIDTSVQKAGIPGFSGCLEHTSMIWHQIQTAKKDKRDLYVIFLDLANAFGSVPHELLWESFNIFHVPEPITTLVKAYFQDLQLCFTTPDFTTTWQRLEVGIMAGCTISPLAFTMAMEVIIRASRWVVGGERTKEGLRLPPIRAYMDDMTILTTTAACTRRLLAKLQDNIKWARMKIKPSKSQSISIVKGQLKDVRFCIGDDPIPTVSEQPIKSLGRWYNESLRDKDQVQQVRQDIADGLENINKTLLPGRLKLWCLQFGLLPRVMWPLTVYEVPITTVEKMERTITSYVKKWLGVPRCLSNIGLYGKGVLELPLTSLTEEYKCSKVRLQMTLKDSKDQTISKAAPLLQTGRKCTSSKAVQQATSALRHQDIVGNIQHGRGGFGLAASKPFHKATTSERRKLVVEEVRRQEETARSAKAVSLAKQEQWTRWEGLERRKINWSELWQMEASNISFIIRAVYDVLPSPKNLHQWYGEDSTCPLCPAPATLRHIMTGCKTSLSQGRYTWRHNQVLKSLAAALETKRSATNSLPPKTSNPVKTTTFIREGQKRPKYPPTKPETGHLAMARDWKMLVDIGQQLIFPPEIASTNLRPDMVLWSPSRKAVYIIELTVPWENSVEEAYERKKLRYTELAADATQRGWNAKVWPVEVGCRGFVASSIIRLLKELGIHGQALRQTVRAVSQAAERGSQWIWIKRKDPCWAITS

SEQ ID NO: 8918 - protein, 1073 aa, Pimephales promelas
MCLRVEESYIIPWVEDPPGHHSLQCISTAVMEDVNPSTKITTEVEPTTGVEITHPPRPVVERRLLGHRPCVKWPGASDKKLWETVNTDLTLTLEKLRGTVEKKLESMGNIIYEYGVESFGVQEAKGRRKVPTPPVSRRQQEIKRLVQERGQLKKQWKKASEVEKEGIEALQADIKTRLASLRRAENLRKRRRKKEQTRTRFYKDPFKFLKSLFTEEKSGALKTTKKDLEEHLRTTNFDSKRHEHLAIPSDIPPIEPPEYHIETSPPTWKEVENIVRRARTASAPGPNGVPYKVYRNAPDVLRFLWRLMRTAWQKKKIPKVWRRAGGVLIPKEKDAETISQFRPISLLNVEGKIFFKVIAQRMAEFLQKNAYVDTSVQKAGISGFSGCLEHSSMIWHQIQMAKVEKRDLHVVFLDLANAFGSVPHELLWSAFRFFHIPDTITTLVRSYFQDLQFCFTTSEFTTSWQTLNVGIMAGCTCTISPLAFIMAMEVIIRASRWVVGGQRVNSGYRLPPLRAYMDDITTLTTTVPCTRRLLRKLEENISWARLKIKPSKSRSISIVKGKLSKLKFFIGHDQIPTLSEQPVKSLGRWYDASLKDKDQVQQLRKDISSSLQAIDNTQLPGKLKAWCLQFGLLPRVLWPLVVYEVPISTVEKMERGVTGYLKKWLGVPRCLTTIGLYGDGVLKLPLTSLTEEFKCAKTRLQMTLNESRDLVVSNNAPTLATGRKWRPGKAVQEATAALKHADILGHVQHGRGGLGLTSHAVWSKATAPERRKMVVQEVRQQEEAARWAKAVSLAKQGQWTRWDSVEKRKISWKDLWAMEARRLSFSIRATYDVLPTPVNLHQWYGEDPECALCSMPANLRHILTGCKTSLTQGRYTWRHNQVLKTLASALENKRAATNSLPPPAASHPLRMTFVREGAKPPKSSSTPLDRDQLRLARDWKMLADIGRQLVFPPEIATTTLRPDMVLWSRSLKKAFIIELTVPWEDSVDEAYERKHLRYAELAAEARRHGWNTEIRPVEVGCRGFVATSTIRLLRDLGIKGQSQRSAIRAVSEAAEVSSQWLWIKRKDPSWAPK

SEQ ID NO: 8919 - protein, 805 aa, Amblyraja radiata
MRVVWKKQTIPKAWRRAGGVLIPKEKDASDISQFRPICLLNVEGKIFFSIVSQRLSTYLVTNKYIDTPVQKAGIPGFSGCLEHTSMIWHQIQAAKKEKRDLHVIFLDLANAFGSVPHELLWESFAFFHVPELITTLVKSYFQDLQLCFTTADFSTTWQRLEVGIMAGCTVSPLAFTMAMEVIIRASKWVVGGERTRAGLRLPPIRAYMDDMTTLTTIAACTKRLLGKLQENIKWARMKIKPCKSRSISIVKGVLRDTRFCIGDDPIPTVSEQPVKSLGRWYNASLKDKEQVEQLRQEIVNGLENINQTLLPGKLKLWCLQFGLLPRTMWPLTIYEAPITTVEKMERTITSYAKKWLGVPRCLTNIGLYGKGVMELPLTSLTEEYKCSKVRLQMTLRDSRDKTISAVAPPLVTGRKWTPSDAVQQASSALRYKDIVGQVQQGRGGFGLTTSKPTWRKATTSERRTLVVEEVRRQEEAARSAKAVSLAKQGQWMQWEGVERRKISWKELWEMEASKISFIIRATYDVLPSPKNLHQWYGEDPTCALCPTPATLKHIMVGCKTSLTQGRYTWRHNQVLKSLASALENRRCATNSLPPRASNHLPLRATTFVREGQKTSKHPSTRSEEGNLCRARDWRMLADIGRQLVFPPEIASTNLRPDLVFWSPSQKTAYIIELTVPWENSVEEAYERKKLRYAELAAEATQRGWNTKVYPVEVGCRGFVASSTIRLLKELGIHGQALRKTIRSLSEAAERSSRWIWLKRKDPCWAPSIQGESLGRFDTGHALRADHPAAGRPCGGCIVIKGRNTQ

SEQ ID NO: 8920 - protein, 1180 aa, Amblyraja radiata
MIAVPNAVSVSWRHPLNATKSKLKRIPLEPARAGAEDGSPIDNTVTDPGTETTTDKESMAHETSTTAAGHKLQVCICGWEKITSVKGLKIHQGRKKCLREQRHGPRIGQYFLRSNQSNQSSEAQRQDSNQSSQSISTHVTEEGDTSTEMPVEEPTQRRQRPPLEGKIKGHKPGVKWPKAVEKKEWETVNSDLIHILEQQAGTAVEKFERMGNTIYSYGEERFGVSKGRGGKKLPTPIKSRRQQEIERLIRERRQLKKQWKKATEAEREGLMLLQEDIKSRLATLRKAENLRKLRRKKEHTRTRFYKDPFKFIKDLFAKEKGGTLKTSKRELEEHLEKAHQDTKRHEQLVIPHDIPPIQPPEFNLDTSPPRWKEVENTVRRASAASAPGPNGVPYKLYKNAPDVLRFLWKLMRVVWKKQTIPKAWRRAGGVLLPKEKDASDFSQFRPICLLNVEGKIFFSIVSQRLSTYLVTNKYIDTSVQKAGIPGFSGCLEHTSMIWHQIQAAKKEKRDLHVIFLDLANAFGSVPHELLWESFAFFHVPELITTLVKSYFQDLQLCFTTADFSTTWQRLEVGIMAGCTVSPLAFTMAMEVIIRASKWVVGGERTRAGLRLPPIRAYMDVMTTLTTTAACTKRLLGKLQENIKWARMKIKPSKSRSISIVKGVLRDTRFCIGDDPIPTVSEQPVKSLGRWYNASLKDKEQVQQLRQEIVNGLENINQTLLPGKLKLWCLQFGLLPRTMWPLTIYEAPITTVEKMERTITSYAKKWLGVPRCLTNIGLYGKGVLELPLTSLTEEYKCSKVRLQMTLRDSRDKTISAVAPPLVTGRKWTPSDAVQQASSALRHKDIVGQVQQGRGGFGLTTSKPTWRKATTSERRTLVVEEVRRQEEAARSAKAVSLAKQGQWMQWEGVERRKISWKELWEMEASKISFIIRATYDVLPSTKNLHQWYGEDPTCALCPTPATLKHIMVGCKTSLTQGRYTWRHNQVLKSLASALENRRCATNSLPPRASNPLPLRATTFVREGQKTSKHPSTRSEEGNLCRARDWRMLADIDRQLVFPPEIASTNLRPDLVFWSPSQKTAYIIELTVPWENSVEEAYERKKLRYAELAAEATQRGWNTKVYPVEVGCRGFVASSTIRLLKELGIHGQALRKTIRSLSEAAERSSRWIWLKRKDPCWAPSISG

SEQ ID NO: 8921 - protein, 1180 aa, Amblyraja radiata
MIAVPNAVSVSWRHPLNAAKSKLKRIPLEPARAGAEDGSPIDNTVTDPGTETTTDKESMAHETSTTAAGHKLQVCICGWEKITSVKGLKIHQGRKKCLREQRHGPRIDQYFLRSNQSNQSSEAQRQDSNQSSQSISTHVTEEGDTSTEMPVEEPTQQRQRPPLEGKIKGHKPGVKWPKAVEKKEWETVNSDLIHILEQQAGTAVEKLERMGNTIYSYGEERFGVSKGRGGKKLPTPIKSRRQQEIERLIRERRQLKKQWKKATEAEREGLMLLQEDIKSRLATLRKAENLRKLRRKKEHTRTRFYKDPFKFIKDLFAKEKSGTLKTSKRELEEHLEKAHQDTKRHEQLVIPHDIPPIQPPEFNLDTSPPRWKEVENTVRRARAASAPGPNGVPYKLYKNAPDVLRFLWKLMRVVWKKQTIPKAWRRAGGVLIPKEKDASDISQFRPICLLNVEGKIFFSIVSQRLSTYLVTNKYIDTSVQKAGIPGFSGCLEHTSMIWHQIQAAKKEKRDLHVIFLDLANAFGSVPHELLWESFAFFHVPELITTLVKSYFQDLQLCFTTADFSTTWQRLEVGIMAGCTVSPLAFTMAMEVIIRASKWVVGGERTRAGLRLPPIRAYMDDMTTLTTTAACTKRLLGKLQENIKWARMKIKPSKSRSISIVKGVLRDTRFCIGDDPIPTVSEQPVKSLGRWYNASLKDKEQVEQLRQEIVNGLENINQTLLPGKLKLWCLQFGLLPRTMWPLTIYEAPITTVEKMERTITSYAKKWLGVPRCLTNIGLYGKGVLELPLTSLTEEYKCSKVRLQMTLRDSRDKTISAVAPPLVTGRKWTPSDAVQQASSALRYKDIVGQVQQGRGGFGLTTSKPTWRMATTSERRTLVVEEVRRQEEAARSAKAASLAKQGQWMQWEGVERRKIGWKELWEMEASKISFIIRATYDVLPSPKNLHQWYGEDPTCALCPTPATLKHIMVGCKTSLTQGRYTWRHNQVLKSLASALENRRCATNSLPPRASNPLPLRATTFVREGQKTSKHPSTRSEEGNLCRARDWRMLADIGRQLVFPPEIASTNLRPDLVFWSPSQKTAYIIELTVPWENSVEEAYERKKLRYAELAAEATQRGWNTKVYPVEVGCRGFVASSTIRLLKELGIHGQALRKTIRSLSEAAERSSRWIWLKRKDPCWAPSISG

SEQ ID NO: 8922 - protein, 1180 aa, Amblyraja radiata
MIAVPNAVSVSWRHPLNATKSKLKRIPLEPARAGAEDGSPIDNTVTDPGTETTTDKESMAHETSTTAAGHKLQVCICGWEKITSVKGLKIHQGRKKCLREQRHGPRIDQYFLRSNQSNQSSETQRQDSNQSSQSISTHVTEEGDTSTEMPVEEPTQQRQRPPLEGKIKGHKPGVKWPKAVEKKEWETVNSDLIHILEQQAGTAVEKLERMGNTIYSYGEERFGVSKGRGGKKLPTPIKSRRQQQIERLIRERRQLKKQWKKATEAEREGLMLLQEDIKSRLATLRKAENLRKLRRKKEHTRTRFYKDPFKFIKDLFAKEKSGTLKTSKRELEEHLEKAHQDTKRHEQLVIPHDIPPIQPPEFNLDTSPPRWKEVENTVRRARAASAPGPNGVPYKLYKNAPDVLRFLWKLMRVVWKKQTIPKAWRRAGGVLIPKEKDASDISQFRPICLLNVEGKIFFSIVSQRLSTYLVTNKYIDTSVQKAGIPGFSGCLEHTSMIWHQIQAAKKEKRDLHVIFLDLANAFGSVPHELLWESFAFFHVPELITTLVKSYFQDLQLCFTTADFSTTWQRLEVGIMAGCTVSPLAFTMAMEVIIRASKWVVGGERTRAGLRLPPIRAYMDDMTTLTTTAACTKRLLGKLQENIKWARMKIKPCKSRSISIVKGVLRDTRFCIGDDPIPTVSEQPVKSLGRWYNASLKDKEQVEQLRQEIVNGLENINQTLLPGKLKLWCLQFGLLPRTMWPLTIYEAPITTVEKMERTITSYAKKWLGVPRCLTNIGLYGKGVLELPLTSLTEEYKCSKVRLQMTLRDSRDKTISAVAPPLVTGRKWTPSDAVQQASSALRYKDIVGQVQQGRGGFGLTTSKPTWRKATTSERRTLVVEEVRRQEEAARSAKAVSLAKQGQWMQWEGVERRKISWKELWEMEASKISFIIRATYDVLPSPKNLHQWYGEDPTCALCPTPATLKHIMVGCKTSLTQGRYTWRHNQVLKSLASALENRWCATNSLPPRASNHLPLRATTFVREGQKTSKHPSTRSEEGNLCRARDWRMLADIGRQLVFPPEIASTNLRPDLVFWSPSQKTAYIIELTVPWENSVEEAYERKKLRYAELAAEATQRGWNTKVYPVEVGCRGFVASSTIRLLKELGIHGQALRKTIRSLSEAAERSSRWIWLKRKDPCWAPSISG

SEQ ID NO: 8923 - protein, 910 aa, Amblyraja radiata
MLLQEDIKSRLATLRKAENLRKLRRKKEHTRTRFYKDPFKFIKDLFAKEKSGTLKTSKRELEEHLEKAHQDTKRHEQLVIPHDIPPIQPPEFNLDTSPPRWKEVENTVRRARAASAPGPNGVPYKLYKNAPDVLRFLWKLMRVVWKKQTIPKAWRRAGGVLIPKEKDASDISQFRPICLLNVEGKIFFSIVSQRLSTYLVTNKYIDTSVQKAGIPGFSGCLEHTSMIWHQIQAAKKEKRDLHVIFLDLANAFGSVPHELLWESFAFFHVPELITTLVKSYFQDLQLCFTTADFSTTWQRLEVGIMAGCTVSPLAFTMAMEVIIRASKWVVGGERTRAGLRLPPIRAYMDDMTTLTTTAACTKRLLGKLQENIKWARMKIKPSKSRSISIVKGVLRDTRFCIGDDPIPTVSEQPVKSLGRWYNASLKDKEQVEQLRQEIFNGLENINQTLLPGKLKLWCLQFGLLPRTMWPLTIYEAPITTVEKMERTITSYAKKWLGVPRCLTNIGLYGKGVLELPLTSLTEEYKCSKVRLQMTLRDSRDKTISAVAPPLVTGRKWTPSDAVQQASSALRYKDIVGQVQQGRGGFGLTTSKPTWRKATTSERRTLVVEEVRRQEEAARSAKAVSLAKQGQWMQWEGVERRKISWKELWEMEASKISFIIRATYDMLPSPKNLHQWYGEDPTCALCPTPATLKHIMVGCKTSLTQGRYTWRHNQVLKSLASALENRRCATNSLPPRASNPLPLRATTFVQEGQKTSKHPSTRSEEGNLCRARDWRMLADIGRQLVFPPEIASTNLRPDLVFWSPSQKTAYIIELTVPWENSVEEAYERKKLRYAELAAEATQRGWNTKVYPVEVGCRGFVASSTIRLLKELGIHGQALRKTIRSLSEAAERSIRWIWLKRKDPCWAPSISG

SEQ ID NO: 8924 - protein, 1122 aa, Amblyraja radiata
MAHETSTTAAGHKLQVCICGWEKITSVKGLKIHQGRKKCLREQRHGPRIDQYFLRSNQSNQSSEAQRQDSNQSSQSISTHVTEEGDTSTEMPVEEPTQQRQRPPLEGKIKGHKPGVKWPKAVEKKEWETVNSDLIHILEQQAGTAVEKLERMGNTIYSYGEERFGVSKGRGGKKLPTPIKSRRQQEIERLIRERRQLKKQWKKATEAEREGLMLLQEDIKSRLATLRKAENLRKLRRKKEHTRTRFYKDPFKFIKDLFAKEKSGTLKTSKRELEEHLEKAHQDTKRHEQLVNPHDIPPIQPPEFNLDTSPPRWKEVENTVRRARAASAPGPNGVPYKLYKNAPDVLRFLWKLMRVVWKKQTIPKAWRRAGGVLIPKEKDASDISQFRPICLLNVEGKIFFSIVSQRLSTYLVTNKYIDTSVQKAGIPGFSGCLEHTSMIWHQIQAAKKEKRDLHVIFLDLANAFGSVPHELLWESFAFFHVPELITTLVKSYFQDLQLCFTTADFSTTWQRLEVGIMAGCTVSPLAFTMAMEVIIRASKWVVGGERTRAGLRLPPIRAYMDDMTTLTTTAACTKRLLGKLQENIKWARMKIKPSKSRSISIVKGVLRDTRFCIGDDPMPTVSEQPVKSLGRWYNASLKDKEQVQQLRQEIVNGLENINQTLLPGKLKLWCLQFGLLPRTMWPLTIYEAPITTVEKMERTITSYAKKWLGVPRCLTNIGLYGKGVLELPLTSLTEEYKCSKVRLQMTLRDSRDKTISAVAPPLVTGRKWTPSDAVQQASSALRHKDIVGQVQQGRGGFGLTTSKPTWRKATTSERRTLVVEEVRRQEEAARSAKAVSLVKQGQWMQWEGVERRKISWKELWEMEASKISFIIRATYDVLPSPKNLHQWYGEDPTCALCPTPATLKHIMVGCKTSLTQGRYTWRHNQVLKSLASALENRRCATNSLPPRASNPLPLRATTFVREGQKTSKHPSTRSEEGNLCRARDWRMLANIGRQLVFPPEIASTNLRPDLVFWSPSQKTAYIIELTVPWENSVEEAYERKKLRYAELAAEATQRGWNTKVYPVEVGCRGFVASSTIRLLKELGIHGQALRKTIRSLSEAAERSSRWIWLKQKDPCWAPSISG

SEQ ID NO: 8925 - protein, 1175 aa, Amblyraja radiata
MSLLNLNTNTTLVTKSKLKRIPLEPARAGAEDGSPIDNTVTDQGTETTTDKESMAHETSTTAAGHKLQVCICGWEKITSVKGLKIHQGRKKCLREQRHGPRIDQYFLRSNQSNQSSEAQRQDSNQSSQSISTHVTEEGDTSTEMPVEEPTQQRQRPPLEGKIKGHKPGVKWPKAVEKKEWETVNSDLIHILEQQAGTAVEKLERMGNTIYSYGEERFGVSKGRGGKKLPTPIKSRRQQEIERLIRERRQLKKQWKKATEAEREGLMLLQEDIKSRLATLRKAENLRKLRRKKEHTRTRFYKDPFKFIKDLFAKEKSGTLKTSKRELEEHLEKAHQDTKRHEQLVIPHDIPPIQPPEFNLDTSPPRWKEVENTVRRARAASAPGPNGVPYKLYKNAPDVLRFLWKLMRVVWKKQTIPKAWRRAGGVLIPKEKNASDISQFRPICLLNVEGKIFFSIVSQRLSTYLVTNKYIDTSVQKAGIPGFSGCLEHTSMIWHQIQAAKKEKRDLHVIFLDLANAFGSVPHELLWESFAFFHVPELITTLVKSYFQDLQLCFTTADFSTTWQRLEVGIMAGCTVSPLAFTMAMEVIIRASKWVVGGERTRAGLRLPPIRAYMDDMTTLTTTAACTKRLLGKLQENIKWARMKIKPCKSRSISIVKGVLRDTRFCIGDDPIPTVSEQPVKSLGRWYNASLKDKEQVEQLRQEIVNGLENINQTLLPGKLKLWCLQFGLLPRTMWPLTIYEAPITTVEKMERTITSYAKKWLGVPRCLTNIGLYGKGVLELPLTSLTEEYKCSKVRLQMTLRDSRDKTISAVAPPLVTGRKWTPSDALQQASSALRYKDIVGQVQQGRGGFGLTTSKPTWRKATTSERRTLVVEEVRRQEEDARSAKAVSLAKQGQWMQWEGVERRKISWKELWEMEASKISFIIRATYDVLPSPKNLHQWYGEDPTCALCPTPATLKHIMVGCKTSLTQGRYTWRHNQVLKSLASALENRRCATNSLPPRASNPLPLRATTFVREGQKTSKHPSTRSEEGNLCRARDWRMLADIGRQLVFPPEIASTNLRPDLVFWSPSQKTAYIIELTVPWENSVEEAYERKKLHYAELAAEATQRGWNTKVYPVEVGCRGFVASSTIRLLKELGIHGQALRKTIRSLSEAAERSSRWIWLKRKDPCWAPSISG

SEQ ID NO: 8926 - protein, 1180 aa, Amblyraja radiata
MIAVPNAVSVSWRHPLNATKSKLKRIPLEPARAGAEDGSPIDNTVTDQGTETTTDKESMAHETSTTAAGHKLQVCICGWEKITSVKGLKIHQGRKKCLREQRHGPRIDQYFLRSNQSNQSSEAQRQDSNQSSQSISTHVTEEGDTSTEMPVEEPTQQRQRPPLEGKIKGHKPGVKWPKAVEKKEWETVNSDLIHILEQQAGTAVEKLERMGNTIYSYGEERFGVSKGRGGKKLPTPIKSRRQQEIERLIRERRQLKKQWKKATEAEREGLMLLQEDIKSRLATLRKAENLRKLRRKKEHTRTRFYKDPFKFIKDLFAKEKSGTLKTSKRELEEHLEKAHQDTKRHEQLVIPHDIPPIQPPEFNLDTSPPRWKEVENTVRRARAASAPGPNGVPYKLYKNAPDVLRFLWKLMRVVWKKQTIPKAWRRAGGVLIPKEKNASDISQFRPICLLNVEGKIFFSIVSQRLSTYLVTNKYIDTSVQKAGIPGFSGCLEHTSMIWHQIQAAKKEKRDLHVIFLDLANAFGSVPHELLWESFAFFHVPELITTLVKSYFQDLQLCFTTADFSTTWQRLEVGIMAGCTVSPLAFTMAMEVIIRASKWVVGGERTRAGLRLPPIRAYMDDMTTLTTTAACTKRLLGKLQENIKWARMKIKPCKSRSISIVKGVLRDTRFCIGDDPIPTVSEQPVKSLGRWYNASLKDKEQVEQLRQEIVNGLENINQTLLPGKLKLWCLQFGLLPRTMWPLTIYEAPITTVEKMERTITSYAKKWLGVPRCLTNIGLYGKGVLELPLTSLTEEYKCSKVRLQMTLRDSRDKTISAVAPPLVTGRKWTPSDALQQASSALRYKDIVGQVQQGRGGFGLTTSKPTWRKATTSERRTLVVEEVRRQEEAARSAKAVSLAKQGQWMQWEGVERRKISWKELWEMEASKISFIIRATYDVLPSPKNLHQWYGEDPTCALCPTPATLKHIMVGCKTSLTQGRYTWRHNQVLKSLASALENRRCATNSLPPRASNPLPLRATTFVREGQKTSKHPSTRSEEGNLCRARDWRMLADIGRQLVFPPEIASTNLRPDLVFWSPSQKTAYIIELTVPWENSVEEAYERKKLHYAELAAEATQRGWNTKVYPVEVGCRGFVASSTIRLLKELGIHGQALRKTIRSLSEAAERSSRWIWLKRKDPCWAPSISG

SEQ ID NO: 8927 - protein, 964 aa, Amblyraja radiata
MEKNGLGVSKGRGGKKLPTPIKSRRQQEIERLIRERRQLKKQWKKATEAEREGLMLLQEDIKSRLATLRKAENLRKLRRKKEHTRTRFYKDPFKFIKDLFAKEKSGTLKTSKRELEEHLEKAHQDTKRHEQLVIPHDIPPIQPPEFNLDTSPPRWKEVENTVRRARAASAPGPNGVPYKLYKNAPDVLRFLWKLMRVVWKKQTIPKAWRRAGGVLIPKEKDASDISQFRPICLLNVEGKIFFSIVSQRLSTYLVTNKYIDTSVQKAGIPGFSGCLKHTSMIWHQIQAAKKEKRDLHVIFLDLANAFGSVPHELLWESFAFFHVPELITTLVKSYFQDLQLCFTTADFSTTWQRLEVGIMAGCTVSPLAFTMAMEVIIRASKWVVGGERTRAGLRLPPIRAYMDDMTTLTTTAACTKRLLGKLQENIKWARMKIKPSKSRSISIVKGVLRDTRFCIGDDPIPTVSEQPVKSLGRWYNASLKDKEQVEQLRQEIVNGLENINQTLLPGKLKLWCLQFGLLPRTMWPLTIYEAPITTVEKMERTITSYAKKWLGVPRCLTNIGLYGKGVLELPLTSLTEEYKCSKVRLQMTLRDSRDKTISAVAPPLVTGRKWTPSDAVQQASSALRYKDIVGQVQQGRGGFGLTTSKPTWRKATTSERRTLVVEEVRRQEEAARSAKAVSLAKQGQWMQWEGVERRKISWKELWEMEASKISFIIRATYDVLPSPKNLHQWYGEDPTCALCPTPATLKHIMVGCKTSLTQGRYTWRHNQVLKSLASALENRRCATNSLPPRASNPLPLRATTFVREGQKTSKQPSTRSEEGNLCRARDWRMLADIGRQLVFPPEIASTNLRPDLVFWSPSQKTAYIIELTVPWENSVEEAYERKKLRYAELAAEATQRGWNTKVYPVEVGCRGFVASSTIRLLKELGIHGQALRKTIRSLSEAAERSSRWIWLKRKDPCWAPSISG

SEQ ID NO: 8928 - protein, 1180 aa, Amblyraja radiata
MIAVPNAVSVSWRHPLNATKSKLKRIPLEPARAGAEDGSPIDNTVTDQGTETTTDKESMAHETSTTAAGHKLQVCICGWEKITSVKGLKIHQGRKKCLREQRHGPRIDQYFLRSNQSNQSSEAQRQDSNQSSQSISTHVTEEGDTSTEMPVEEPTQQRQRPPLEGKIKGHKPGVKWPKAVEKKEWETVNSDLIHILEQQAGTAVEKLERMGNTIYSYGEERFGVSKGRGGKKLPTPIKSRRQQEIERLIRERRQLKKQWKKATEAEREGLMLLQEDIKSRLATLRKAENLRKLRRKKEHTRTRFYKDPFKFIKDLFAKEKSGTLKTSKRELEEHLEKAHQDTKRHEQLVIPHDIPPIQPPEFNLDTSPPRWKEVENTVRRARAASAPGPNGVPYKLYKNAPDVLRFLWKLMRVVWKKQTIPKAWRRAGGVLIPKEKNASDISQFRPICLLNVEGKIFFSIVSQRLSTYLVTNKYIDTSVQKAGIPGFSGCLEHTSMIWHQIQAAKKEKRDLHVIFLDLANAFGSVPHELLWESFAFFHVPELITTLVKSYFQDLQLCFTTADFSTTWQRLEVGIMAGCTVSPLAFTMAMEVIIRASKWVVGGERTRAGLRLPPIRAYMDDMTTLTTTAACTKRLLGKLQENIKWARMKIKPCKSQSISIVKGVLRDTRFCIGDDPIPTVSEQPVKSLGRWYNASLKDKEQVEQLRQEIVNGLENINQTLLPGKLKLWCLQFGLLPRTMWPLTIYEAPITTVEKMERTITSYAKKWLGVPRCLTNIGLYGKGVLELPLTSLTEEYKCSKVRLQMTLRDSRDKTISAVAPPLVTGRKWTPSDALQQASSALRYKDIVGQVQQGRGGFGLTTSKPTWRKATTSERRTLVVEEVRRQEEAARSAKAVSLAKQGQWMQWEGVERRKISWKELWEMEASKISFIIRATYDVLPSPKNLHQWYGEDPTCALCPTPATLKHIMVGCKTSLTQGRYTWRHNQVLKSLASALENRRCATNSLPPRASNPLPLRATTFVREGQKTSKHPSTRSEEGNLCRARDWRMLADIGRQLVFPPEIASTNLRPDLVFWSPSQKTAYIIELTVPWENSVEEAYERKKLHYAELAAEATQRGWNTKVYPVEVGCRGFVASSTIRLLKELGIHGQALRKTIRSLSEAAERSSRWIWLKRKDPCWAPSISG

SEQ ID NO: 8929 - protein, 1180 aa, Amblyraja radiata
MTAVPNAVSVSWRHPLNATKSKLKRIPLEPVRAGAEGGSPIDNTVTDPGTETTTDKESMAHETSTTAAGHKFQVCICGWEKITSVKGLKIHQGRKKCLREQRHGPRIDQYFLRSNQSNQSSEAQRQDSNQSSQSISTHVTEEGDTSTEMPVEEPTQQRQRPPLEGKIKGHKPGVKWPKAVEKKEWETVNSDLIHILEQQAGTAVEKLERMGNTIYSYGEERFGVSKGRGGKKLPTPIKSRRQQEIERLIRERRQLKKQWKKATEAEREGLMLLQEDIKSRLATLRKAENLRKLRRKKEHTRTRFYKDPFKFIKDLFAKEKSGTLKTSKRELEEHLEKAHQDTKRHEQLVIQHDIPPIQPPEFNLDTSPPRWKEVENTVRRARAASAPGPNGVPCKLYKNAPDVLRFLWKLMRVVWKKQTIPKAWRRAGGVLMPKEKDASDISQFRPICLLNVEGKIFFSIVSQRLSTYLVTNKYIDTSVQKAGIPGFSGCLEHTSMIWHQIQAAKKEKRDLHVIFLDLANAFGSVPHELLWESFAFFHVPELITTLVKSYFQDLQLCFTTADFSTTWQRLEVGIMAGCTVSPLAFTMAMEVIIRASKWVVGGERTRAGLRLPPIRAYMDDMTTLTTTAACTKRLLGKLQENIKWARMKIKPSKSRSSSIVKGVLRDTRFCIGDDPIPTVSEQPVKSLGRWYNASLKDKEQVEQIRQEIVNGLENIYQTLLPGKLKLWCLQFGLLPRTMWPLTIYEAPITTVEKMERTITSYAKKWLGVPRCLTNIGLYGKGVLELPLTSLTEEYKCSKVRLQMTLRDSRDKTISAVAPPLVTGRKWTPSDAVQQASSALRHKDIVGQVQQGRGGFGLTTSKPTWRKATTSERRTLVVEEVRRQEEAARSAKAVSLAKQGQWMQWEGVERRKISWKELWEMEASKISFIISATYDVLPSPKNLHQWYGEDPTCALCPTPATLKHLMVGCKTSLTQGRYMWRHNQVLKSLASALENRRCATNSLPPRASNPLPLRATTFVREGQKTSKHPSTRSEEGNLCRARDWRMLADIGRQLVFPPEIASTNLRPDLVFWSPSQNTAYIIELTVPWENSVEEAYERKKLRYAELAAEATQRGWNTKVYPVEVGCRGFVASSTIRLLKELGIHGQALRKTIRSLSEAAERSSRWIWLKRKDPCWALSISG

SEQ ID NO: 8930 - protein, 1122 aa, Amblyraja radiata
MAHETSTTAAGHKLQVCICGWEKITSVKGLKIHQGRKKCLREQRHGPRIDQYFLRSNQSNQSSEAQRQDSNQSSQSISTHVTEEGDTSTEMPVEEPTQQRQRPPLEGKIKGHKPGVKWPKAVEKKEWETVNSDLIHILEQQAGTAVEKLERMGNTIYSYGEERFGVSKGRGGKKLPTPIKSRRQQEIERLIRERRQLKKQWKKATEAEREGLMLLQEDIKSRLATLRKAENLRKLRRKKEHTRTRFYKDPFKFIKDLFAKEKSGTLKTSKRELEEHLEKAHQDTKRHEQLVIPHDIPPIQPPEFNLDTSPPRWKEVENTVRRARAASAPGPNGVPYKLYKNAPDVLRFLWKLMRVVWKKQTIPKAWRRAGGVLIPKEKDASDISQFRPICLLNVEGKIFFSIVSQRLSTYLVTNKYIDTSVQKAGIPGFSGCLEHTSMIWHQIQAAKKEKRDLHVIFLDLANAFGSVPHELLWESFAFFHVPELITTLVKSYFQDLQLCFTTADFSTTWQRLEVGIMAGCTVSPLAFTMAMEVIIRASKWVVGGERTRAGLRLPPIRAYMDDMTTLTTTAACTKRLLGKLQENIKWARMKIKPCKSRSISIVKGVLRDTRFCIGDDPIPTVSEQPVKSLGRWYNASLKDKEQVEQLRQEIVNGLENINQTLLPGKLKLWCLQFGLLPRTMWPLTIYEAPITTVEKMERTITSYAKKWLGVPRCLTNIGLYGKGVLELPLTSLTEEYKCSKVRLQMTLRDSRDKTISAVAPPLVTGRKWTPSDALQQASSALRYKDIVGQVQQGRGGFGLTTSKPTWRKATTSERRTLVVEEVRRQEEAARSAKAVSLAKQGQWMQWEGVERRKISWKELWEMEASKISFIIRATYDVLPSPKNLHQWYGEDPTCALCPTPATLKHIMVGCKTSLTQGRYTWRHNQVLKSLASALENRRCATNSLPPRASNPLPLRATTFVREGQKTSKHPSTRSEEGNLCRARDWRMLADIGRQLVFPPEIASTNLRPDLVFWSPSQKTAYIIELTVPWENSVEEAYERKKLHYAELAAEATQRGWNTKVYPVEVGCRGFVASSTIRLLKELGIHGQALRKTIRSLSEAAERSSRWIWLKRKDPCWAPSISG

SEQ ID NO: 8931 - protein, 1180 aa, Amblyraja radiata
MIAVPNAVSVSWRHPLNATKSKLKRIPLEPARAGAEDGSPIDNTVTDPGTETTTDKESMAHETSTTAAGHKLQVCICGWEKITSVKGLKIHQGRKKCLREQRHGPRIDQYFLRSNQSNQSSEAQRQDSNQSSQSISTHVTEEGDTSTEMPVEEPTQQRQRPPLEGKIKGHKPGVKWPKAVEKKEWETVNSDLIHILEQQAGTAVEKLERMGNTIYSYGEERFGVSKGRGGKKLPTPIKSRRQQQIERLIRERRQLKKQWKKATEAEREGLMLLQEDIKSRLATLRKAENLRKLRRKKEHTRTRFYKDPFKFIKDLFAKEKSGTLKTSKRELEEHLEKAHQDTKRHEQLVIPHDIPPIQPPEFNLDTSPPRWKEVENTVRRARAASAPGPNGVPYKLHKNAPDVLRFLWKLMRVVWKKQTIPKAWRRAGGVLIPKEKDASDISQFRPICLLNVEGKIFFSIVSQRLSTYLVTNKYIDTSVQKAGIPGFSGCLEHTSMIWHQIQAAKKEKRDLHVIFLDLANAFGSVPHELLWESFAFFHVPELITTPVKSYFQDLQLCFTTADFSTTWQRLEVGIMAGCTVSPLAFTMAMEVIIRASKWVVGGERTRAGLRLPPIRAYMDDMTTLTTTAACTKRLLGKLQENIKWARMKIKPSKSRSISIVKGVLRDTRFCIGDDPIPTVSEQPVKSLGRWYNASLKDKEQVEQLRQEIVNGLENINQTLLPGKLKLWCLQFGLLPRTMWPLTIYEAPITTVEKMERTITSYAKKWLGVPRCLTNIGLYGKGVLELPLTSLTEEYKCSKVRLQMTLRDSRDKTISAVAPPLVTGRKWTPSDAVQQASSALRYKDIVGQVQQGRGGFGLTTSKPTWRKATTSERRTLVVEEVRRQEEAARSAKAVSLAKQGQWMQWEGVERRKISWKELWEMEASKISFIIRATYDVLPSPKNLHQWYGEDPTCALCPTPATLKHIMVGCKTSLTQGRYTWRHNQVLKSLASALENRRCATNSLPPRASNPLPLRATTFVREGQKTSKHPSTRSEEGNLCRARDWRMLADIGRQLVFPPEIASTNLRPDLVFWSPSQKTAYIIELTVPWENSVEEAYERKKLRYAELAAEATQRGWNTKVYPVEVGCRGFVASSTIRLLKELGIHGQALQKTIRSLSEAAERSSRWIWLKRKDPCWAPSISG

SEQ ID NO: 8932 - protein, 1180 aa, Amblyraja radiata
MIAVPNAVSVSWRHPLNATKSKLKRIPLEPARAGAEDGSPIDNTVTDPGTETTTDKESMAHETSTTAAGHKLQVCICGWEKITSVKGLKIHQGRKKCLREQRHGPRIDQYFLRSNQSNQSSEAQRQDSNQSSQSISTHVTEEGDTSTEMPVEEPTQQRQRPPLEGKIKGHKPGVKWPKAVEKKEWETVNSDLIHILEQQAGTAVEKLERMGNTIYSYGEERFGVSKGRGGKKLPTPIKSRRQQEIERLIRERRQLKKQWKKATEAEREGLMLLQEDIKSRLATLRKAENLRKLRRKKEHTRTRFYKDPFKFIKDLFAKEKSGTLKTSKRELEEHLEKAHQDTKRHEQLVIPHDIPPIQPPEFNLDTSPPRWKEVENTVRRARAASAPGPNGVPYKLYKNAPDVLRFLWKLMRVVWKKQTIPKAWRRAGGVLIPKEKDASDISQFRPICLLNVEGKIFFSIVSQRLSTYLVTNKYIDTSVQKAGIPGFSGCLEHTSMIWHQIQAAKKEKRDLHVIFLDLANAFGSVPHELLWESFAFFHVPELITTLVKSYFQDLQLCFTTADFSTTWQRLEVGIMAGCTVSPLAFTMAMEVIIRASKWVVGGERTRAGLRLPPIRAYMDDMTTLTTTAACTKRLLGKLQENIKWARMKIKPSKSRSISIVKGVLRDTRFCIGDDPIPTVSEQPVKSLGRWYNASLKDKEQVEQLRQEIVNGLENINQTLLPGKLKLWCLQFGLLPRTMWPLTIYEAPITTVEKMERTITSYAKKWLGVPRCLTNIGLYGKGVLELPLTSLTEEYKCSKVRLQMTLRDSRDKTISAVAPPLVTGRKWTPSDAVQQASSALRYKDIVGQVQQGRGGFGLTTSKPTWRKATTSERRTLVVEEVRRQEEAARSAKAVSLAKQGQWMQWEGVERRKISWKELWEMEASKISFIIRATYDVLPSPKNLHQWYGEDPTCALCPTPATLKHIMVGCKTSLTQGRYTWRHNQVLKSLASALENRRCATNSLPPRASNPLPLRATTFVREGQKTSKHPSTRSEEGNLCRARDWRMLADIGRQLVFPPEIASTNLRPDLVFWSPSQKTAYIIELTVPWENSVEEAYERKKLRYAELAAEATQRGWNTKVYPVEVGCRGFVASSTIRLLKELGIHGQALRKTIRSLSEAAERSSRWIWLKRKDPCWAPSISG

SEQ ID NO: 8933 - protein, 971 aa, Amblyraja radiata
MGNTIYSYGEERFGVSKGRGGKKLPTPIKSRRQQEIERLIRERRQLKKQWKKATEAEREGLMLLQEDIKSRLATLQKAENLRKLRKKKEHTRTRFYKDPFKFIKDLFAKEKSGTLKTSKRELEEHLEKAHQDTKRHEQLVIPHDIPPIQPPEFNLDTSPPRWKEVENTVRRARAASAPGPNGVPYKLYKNAPDVLRFLWKLMRVVWKKQAIPKAWRRACGVLIPKEKDASDISQFRPICLLNVEGKIFFSIVSQRLSTYLVTNKYIDTSVQKAGIPGFSGCLEHTSMIWHQIQAAKKEKRDLHVIFLDLANAFGSVPHELLWESFAFFHVPELITTLVKSYFQDLQLCFTTADFSTTWQRLEVGIMAGCTVSPLAFTMAMEVIIRASKWVVGGERTRAGLRLPPIRAYMDDMTTLTTTAACTKRLLGKLQENIKWARMKIKPSKSRSISIVKGVLRDTRFCIGDDPIPTVSEQPVKSLGRWYNASLKDKEQVQQLRQEIVNGLENINQTLLPGKLKLWCLQFGLLPRTMWPLTIYEAPITTVEKMERTITSYAKKWLGVPRCLTNIGLYGKGVLELPLTSLTEEYKCSKVRLQMTLRDSRDKTISAVAPPLVTGRKWTPSDAVQQASSALRHKDIVGQVQQGRGGFGLTTSKPTWRKATTSERRTLVVEEVRRQEEAARSAKAVSLAKQRQWMQWEGVERRKISWKELWEMEASKISFIIRATYDVLPSPKNLHQWYGEDPTCALCPTPATLKHIMVGCKTSLTQGRYTWRHNQVLKSLASALENRRCATNSLPPRASNPLPLRATTFVREGQKTSKHPSTRSEEGNLCRARDWRMLADIGRQLVFPPEIASTNLRPDLVFWSPSQKTAYIIELTVPWENSVEEAYERKKLRYAELAAEATQRGWNTKVYPVEVGCRGFVASSTIRLLKELGIHGQALRKTIRSLSEAAERSSRWIWLKRKDPCWAPSISG

SEQ ID NO: 8934 - protein, 995 aa, Amblyraja radiata
MRCCSSNFRCCSLWQWRRPRTERSDCSSIYSYGEERFGVSKGRGGKKLPTPIKSRRQQEIERLIRERRQLKKQWKKATEAEREGLMLLQEDIKSRLATLRKAENLRKLRRKKEHTRTRFYKDPFKFIKDLFAKEKSGTLKTSKRELEEHLEKAHQDTKRHEQLVIPHDIPPIQPPEFNLDTSPPRWKEVENTVRRARAASAPGPNGVPYKLYKNAPDVLRFLWKLMRVVWKKQTIPKAWRRAGGVLIPKEKDASDISQFRPICLLNVEGKIFFSIVSQRLSTYLVTNKYIDTSVQKAGIPGFSGCLEHTSMIWHQIQAAKKEKRDLHVIFLDLANAFGSVPHELLWESFAFFHVPELITTLVKSYFQDLQLCFTTADFSTTWQRLEVGIMAGCTVSPLAFTMAMEVIIRASKWVVGGERTRAGLRLPPIRAYMDDMTTLTTTAACTKRLLGKLQENIKWARMKIKPCKSRSISIVKGVLRDTRFCIGDDPIPTVSEQPVKSLGRWYNASLKDKEQVEQLRQEIVNGLENINQTLLPGKLKLWCLQFGLLPRTMWPLTIYEAPITTVEKMERTVTSYAKKWLGVPRCLTNIGLYGKGVLELPLTSLTEEYKCSKVRLQMTLRDSRDKTISAVAPPLVTGRKWTPSDAVQQASSALRYKDIVGQVQQGRGGFGLTTSKPTWRKATTSERRTLVVEEVRRQEEAARSAKAVSLAKQGQWMQWEGVERRKISWKELWEMEASKISFIIRATYDVLPSPKNLHQWYGEDPTCALCPTPATLKHIMVGCKTSLTQGRYTWRHNQVLKSLASALENRRCATNSLPPRASNPLPLRATTFVREGQKTSKHPSTRSEEGNLCRARDWRMLADIGRQLVFPPEIASTNLRPDLVFWSPSQKTAYIIELTVPWENSVEEAYERKKLRYAELAAEATQRGWNTKVYPVEVGCRGFVASSTIRLLKELGIHGQALRKTIRSLSEAAERSSRWIWLKRKDPCWAPSISG

SEQ ID NO: 8935 - protein, 1180 aa, Amblyraja radiata
MIAVPNAVSVSWRHPLNATKSKLKRIPLEPARAGAEDGSPIDNTVTDQGTETTTDKESMAHETSTTAAGHKLQVCICGWEKITSVKGLKIHQGRKKCLREQRHGPRIDQYFLRSNQSNQSSEAQRQDSNQSSQSISTHVTEEGDTSTEMPVEEPTQQRQRPPLEGKIKGHKPGVKWPKAVEKKEWETVNSDLIHILEQQAGTAVEKLERMGNTIYSYGEERFGVSKGRGGKKLPTPIKSRRQQEIERLIRERRQLKKQWKKATEAEREGLMLLQEDIKSRLATLRKAENLRKLRRKKEHTRTRFYKDPFKFIKDLFAKEKSGTLKTSKRELEEHLEKAHQDTKRHEQLVIPHDIPPIQPPEFNLDTSPPRWKEVENTVRRARAASAPGPNGVPYKLYKNAPDVLRFLWKLMRVVWKKQTIPKAWRRAGGVLIPKEKDASDISQFRPICLLNVEGKIFFSIVSQRLSTYLVTNKYIDTSVQKAGIPGFSGCLEHTSMIWHQIQAAKKEKRDLHVIFLDLANAFGSVPHELLWESFAFFHVPELITTLVKSYFQDLQLCFTTADFSTTWQRLEVGIMAGCTVSPLAFTMAMEVIIRASKWVVGGERTRAGLRLPPIRAYMDDMTTLTTTAACTKRLLGKLQENIKWARMKIKPCKSRSISIVKGVLRDTRFCIGDDPIPTVSEQPVKSLGRWYNASLKDKEQVEQLRQEIVNGLENINQTLLPGKLKLWCLQFGLLPRTMWPLTIYEAPITTVEKMERTITSYAKKWLGVPRCLTNIGLYGKGVLELPLTSLTEEYKCSKVRLQMTLRDSRDKTISAVAPPLVTGRKWTPSDALQQASSALRYKDIVGQVQQGRGGFGLTTSKPTWRKATTSERRTLVVEEVRRQEEAARSAKAVSLAKQGQWMQWEGVERRKISWKELWEMEASKISFIIRATYDVLPSPKNLHQWYGEDPTCALCPTPATLKHIMVGCKTSLTQGRYTWRHNQVLKSLASALENRRCATNSLPPRASNPLPLRATTFVREGQKTSKHPSTRSEEGNLCRARDWRMLADIGRQLVFPPEIASTNLRPDLVFWSPSQKTAYIIELTVPWENSVEEAYERKKLHYAELAAEATQRGWNTKVYPVEVGCRGFVASSTIRLLKELGIHGQALRKTIRSLSEAAERSSRWIWLKRKDPCWAPSISG

SEQ ID NO: 8936 - protein, 1180 aa, Amblyraja radiata
MIAVPNAVSVSWRHPLNATKSKLKRIPLEPARAGAEDGSPIDNTVTDQGTETTTDKESMAHETSTTAAGHKLQVCICGWEKITSVKGLKIHQGRKKCLREQRHGPRIDQYFLRSNQSNQSSEAQRQDSNQSSQSISTHVTEEGDTSTEMPVEEPTQQRQRPPLEGKIKGHKPGVKWPKAVEKKEWETVNSDLIHILEQQAGTAVEKLERMGNTIYSYGEERFGVSKGRGGKKLPTPIKSRRQQEIERLIRERRQLKKQWKKATEAEREGLMLLQEDIKSRLATLRKAENLRKLRRKKEHTRTRFYKDPFKFIKDLFAKEKSGTLKTSKRELEEHLEKAHQDTKRHEQLVIPHDIPPIQPPEFNLDTSPPRWKEVENTVRRARAASAPGPNGVPYKLYKNAPDVLRFLWKLMRVVWKKQTIPKAWRRAGGVLIPKEKNASDISQFRPICLLNVEGKIFFSIVSQRLSTYLVTNKYIDTSVQKAGIPGFSGCLEHTSMIWHQIQAAKKEKRDLHVIFLDLANAFGSVPHELLWESFAFFHVPELITTLVKSYFQDLQLCFTTADFSTTWQRLEVGIMAGCTVSPLAFTMAMEVIIRASKWVVGGERTRAGLRLPPIRAYMDDMTTLTTTAACTKRLLGKLQENIKWARMKIKPSKSRSISIVKGVLRDTRFCIGDDPIPTVSEQPVKSLGRWYNASLKDKEQVEQLRQEIVNGLENINQTLLPGKLKLWCLQFGLLPRTMWPLTIYEAPITTVEKMERTITSYAKKWLGVPRCLTNIGLYGKGVLELPLTSLTEEYKCSKVRLQMTLRDSRDKTISAVAPPLVTGRKWTPSDALQQASSALRYKDIVGQVQQGRGGFGLTTSKPTWRKATTSERRTLVVEEVRRQEEAARSAKAVSLAKQGQWMQWEGVERRKISWKGLWEMEASKISFIIRATYDVLPSPKNLHQWYGEDPTCALCPTPATLKHIMVGCKTSLTQGRYTWRHNQVLKSLASALENRRCATNSLPPRASNPLPLRATTFVREGQKTSKHPSTRSEEGNLCRARDWRMLADIGRQLVFPPEIASTNLRPDLVFWSPSQKTAYIIELTVPWENSVEEAYERKKLHYAELAAEATQRGWNTKVYPVEVGCRGFVASSTIRLLKELGIHGQALRKTIRSLSEAAERSSRWIWLKRKDPCWAPSISG

SEQ ID NO: 8937 - protein, 1180 aa, Amblyraja radiata
MIAVPNAVSVSWRHPLNATKSKLKRIPLEPARAGAEDGSPIDNTVTDPGTEMTTDKESMAHETSTTAARHKLQVCICGWEKITSVKGLKIHQGRKKCLREQRHGPRIDQYFLRSNQSNQSSEAQRQDSNQSSQSISTHVTEEGDTSTEMPVEEPTQQRQRPPLEGKIKGHKPGVKWPKAVEKKEWETVNSDLIHILEQQAGTAVEKLERMGNTIYSYGEERFGVSKGRGGKKLPTPIKSRRQQEIERLIRERRQLKKQWKKATEAEREGLMLLQEDIKSRLATLRKAENLRKLRRKKEHTRTRFYKDPFKFIKDLFAKEKSGTLKTSKRELEEHLEKAHQDTKRHEQLVIPHDIPPIQPPEFNLDTSPPRWKEVENTVRRARAASAPGPNGVPYKLYKNAPDVLRFLWKLMRVVWKKQTIPKAWRRAGGVLIPKEKDASDISQFRPICLLNVEGKIFFSIVSQRLSTYLVTNKYIDTSVQKAGIPGFSGCLEHTSMIWHQIQAAKKEKRDLHVIFLDLANAFGSVPHELLWESFAFFHVPELITTLVKSYFQDLQLCFTTADFSTTWQRLEVGIMAGCTVSPLAFTMAMEVIIRASKWVVGGERTRAGLRLPPIRAYMDDMTTLTTTAACTKRLLGKLQENIKWARMKIKPSKSRSISIVKGVLRDTRFCIGDDPIPTVSEQPVKSLGRWYNASLKDKEQVEQLRQEIVNGLENINQTLLPGKLKLWCLQFGLLPRTMWPLTIYEAPITTVEKMERTITSYAKKWLGVPRCLTNIGLYGKGVLELPLTSLTEEYKCSKVRLQMTLSDSRDKTISAVAPPLVTGRKWTPSDAVQQASSALRYKDIVGQVQQGRGGFGLTTSKPTWRKATTSERRTLVVEEVRRQEEAARSAKAVSLAKQGQWMQWEGVERRKISWKELWEMEASKISFIIRATYDVLPSPKNLHQWYGEDPTCALCPTPATLKHIMVGCKTSLTQGRYTWRHNQVLKSLASALENRRCATNSLPPRASNPLPLRATTFVREGQKTSKHPSTRSEEGNLCRARDWRMLADIGRQLVFPPEIASTNLRPDLVFWSPSQKTAYIIELTVPWENSVEEAYERKKLRYAELAAEATQRGWNTKVYPVEVGCRGFVASSTIRLLKELGIHGQALRKTIRSLSEAAERSSRWIWLKRKDPCWAPSISG

SEQ ID NO: 8938 - protein, 1180 aa, Amblyraja radiata
MTAVPNAVSVSWRHPLNATKSKLKRIPLEPARAGAEDGSPIDNTVTDQGTETTTDKESMAHETSTTAAGHKLQVCICGWEKITSVKGLKIHQGRKKCLREQRHGPRIDQYFLRSNQSNQSSEAQRQDSNQSSQSISTHVTEEGDTSTEMPVEEPTQQRQRPPLEGKIKGHKPGVKWPKAVEKKEWETVNSDLIHILEQQAGTAVEKLERMGNTIYSYGEERFGVSKGRGGKKLPTPIKSRRQQEIERLIRERRQLKKQWKKATEAEREGLMLLQEDIKSRLATLRKAENLRKLRRKKEHTRTRFYKDPFKFIKDLFAKEKSGTLKTSKRELEEHLEKAHQDTKRHEQLVIPHDIPPIQPPEFNLDTSPPRWKEVENTVRRARAASAPGPNGVPYKLYKNAPDVLRFLWKLMRVVWKKQTIPKAWRRAGGVLIPKEKDASDISQFRPICLLNVEGKIFFSIVSQRLSTYLVTNKYIDTSVQKAGIPGFSGCLEHTSMIWHQIQAAKKEKRDLHVIFLDLANAFGSVPHELLWESFAFFHVPELITTLVKSYFQDLQLCFTTADFSTTWQRLEVGIMAGCTVSPLAFTMAMEVIIRASKWVVGGERTRAGLRLPPIRAYMDDMTTLTTTAACTKRLLGKLQENIKWARMKIKPCKSRSISIVKGVLRDTRFCIGDDPIPTVSEQPVKSLGRWYNASLKDKEQVEQLRQEIVNGLENINQTLLPGKLKLWCLQFGLLPRTMWPLTIYEAPITTVEKMERTITSYAKKWLGVPRCLTNIGLYGKGVLELPLTSLTEEYKCSKVRLQMTLRDSRDKTISAVAPPLVTGRKWTPSDALQQASSALRYKDIVGQVQQGRGGFGLTTSKPTWRKATTSERRTLVVEEVRRQEEAARSAKAVSLAKQGQWMQWEGVERRKISWKELWEMEASKISFIIRATYDVLPSPKNLHQWYGEDPTCALCPTPATLKHIMVGCKTSLTQGRYTWRHNQVLKSLASALENRRCATNSLPPRASNPLPLRATTFVREGQKTSKHPSTRSEEGNLCRARDWRMLADIGRQLVFPPEIASTNLRPDLVFWSPSQKTAYIIELTVPWENSVEEAYERKKLHYAELAAEATQRGWNTKVYPVEVGCRGFVASSTIRLLKELGIHGQALRKTIRSLSEAAERSSRWIWLKRKDPCWAPSISG

SEQ ID NO: 8939 - protein, 971 aa, Amblyraja radiata
MGNTIYSYGEERFGVSKGRGGKKLPTPIKSRRQQEIERLIRERRQLKKQWKKATEAEREGLMLLQEDIKSRLATLRKAENLRKLRRKKEHTRTRFYKDPFKFIKDLFAKEKSGTLKTSKRELEGHLEKAHQDTKRHEQLVIPHDIPPIQPPEFNLDTSPPRWKEVENTVRRARAASAPGPNGVPYKLYKNAPDVLRFLWKLMRVVWKKQTIPKAWRRAGGVLIPKEKDASDISQFRPICLLNVEGKIFFSIVSQRLSTYLVTNKYIDTSVQKAGIPGFSGCLEHTSMIWHQIQAAKKEKRDLHVIFLDLANALGSVPHELLWESFAFFHVPELITTLVKSYFQDLQLCFTTADFSTTWQRLEVGIMAGCTVSPLAFTMAMEVIIRASKWVVGGERTRAGLRLPPIRAYMDDMTTLTTTAACTKRLLGKLQENIKWARMKIKPCKSRSISIVKGVLRDTRFCIGDDPIPTVSEQPVKSLGRWYNASLKDKEQVEQLRQEIVNGLENINQTLLPGKLKLWCLQFGLLPRTMWPLTIYEAPITTVEKMERTITSYAKKWLGVPRCLTNIGLYGKGVLELPLTSLTEEYKCSKVRLQMTLRDSRDKTISAVAPPLVTGRKWTPSDAVQQASSALRYKDIVGQVQQGRGGFGLTTSKPTWRKATTSERRTLVVEEVRRQEEAARSAKAVSLAKQGQWMQWEGVERRKISWKELWEMEASKISFIIRATYDVLPSPKNLHQWYGEDPTCALCPTPATLKHIMVGCKTSLTQGRYTWRHNQVLKSLASALENRRCATNSLPPRASNPLPLRATTFVREGQKTSKHPSTRSEEGNLCRARDWRMLADIGRQLVFPPEIASTNLRPDLVFWSPSQKTAYIIELTVPWENSVEEAYERKKLRYAELAAEATQRGWNTKVYPVEVGCRGFVASSTIRLLKELGIHGQALRKTIRSLSEAAERSSRWIWLKRKDPCWAPSISG

SEQ ID NO: 8940 - protein, 1180 aa, Amblyraja radiata
MIAVPNAVSVSWRHPLNATKSKLKRIPLEPARAGVEDGSPIDNTVTDPGTETTTDKESMAHETSTTAAGHKLQVCICGWEKITSVKGLKIHQGRKKCLREQRHGPRIDQYFLRSNQSNQSSEAQRQDSNQSSQSISTHVTEEGDTSTEMPVEEPTQQRQRPPLEGKIKGHKPGVKWPKAVEKKEWETVNSDLIHILEQQAGTAVEKLERMGNTIYSYGEERFGVSKGRGGKKLPTPIKSRRQQEIERLIRARRQLKKQWKKATEAEREGLMLLQEDIKSRLATLRKAENLRKLRRKKEHTRTRFYKDPFKFIKDLFAKEKSGTLKTSKRELEEHLEKAHQDTKRHEQLVIPHDIPPIQPPEFNLDTSPPRWKEVENTVRRARAASAPGPNGVPYKLYKNAPDVLRFLWKLMRVVWKKQTIPKAWRRAGGVLIPKEKDASDISQFRPICLLNVEGKIFFSIVSQRLSTYLVTNKYIDTSVQKAGIPGFSGCLEHTSMIWHQIQAAKKDKRDLHVIFLDLANAFGSVPHELLWESFAFFHVPELITTLVKSYFQDLQLCFTTADFSTTWQRLEVGIMAGCTVSPLAFTMAMEVIIRASKWVVGGERTRAGLRLPPIRAYMDDMITLTTTAACTKRLLGKLQENIKWARMKIKPCKSRSISIVKGVLRDTRFCIGDDPIPTVSEQPVKSLGRWYNASLKDKEQVEQLRQEIVNGLENINQTLLPGKLKLWCLLFGLLPRTMWPLTIYEAPITTVEKMERTITSYAKKWLGVPRCLTNIGLYGKGVLELPLTSLTEEYKCSKVRLQMTLRDSRDKTISAVAPPLVTGRKWTPSDAVQQASSALRYKDIVGQVQQGRGGFGLTTSKPTWRKATTSERRTLVVEEVRRQEEAARSAKAVSLAKQGQWMQWEGVERRKISWKELWEMEASKISFIIRATYDVLPSPKNLHQWYGEDPTCALCPTPATLKHIMVGCKTSLTQGRYTWRHNQVLKSLASALENRRCATNSLPPRASNPLPLRATTFVREGQKTSKHPSTRSEEGNLCRARDWRMLADIGRQLVFPPEIASTNLRPDLVFWSPSQKTAYIIELTVPWENSVEEAYERKKLRYAELAAEATQRGWNTKVYPVEVGCRGFVASSTIRLLKELGIHGQALRKTIRSLSEAAERNSRWIWLKRKDPCWAPSISG

SEQ ID NO: 8941 - protein, 1032 aa, Amblyraja radiata
MPVEEPTQQRQRPPLEGKIKGHKPGVKWPKAVEKKEWETVNSDLIHILEQQAGTAVEKLERMGNTIYSYGEERFGVSKGRGGKKLPTPIKSRRQQEIERLIRERRQLKKQWKKATEAEREGLMLLQEDIKSRLATLRKAENLRKLRRKKEHTRTRFYKDPFKFIKDLFAKEKSGTLKTSKRELEEHLEKAHQDTKRHEQLVIPHDIPPIQPPEFNLDTSPPRWKEVENTVRRARAASAPGPNGVPYKLYKNAPDVLRFLWKLMRVVWKKQTIPKAWRRAGGVLIPKEKDASDISQFRPICLLNVEGKIFFSIVSQRLSTYLVTNKYIDTSVQKAGIPGFSGCLEHTSMIWHQIQAAKKEKRDLHVIFLDLANAFGSVPHELLWESFAFFHVPELITTLVKSYFQDLQLCFTTADFSTTWQRLEVGIMAGCTVSPLAFTMAMEVIIRASKWVVGGERTRAGLRLPPIRAYMDDMTTLTTTAACTKRLLGKLQENIKWARMKIKPCKSRSISIVKGVLRDTRFCIGDDPIPTVSEQPVKSLGRWYNASLKDKEQVEQLRQEIVNGLENINQTLLPGKLKLWCLQFGLLPRTMWPLTIYEAPITTVEKMERTITSYAKKWLGVPRCLTNIGLYGKGVLELPLTSLTEEYKCSKVRLQMTLRDSRDKTISAVAPPLVTGRKWTPSDALQQASSALRYKDIVGQVQQGRGGFGLTTSKPTWRKATTSERRTLVVEEVRRQEEAARSAKAVSLAKQGQWMQWEGVERRKISWKELWEMEASKISFIIRATYDVLPSPKNLHQWYGEDPTCALCPTPATLKHIMVGCKTSLTQGRYTWRHNQVLKSLASALENRRCATNSLPPRASNPLPLRATTFVREGQKTSKHPSTRSEEGNLCRARDWRMLADIGRQLVFPPEIASTNLRPDLVFWSPSQKTAYIIELTVPWENSVEEAYERKKLHYAELAAEATQRGWNTKVYPVEVGCRGFVASSTIRLLKELGIHGQALRKTIRSLSEAAERSSRWIWLKRKDPCWAPSISG

SEQ ID NO: 8942 - protein, 1032 aa, Amblyraja radiata
MPVEEPTQQRQRPPLEGKIKGHKPGVKWPKAVEKKEWETVNSDLIHILEQQAGTAVEKLERMGNTIYSYGEERFGVSKGRGGKKLPTPSKSRRQQEIERLIRERRQLKKQWKKATEAEREGLMLLQEDIKSRLATLRKAENLRKLRRKKEHTRTRFYKDPFKFIKDLFAKEKSGTLKTSKRELEEHLEKAHQDTKRHEQLVIPHDIPPIQPPEFNLDTSPPRWKEVENTVRRARAASAPGPNGVPYKLYKNAPDVLRFLWKLMRVVWKKQTIPKAWRRAGGVLIPKEKDASDISQFRPICLLNVEGKIFFSIVSQRLSTYLVTNKYIDTSVQKAGIPGFSGCLEHTSMIWHQIQAAKKEKRDLHVIFLDLANAFGSVPHELLWESFAFFHVPELITTLVKSYFQDLQLCFTTADFSTTWQRLEVGIMAGCTVSPLAFTMAMEVIIRASKWVVGGERTRAGLRLPPIRAYMDDMTTLTTTAACTKRLLGKLQENIKWARMKIKPCKSRSISIVKGVLRDTRFCIGDDPIPTVSEQPVKSLGRWYNASLKDKEQVEQLRQEIVNGLENINQTLLPGKLKLWCLQFGLLPRTMWPLTIYEAPITTVEKMERTITSYAKKWLGVPRCLTNIGLYGKGVLELPLTSLTEEYKCSKVRLQMTLRDSRDKTISAVAPPLVTGRKWTPSDALQQASSALRYKDIVGQVQQGRGGFGLTTSKPTWRKATTSERRTLVVEEVRRQEEAARSAKAVSLAKQGQWMQWEGVERRKISWKELWEMEASKISFIIRATYDVLPSPKNLHQWYGEDPTCALCPTPATLKHIMVGCKTSLTQGRYTWRHNQVLKSLASALENRRCATNSLPPRASNPLPLRATTFVREGQKTSKHPSTRSEEGNLCRARDWRMLADIGRQLVFPPEIASTNLRPDLVFWSPSQKTAYIIELTVPWENSVEEAYERKKLHYAELAAEATQRGWNTKVYPVEVGCRGFVASSTIRLLKELGIHGQALRKTIRSLSEAAERSSRWIWLKRKDPCWAPSISG

SEQ ID NO: 8943 - protein, 1155 aa, Amblyraja radiata
MERSSVESSGGQVCSVAAPPQMDAPPWSRAGDRFVAEPFFSAGQQKAQVCICGWEKITSVKGLKIHQGRKKCLREQRHGPRIDQYFLRSNQSNQSSEAQRQDSNQSLQSISTHVTEEGDTSTEMPVEEPTQQRQRPPLEGKIKGHKPGVKWPKAVEKKEWETVNSDLIHILEQQAGTAVEKLERMGNTIYSYGEERFGVSKGRGGKKLPTPIKSRRQQEIERLIRERRQLKKQWKKATEAEREGLMLLQEDIKSRLATLRKAENLRKLRRKKEHTRTRFYKDPFKFIKDLFAKEKSGTLKTSKRELVEHLEKAHQDTKRHEQLVIPHDIPPIQPPEFNLDTSPPRWKEVENTVRRARAASAPGPNGVPYKLYKNAPDVLRFLWKLMRVVWKKQTITKAWRRAGGVLIPKEKDASDISQFRPICLLNVEGKIFFSIVSQRLSTYLVTNKYIDTSVQKAGIPGFSGCLEHTSMIWHQIQAAKKEKRDLHVIFLDLANAFGSVPHELLWESFAFFHVPELITTLVKSYFQDLQLCFTTADFSTTWQRLEVGIMAGCTVSPLAFTMAMEVIIRASKWVVGGERTRAGLRLPPIRAYMDDMTTLTTTAACTKRLLGKLQENIKWARMKIKPSKSRSISIVKGVLRDTRFCIGDDPIPTVSEQPVKSLGRWYNASLKDKEQVEQLRQEIVNGLENINQTLLPGKLKLWCLQFGLLPRTMWPLTIYEAPITTVEKMERTITSYAKKWLGVPRCLTNIGLYGKGVLELPLTSLTEEYKCSKVRLQMTLRDSRDKTISAVAPPLVTGRKWMPSDAVQQASSALRYKDIVGQVQQGRGGFGLTTSKPTWRKATTSERRTLVVEEVRRQEEAARSAKAVSLAKQGQWMQWEGVEQRKISWKELWEMEASKISFIIRATYDVLPSPKNLHQWYGEDPTCALCPTPATLKHIMVGCKTSLTQGRYTWRHNQVLKSLASALENRRCATNSLPPRASNPLPLRATTFVREGQKTSKHPSTRSEEGNLCRARDWRMLADIGRQLVFPPEIASTNLRPDLVFWSPSQKTACIIELTVPWENSVEEAYERKKLRYAELAAEATQRGWNTKVYPVEVGCRGFVASSTIRLLKELGIHGQALRKTIRSLSEAAERSSRWIWLKRKDPCWAPSFSG

SEQ ID NO: 8944 - protein, 1122 aa, Amblyraja radiata
MAHETSTTAAGHKLQVCICGWEKITSVKGLKIHQGRKKCLREQRHGPRIDQYFLRSNQSNQSSEAQRQDSNQSSQSISTHVTEEGDTSTEMPVEEPTQQRQRPPLEGKIKGHKPGVKWPKAVEKKEWETVNSDLIHILEQQAGTAVEKLERMGNTIYSYGEERFGVSKGRGGKKLPTPTKSRRQQEIERLIRERRQLKKQWKKATEAEREGLVLLQEDIKSRLATLRKAENLRKLRRKKEHTRTRFYKDPFKFIKDLFAKEKSGTLKTSKRELEEHLEKAHQDTKRHEQLVIPHDIPPIQPPEFNLDTSPPRWKEVENTVRQARAASAPGPNGVPYKLYKNAPDVLRFLWKLMRVVWKKQTIPKAWRRAGGVLIPKEKDASDISQFRPICLLNVEGKIFFSIVSQRLSTYLVTNKYIDTSVQKAGIPGFSGCLEHTSMIWHQIQAAKKEKRDLHVIFLDLANAFGSVPHELLWESFAFFHVPELITTLVKSYFQDLQLCFTTADFSTTWQRLEVGIMAGCTVSPLAFTMAMEVIIRASKWVVGGVRTRAGLRLPPIRAYLDDMTTLTTTAACTKRLLGKLQENIKWARMKIKPCKSRSISIVKGVLRDTRFCIGDDPIPTVSEQPVKSLGRWYNASLKDKEQVEQLRQEIVNGLENINQTLLPEKLKLWCLQFGLLPRTMWPLTIYEAPITTVEKMERTITSYAKKWLGVPRCLTNIGLYGKGVLELPLTSLTEEYKCSKVRLQMTLRDSRDKTISAVAPPLVTGRKWTPSDAVQQASSALRYKDIVGQVQQGRGGFGLTTSKPTWRKATTSERRTLVVEEVRRQEEAARSAKAVSLAKQGQWMQWEGVERRKISWKELWEMEASKISFIIRATYDVLPSPKNLHQWYGEDPTCALCPTPATLKHIMVGCKTSLTQGRYTWRHNQVLKILASALENRRCATNSLPPRASNHLPLRATTFVREGQKTSKHPSTRSEEGNLCRARDWRMLADIGRQLVFPPEIASTNLRPDLVFWSPSQKTAYIIELTVPWENSVEEAYERKKLRYAELAAEATQRGWNTKVYPVEVGCRGFVASSTIRLLKELGIHGQALRKTIRSLSEAAERSSRWIWLKRKDPCWAPSISG

SEQ ID NO: 8945 - protein, 1180 aa, Amblyraja radiata
MIAVPNAVSVSWRHPLNATKSKLKRIPLEPARAGAEDGSPIDNTVTDQGTETTTDKESMAHETSTTAAGHKLQVCICGWEKITSVKGLKIHQGRKKCLREQRHGPRIDQYFLRSNQSNQSSEAQRQDSNQSSQSISTHVTEEGDTSTEMPVEEPTQQRQRPPLEGKIKGHKPGVKWPKAVEKKEWETVNSDLIHILEQQAGTAVEKLERMGNTIYSYGEERFGVSKGRGGKKLPTPIKSRRQQEIERLIRERRQLKKQWKKATEAEREGLMLLQEDIKSRLATLRKAENLRKLRRKKEHTRTRFYKDPFKFIKDLFAKEKSGTLKTSKRELEEHLEKAHQDTKRHEQLVIPHDIPPIQPPEFNLDTSPPRWKEVENTVRRARAASAPGPNGVPYKLYKNAPDVLRFLWKLMRVVWKKQTIPKAWRRAGGVLIPKEKDASDISQFRPICLLNVEGKIFFSIVSQRLSTYLVTNKYIDTSVQKAGIPGFSGCLEHTSMIWHQIQAAKKEKRDLHVIFLDLANAFGSVPHELLWESFAFFHVPELITTLVKSYFQDLQLCFTTADFSTTWQRLEVGIMAGCTVSPLAFTMAMEVIIRASKWVVGGERTRAGLRLPPIRAYMDDMTTLTTTAACTKRLLGKLQENIKWARMKIKPCKSRSISIVKGVLRDTRFCIGDDPIPTVSEQPVKSLGRWYNASLKDKEQVEQLRQEIVNGLENINQTLLPGKLKLWCLQFGLLPRTMWPLTIYEAPITTVEKMERTITSYAKKWLGVPRCLTNIGLYGKGVLELPLTSLTEEYKCSKVRLQMTLRDSRDKTISAVAPPLVTGRKWTPSDALQQASSALRYKDIVGQVQQGRGGFGLTTSKPTWRKATTSERRTLVVEEVRQQEEAARSAKAVSLAKQGQWMQWEGVERRKISWKELWEMEASKISFIIRATYDVLPSPKNLHQWYGEDPTCALCPTPATLKHIMVGCKTSLTQGRYTWRHNQVLKSLASALENRRCATNSLPPRASNPLPLRATTFVREGQKTSKHPSTRSEEGNLCRARDWRMLADIGRQLVFPPEIASTNLRPDLVFWSPSQKTAYIIELTVPWENSVEEAYERKKLHYAELAAEATQRGWNTKVYPVEVGCRGFVASSTIRLLKELGIHGQALRKTIRSLSEAAERSSRWIWLKRKDPCWAPSISG

SEQ ID NO: 8946 - protein, 910 aa, Amblyraja radiata
MLLQEDIKSRLATLRKAENLRKLRRKKEHTRTRFYKDPFKFIKDLFAKEKSGTLKTSKWELEEHLEKAHQDTKRHEQLVIPHDIPPIQPPEFNLDTSPPRWKEVENTVRRARAASAPGPNGVPYKLYKNAPDVLRFLWKLMRVVWKKQTIPKAWRRAGGVLIPKEKDASDISQFRPICLLNVEGKIFFSIVSQRLSTYLVTNKYIDTSVQKAGIPGFSGCLEHTSMIWHQIQAAKKEKRDLHVIFLDLANAFGSVPHELLWESFAFFHVPELITTLVKSYFQDLQLCFTTADFSTTWQRLEVGIMAGCTVSPLAFTMAMEVIIRASKWVVGGERTRAGLRLPPIRAYMDDMTTLTTTAACTKRLLRKLQENIKWARMKIKPSKSRSISIVKGVLRDTRFCIGDDPIPTVSEQPVKSLGRWYNASLKDKEQVEQLRQEIVNGLENINQTLLPGKLKLWCLQFGLLPRTMWPLTIYEAPITTVEKMERTITSYAKKWLGVPRCLTNIGLYGKGVLELPLTSLTEEYKCSKVRLQMTLRDSRDKTISAVAPPLVTGRKWTPSDAVQQASSALRYKDIVGQVQQGRGGFGLTTSKPTWRKATTSERRTLVVEEVRRQEEAARSAKAVSLAKQGQWMQWEGVERRKISWKELWEMEASKISFIIRATYDVLPSPKNLHQWYGEDPTCALCPTPATLKHIMVGCKTSLTQGRYTWRHNQVLKSLASALENRRCATNSLPPRASNPLPLRATTFVREGQKTSKYPSTRSEEGNLCRARDWRMLADIGRQLVFPPEIASTNLRPDLVFWSPSQKTAYIIELTVPWENSVEEAYERKKLRYAELAAEATQRGWNTKVYPVKVGCRGFVASSTIRLLKELGIHGQALRKTIRSLSEAAERSSRWIWLKRKDPCWAPSISG

SEQ ID NO: 8947 - protein, 971 aa, Amblyraja radiata
MGNTIYSYGEERFGVSKGRGGKKLPTPIKSRRQQEIERLIRERRQLKKQWKKATEAEREGLMLLQEDIKSRLATLRKAENLRKLRRKKEHTRTRFYKDPFKFIKDLFAKEKSGTLKTSKRELEEHLEKAHQDTKRHEQLVIPHDIPPIQPPEFNLDTSPPRWKEVENTVRRARAASAPGPNGVPYKLYKNAPDVLRFLWKLMRVVWKKQTIPKAWRRAGGVLIPKEKNASDISQFRPICLLNVEGKIFFSIVSQRLSTYLVTNKYIDTSVQKAGIPGFSGCLEHTSMIWHQIQAAKKEKRDLHVIFLDLANAFGSVPHELLWESFAFFHVPELITTLVKSYFQDLQLCFTTADFSTTWQRLEVGIMAGCTVSPLAFTMAMEVIIRASKWVVGGERTRAGLRLPPIRAYMDDMTTLTTTAACTKRLLGKLQENIKWARMKIKPCKSRSISIVKGVLRDTRFCIGDDPIPTVSEQPVKSLGRWYNASLKDKEQVEQLRQEIVNGLENINQTLLPGKLKLWCLQFGLLPRTMWPLTIYEAPITTVEKMERTITSYAKKWLGVPRCLTNIGLYGKGVLELPLTSLTEEYKCSKVRLQMTLRDSRDKTISAVAPPLVTGRKWTPSDALQQASSALRYKDIVGQVQQGRGGFGLTTSKPTWRKATTSERRTLVVEEVRRQEEAARSAKAVSLAKQGQWMQWEGVERRKISWKELWEMEASKISFIIRATYDVLPSPKNLHQWYGEDPTCALCPTPATLKHIMVGCKTSLTQGRYTWRHNQVLKSLASALENRRCATNSLPPRASNPLPLRATTFVREGQKTSKHPSTRSEEGNLCRARDWRMLADIGRQLVFPPEIASTNLRPDLVFWSPSQKTAYIIELTVPWENSVEEAYERKKLHYAELAAEATQRGWNTKVYPVEVGCRGFVASSTIRLLKELGIHGQALRKTIRSLSEAAERSSRWIWLKRKDPCWAPSISG

SEQ ID NO: 8948 - protein, 1180 aa, Amblyraja radiata
MIAVPNAVSVSWRHPLNATKSKLKRIPLEPARAGAEDGSPIDNTVTDQGTEMTTDKESMAHETSTTAAGHKLQVCICGWEKITSVKGLKIHQGRKKCLREQRHGPRIDQYFLRSNQSNQSSEAQRQDSNQSSQSISTHVTEEGDTSTEMPVEEPTQQRQRPPLEGKIKGHKPGVKWPKAVEKKEWEMVNSDLIHILEQQAGTAVEKLERMGNTIYSYGEERFGVSKGRGGKKLPTPIKSRRQQEIERLIRERRQLKKQWKKATEAEREGLMLLQEDIKRRLATLRKAENLRKLRRKKEHTRTRFYKDPFKFIKDLFAKEKSGTLKTSKRELEEHLEKAHQDTKRHEQLVIPHDIPPIQPPEFNLDTSPPRWKEVENTVRRARAASAPGPNGVPYKLYKNAPDVLRFLWKLMRVVWKKQTIPKAWRRAGGVLIPKEKDASDISQFRPICLLNVEGKIFFSIVSQRLSTYLVTNKYIDTSVQKAGIPGFSGCLEHTSMIWHQIQAAKKEKRDLHVIFLDLANAFGSVPHELLWESFAFFHVPELITTLVKSYFQDLQLCFTTADFSTTWQRLEVGIMAGCTVSPLAFTMAMEVIIRASKWVVGGERTRAGLRLPPIRAYMDDMTTLTTTAACTKRLLGKLQENIKWARMKIKPCKSRSISIVKGVLRDTRFCIGDDPIPTVSEQPVKSLGRWYNASLKDKEQVEQLRQEIVNGLENINQTLLPGKLKLWCLQFGLLPRTMWPLTIYEAPITTVEKMERTITSYAKKWLGVPRCLTNIGLYGKGVLELPLTSLTEEYKCSKVRLQMTLRDSRDKTISAVAPPLVTGRKWTPSDALQQASSALRYKDIVGQVQQGRGGFGLTTSKPTWRKATTSERRTLVVEEVRRQEEAARSAKAVSLAKQGQWMQWEGVERRKISWKELWEMEASKISFIIRATYDVLPSPKNLHQWYGEDPTCALCPTPATLKHIMVGCKTSLTQGRYTWRHNQVLKSLASALENRRCATNSLPPRASNPLPLRATTFVREGQKTSKHPSTRSEEGNLCRARDWRMLADIGRQLVFPPEIASTNLRPDLVFWSPSQKTAYIIELTVPWENSVEEAYERKKLRYAELAAEATQRGWNTKVYPVEVGCRGFVASSTIRLLKELGIHGQALRKTIRSLSEAAERSSRWIWLKRKDPCWAPSISG

SEQ ID NO: 8949 - protein, 971 aa, Amblyraja radiata
MGNTIYSYGEERFGVSKGRGGKKLPTPIKSRRQQEIERLIRERRQLKKQWKKATEAEREGLMLLQEDIKSRLATLRKAENLRKLRRKKEHTRTRFYKDPFKFIKDLFAKEKSGTLKTSKRELEEHLEKAHQDTKRHEQLVIPHDIPPIQPPEFNLDTSPPRWKEVENTVRRARAASAPGPNGVPYKLYKNAPDVLRFLWKLMRVVWKKQTIPKAWRRAGGVLIPKEKDASDISQFRPICLLNVEGKIFFSIVSQRLSTYLVTNKYIDTSVQKAGIPGFSGCLEHTSMIWHQIQAAKKEKRDLHVIFLDLANAFGSVPHELLWESFAFFHVPELITTLVKSYFQDLQLCFTTADFSTTWQRLEVGIMAGCTVSPLAFTMAMEVIIRASKWVVGGERTRAGLRLPPIRAYMDDMTTLTTTAACTKRLLGKLQENIKWARMKIKPCKSRSISIVKGVLRDTRFCIGDDPIPTVSEQPVKSLGRWYNASLKDKEQVEQLRQEIVNGLENINQTLLPGKLKLWCLQFGLLPRTMWPLTIYEAPITTVEKMERTITSYAKKWLGVPRCLTNIGLYGKGVLELPLTSLTEEYKCSKVRLQMTLRDSRDKTISAVAPPLVTGRKWTPSDALQQASSALRYKDIVGQVQQGRGGFGLTTSKPTWRKATTSERRTLVVEEVRRQEEAARSAKAVSLAKQGQWMQWEGVERRKISWKELWEMEASKISFIIRATYDVLPSPKNLHQWYGEDPTCALCPTPATLKHIMVGCKTSLTQGRYTWRHNQVLKSLASALENRRCATNSLPPRASNPLPLRATTFVREGQKTSKHPSTRSEEGNLCRARDWRMLADIGRQLVFPPEIASTNLRPDLVFWSPSQKTAYIIELTVPWENSVEEAYERKKLHYAELAAEATQRGWNTKVYPVEVGCRGFVASSTIRLLKELGIHGQALRKTIRSLSEAAERSSRWIWLKRKDPCWAPSISG

SEQ ID NO: 8950 - protein, 1180 aa, Amblyraja radiata
MIAVPNAVSVSWRHPLNATKSKLKRIPLEPARAGAEDGSPIDNTVTDPGTETTTDKESMAHETSTTAAGHKLQVCICGWEKITSVKGLKIHQGRKKCLREQRHGPRIDQYFLRSNQSNQSSEAQRQDSNQSSQSISTHVTEEGDTSTEMPVEEPTQQRQRPPLEGKIKGHKPGVKWPKAVEKKEWETVNSDLIHILEQQAGTAVEKLERMGNTIYSYGEERFGVSKGRGGKKLPTPIKSRRQQEIERLIRERRQLKKQWKKATEAEREGLMLLQEDIKSRLATLRKAENLRKLRRKKEHTRTRFYKDPFKFIKDLFAKEKSGTLKTSKRELEEHLEKAHQDTKRHEQLVIPHDIPPIQPPEFNLDTSPPRWKEVENTVRQARAASAPGPNGVPYKLYKNAPDVLRFLWKLMRVVWKKQTIPKAWRRAGGVLIPKEKDASDISQFRPICLLNVEGKIFFSIVSQRLSTYLVTNKYIDTSVQKAGIPGFSGCLEHTSMIWHQIQAAKKEKRDLHVIFLDLANAFGSVPHELLWESFAFFHVPELITTLVKSYFQDLQLCFTTADFSTTWQRLEVGIMAGCTVSPLAFTMAMEVIIRASKWVVGGERTRAGLRLPPIRAYMDDMTTLTTTAACTKRLLGKLQENIKWARMKIKPSKSRSISIVKGVLRDTRFCIGDDPIPTVSEQPVKSLGRWYNASLKDKEQVEQLRQEIVNGLENINQTLLPGKLKLWCLQFGLLPRTMWPLTIYEAPITTVEKMERTITSYAKKWLGVPRCLTNIGLYGKGVLELPLTSLTEEYKCSKVRLQMTLRDSRDKTISAVAPPLVTGRKWTPSDAVQQASSALRYKDIVGQVQQGRGGFGLTTSKPTWRKATTSERRTLVVEEVRRQEEAARSAKAVSLAKQGQWMQWEGVERRKISWKELWEMEASKISFIIRATYDVLPSPKNLHQWYGEDPTCALCPTPATLKHIMVGCKTSLTQGRYTWRHNQVLKSLASALENRRCATNSLPPRASNPLPLRATTFVREGQKTSKHPSTRSEEGNLCRARDWRMLADIGRQLVFPPEIASTNLRPDLVFWSPSQKTAYIIELTVPWENSVEEAYERKKLRYAELAAEATQRGWNTKVYPVEVGCRGFVASSTIRLLKELGIHGQALRKTIRSLSEAAERSSRWIWLKRKDPCWAPSISG

SEQ ID NO: 8951 - protein, 971 aa, Amblyraja radiata
MGNTIYSYGEERFGVSKGRGGKKLPTPIKSRRQQEIERLIRERRQLKKQWKKATEAEREGLMLLQEDIKSRLATLRKAENLRKLRRKKEHTRTRFYKDPFKFIKDLFAKEKSGTLKTSKRELEEHLEKAHQDTKRHEQLVIPHDIPPIQPPEFNLDTSPPRWKEVENTVRRARAASAPGPNGVPYKLYKNAPDVLRFLWKLMRVVWKKQTIPKAWRRAGGVLIPKEKDASDISQFRPICLLNVEGKIFFSIVSQRLSTYLVTNKYIDTSVQKAGIPGFSGCLEHTSMIWHQIQAAKKEKRDLHVIFLDLANAFGSVPHELLWESFAFFHVPELITTLVKSYFQDLQLCFTTADFSTTWQRLEVGIMAGCTVSPLAFTMAMEVIIRASKLVVGGERTRAGLRLPPIRAYMDDMTTLTTTAACTKRLLGKLQENIKWARMKIKPSKSRSISIVKGVLRDTRFCIGDDPIPTVSEQPVKSLGRWYNASLKDKEQVEQLRQEIVNGLENINQTLLPGKLKLWCLQFGLLPRTMWPLTIYEAPITTVEKMERTITSYAKKWLGVPRCLTNIGLYGKGVLELPLTSLTEEYKCSKVRLQMTLRDSRDKTISAVAPPLVTGRKWTPSDAVQQASSALRHKDIVGQVQQGRGGFGLTTSKPTWRKATTSERRTLVVEEVRRQEEAARSAKAVSLAKQGQWMQWEGVERRKISWKELWEMEASKISFIIRATYDVLPSPKNLHQWYGEDPTCALCPTPATLKHIMVGCKTSLTQGRYTWRHNQVLKSLASALENRRCATNSLPPRASNPLPLRATTFVREGQKTSKHPSTRSEEGNLCRARDWRMLADIGRQLVFPPEIASTNLRPDLVFWSPSQKTAYIIELTVPWENSVEEAYERKKLRYAELAAEATQRGWNTKVYPVEVGCRGFVASSTIRLLKELGIHGQALRKTIRSLSEAAERSSRWIWLKRKDPCWAPSISG

SEQ ID NO: 8952 - protein, 971 aa, Amblyraja radiata
MGNTIYRYGEERFGVSKGRGGKKLPTPIKSRRQQEIERLIRERRQLKKQWKKATEAEREGLMLLQEDIKSRLATLRKAENLRKLRRKKEHTRTRFYKDPFKFIKDLFAKEKSGTLKTSKRELEEHLEKAHQDMKRHEQLVIPHDIPPIQPPEFNLDTSPPRWKEVENTVRRARAASAPGPNGVPYKLYKNAPDVLRFLWKLMRVVWKKQTIPKAWRRAGGVLIPKEKDASDISQFRPICLLNVEGKIFFSIVSQRLSTYLVTNKYIDTSVQKAGIPGFSGCLEHTSMIWHQIQAAKKENRDLHVIFLDLANAFGSVPHELLWESFAFYHVPELITTLVKSYFQDLQLCFTTADFSTTWQRLEVGIMAGCTVSPLAFTMAMEVIIRASKWVVGGERTRAGLRLPPIRAYMDDMTTLTTTAACTKRLLGKLQENIKWARMKIKPSKSRSISIVKGVLRDTRFCIGDDPIPTVSEQPVKSLGRWYNASLKDKEQVEQLRQEIVNGLENINQTLLPGKLKLWCLQFGLLPRTMWPLTIYEAPITTVEKMERTITSYAKKWLGVPRCLTNIGLYGKGVLELPLTSLTEEYKCSKVRLQMTLRDSRDKTISAVAPPLVTGRKWTPSDAVQQASSALRYKDIVGQVQQGRGGFGLTTSKPTWRKATTSERRTLVVEEVRRQEEAARSAKAVSLAKQGQWMQWEGVERRKISWKELWEMEASKISFIIRATYDVLPSPKNLHQWYGEDPTCALCPTPATLKHIMVGCKTSLTQGRYTWRHNQVLKSLASALENRRCATNSLPPRASNPLPLRATTFVREGQKTSKHPSTRSEEGNLCRARDWRMLADIGRQLVFPPEIASTNLRPDLVFWSPSQKTAYIIELTVPWENSVEEAYERKKLRYAELAAEATQRGWNTKVYPVEVGCRGFVASSTIRLLKELGIHGQALRKTIRSLSEAAERSSRWIWLKRKDPCWAPSISG

SEQ ID NO: 8953 - protein, 1180 aa, Amblyraja radiata
MIAVPNAVSVSWRHPLNATKSKLKRIPLEPARAGAEDGSPIDNTVTDPGTETTTDKESMAHETSTTAAGHKLQVCICGWEKITSVKGLKIHQGRKKCLREQRHGPRIDQYFLRSNQSNQSSEAQRQDSNQSSQSISTHVTEEGDTSTEMPVEEPTQQRQRPPLEGKIKGHKPGVKWPKAVEKKEWETVNSDLIHILEQQAGTAVEKLERMGNTIYSYGEERFGVSKGRGGKKLPTPIKSRRQQEIERLIRERRQLKKQWKKATEAEREGLMLLQEDIKSRLATLRKAENLRKLRRKKEHTRTRFYKDPFKFIKNLFAKEKSGTLKTSKRELEEHLEKAHQDTKRHEQLVIPHDIPPIQPPEFNLDTSPPRWKEVENTVRRARAASAPGPNGVPYKLYKNAPDVLRFLWKLMRVVWKKQTIPKAWRRAGGVLIPKEKDASDISQFRPICLLNVEGKIFFSIVSQRLSTYLVTNKYIDTSVQKAGIPGFSGCLEHTSMIWHQIQAAKKEKRDLHVIFLDLANAFGSVPHELLWESFAFFHVPELITTLVKSYFQDLQLCFTTADFSTTWQRLEVGIMAGCTVSPLAFTMAMEVIIRASKWVVGGERTRAGLRLPPIRAYMDDMTTLTTTAACTKRLLGKLQENIKWARMKIKPSKSRSISIVKGVLRDTRFCIGDDPIPTVSEQPVKILGRWYNASLKDKEQVQQLRQEIVNGLENINQTLLPGKLKLWCLQFGLLPRTMWPLTIYEAPITTVEKMERTITLYAKKWLGVPRCLTNIGLYGKGVLELPLTSLTEEYKCSKVRLQMTLRDSRDKTISAVVPPLVTGRKWTPSDAVQQASSALRHKDIVGQVQQGRGGFGLTTSKPTWRKATTSERRTLVVEEVRRQEEAARSAKAVSLAKQGQWMQWEGVERRKISWKELWEMDASKISFIIRATYDMLPSPKNLHQWYGEDPTCALCPTPATLKHIMVGCKTSLTQGRYTWRHNQVLKSLASALENRRCATNSLPLRASNPLPLRATTFVREGQKTSKHPSTRSEEGNLCRARDWRMLADIGRQLVFPPEIASTNLRPDLVFWSPSQKTAYIIELTVPWENSVEEAHERKKLRYAELAAEATQRGWNTKVYPVEVGCRGFVASPTIRLLKELGIHGQALRKTIRSLSEAPERSSRWIWLKRKDPCWAPSISG

SEQ ID NO: 8954 - protein, 1180 aa, Amblyraja radiata
MIAVPNAVSVSWRHPLNATKSKLKRIPLEPARAGAEDGSPIDNTVTDPGTETTTDKESMAHETSTTAAGHKLQVCICGWEKITSVKSLKIHQGKKKCLREQRHGPRIDQYFLRSNQSNQSSEAQRQDSNQSSQSISTHVTEEGDTSTEMPVEEPTQQRQRPPLEGKIKGHKPGVKWPKAVEKKEWETVNSDLIHILEQQAGTAVEKLERMGNTIYSYGEERFGVSKGRGGKKLPTPIKSRRQQEIERLIRERRQLKKQWKKATEAEREGLTLLQEDIKSRLATLRKAENLRKLRRKKEHTRTRFYKDPFKFIKDLFAKEKSGTLKTSKRELEEHLEKAHQDTKRHEQLVIPHDIPPIQPPEFNLDTSPPRWKEVENTVRRARAASAPGPNGVPYKLYKNAPDVLRFLWKLMRVVWKKQTIPKAWRRAGGVLIPKEKDASDISQFRPICLLNVEGKIFFSIVSQRLSTYLVTNKYIDTSVQKAGIPGFSGCLEHTSMIWHQIQAAKKEKRDLHVIFLDLANAFGSVPHELLWESFAFFHVPELITTLVKSYFQDLQLCFTTADFSTTWQRLEVGIMAGCTVSPLAFTMAMEVIIRASKWVVGGERTRAGLRLPPIRAYMDDMTTLTTTAACTKRLLGKLQENIKWARMKIKPSKSRSISIVKGVLRDTRFCIGDDPIPTVSEQPVKSLGRWYNASLKDKEQVEQLRQEIVNGLENINQTLLPGKLKLWCLQFGLLPRTMWPLTIYEAPITTVEKMERTITSYAKKWLGVPRCLTNIGLYGKGVLELPLTSLTEEYKCSKVRLQMTLRDSRDKTISAVAPPLVTGRKWTPSDAVQQASSALRYKDIVGQVQQGRGGFGLTTSKPTWRKATTSERRTLVVEEVRRQEEAARSAKAVSLAKQGQWMQWEGVERRKISWKELWEMEASKISFIIRATYDVLPSPKNLHQWYGEDPTCALCPTPATLKHIMVGCKTSLTQGRYTWRHNQVLKSLASALENRRCATNSLPPRASNPLPLRATTFVREGQKTSKHPSTRSEEGNLCRARDWRMLADIGRQLVFPPEIASTNLRPDLVFWSPSQKTAYIIELTVPWENSVEEAYERKKLRYAELAAEATQRGWNTKVYPVEVGCRGFVASSTIRLLKELGIHGQALRKTIRSLSEAAERSSRWIWLKRKDPCWAPSISG

SEQ ID NO: 8955 - protein, 1032 aa, Amblyraja radiata
MPVEEPTQQRQRPPLEGKIKGHKPGVKWPKAVEKKEWETVNSDLIHILEQQAGTAVEKLERMGNTIYSYGEERFGVSKGRGGKKLPTPIKSRRQQEIERLIRERRQLKKQWKKATEAEREGLMLLQEDIKSRLATLRKAENLRKLRKKKEHTRTRFYKDPFKFIKDLFAKEKSGTLKTSKRELEEHLEKAHQDTKRHEQLVIPHDIPPIQPPEFNLDTSPPRWKEVENTVRRARAASAPGPNGVPYKLYKNAPDVLRFLWKLMRVVWKKQTIPKAWRRAGGVLIPKEKDASDISQFRPICLLNVEGKIFFSIVSQRLSTYLVTNKYIDTFVQKAGIPGFSGCLEHTSMIWHQIQAAKKEKRDLHVIFLDLANPFGSVPHELLWESFAFFHVPELITTLVKSYFKDLQLCFTTADFSTTWQRLEVGIMAGCTVSPLAFTMAMEVIIRASKWVVGGERTRAGLRLPPIRAYMDDMTTLTTTAACTKRLLGKLQENIKWARMKIKPSKSRSISIVKGVLRDTRFCIGDDPIPTVSEQPVKSLGRWYNASLKDKEQVQQLRQEIVNGLENINQTLLPGKLKLWCLQFGLLPRTMWPLTIYEAPITTVEKMERTITSYAKKWLGVPRCLTNIGLYGKGVLELPLTSLTEEYKCSKVRLQMTLRDSRDKTISAVAPPLVTGRKWTPSDAVQQASSALRHKDIVGQVQQGRGGFGLMISKPTWRKATTSERRTLVVEEVRRQEEAARSAKAVSLAKQGQWMQWEGVERRKISWKELWEMEASKISFIIRATYDVLPSPKNLHQWYGEDPTCALCPTPATLKHIMVGCKTSLTQGRYSWRHNQVLKSLASALENRRCATNSLPPRASNPLPLRATTFVREGQKTSKHPSTRSEEGNLCRARDWRMLADIGRQLVFPPEIASTNLRPDLVFWSPSQKTAYIIELTVPWENSVEEAYERKKLRYAELAAEATQRGWNTKVYPVEVGCRGFVASSTIRLLKELGIHGQALRKTIRSLSEEAERSSRWIWLKRKDPCWAPSISG

SEQ ID NO: 8956 - protein, 1122 aa, Amblyraja radiata
MAHETSTTAAGHKLQVCICGWEKITSVKGLKIHQGRKKCLREQRHGPRIDQYFLRSNQSNQSSEAQRQDSNQSSQSISTHVTEEGDTSTEMPVEEPTQQRQRPPLEGKIKGHKPGVKWPKAVEKKEWETVNSDLIHILEQQAGTAVEKLERMGNTIYSYGEERFGVSKGRGGKKLPTPIKSRRQQEIERLIRERRQLKKQWKKATEAEREGLMLLQEDIKSRLATLRKAENLRKLRRKKEHTRTRFYKDPFKFIKDLFAKEKSGTLKTSKWELEEHLEKAHQDTKRHEQLVIPHDIPPIQPPEFNLDTSPPRWKEVENTVRRARAASAPGPNGVPYKLYKNAPDVLRFLWKLMRVVWKKQTIPKAWRRAGGVLIPKEKDASDISQFRPICLLNVEGKIFFSIVSQRLSTYLVTNKYIDTSVQKAGIPGFSGCLEHTSMIWHQIQAAKKEKRDLHVIFLDLANAFGSVPHELLWESFAFFHVPELITTLVKSYFQDLQLCFTTADFSTTWQRLEVGIMAGCTVSPLAFTMAMEVIIRASKWVVGGERTRAGLRLPPIRAYMDDMTTLTTTAACTKRLLGKLQENIKWARMKIKPCKSRSISIVKGVLRDTRFCIGDDPIPTVSEQPVKSLGRWYNASLKDKEQVEQLRQEIVNGLENINQTLLPGKLKLWCLQFGLLPRTMWPLTIYEAPITTVEKMERTITSYAKKWLGVPRCLTNIGLYGKGVLELPLTSLTEEYKCSKVRLQMTLRDSRDKTISAVAPPLVTGRKWTPSDAVQQASSALRYKDIVGQVQQGRGGFGLTTSKPTWRKATTSERRTLVVEEVRRQEEAARSAKAVSLAKQGQWMQWEGVERRKISWKELWEMEASKISFIIRATYDVLPSPKNLHQWYGEDPTCALCPTPATLKHIMVGCKTSLTQGRYTWRHNQVLKSLASALENRRCATNSLPPRASNPLPLRATTFVREGQKTSKHPSTRSEEGNLCRARDWRMLADIGRQLVFPPEIASTNLRPDLVFWSPSQKTAYIIELTVPWENSVEEAYERKKLRYAELAAEATQRGWNTKVYPVEVGCRGFVASSTIRLLKELGIHGQALRKTIRSLSEAAERSSRWIWLKRKDPCWAPSISG

SEQ ID NO: 8957 - protein, 1180 aa, Amblyraja radiata
MIAVPNAVSVSWRHPLNATKSKLKRIPLEPARAGAEDGSPIDNTVTDQGTETTTDKESMAHETSTTAAGHKLQVCICGWEKITSVKGLKIHQGRKKCLREQRHGPRIDQYFLRSNQSNQSSEAQRQDSNQSSQSISTHVTEEGDTSTEMPVEEPTQQRQRPPLEGKIKGHKPGVKWPKAVEKKEWETVNSDLIHILEQQAGTAVEKLERMGNTIYSYGEERFGVSKGRGGKKLPTPIKSRRQQEIERLIRERRQLKKQWKKATEAEREGLMLLQEDIKSRLATLRKAENLRKLRRKKEHTRTRFYKDPFKFIKDLFAKEKSGTLKTSKRELEEHLEKAHQDTKRHEQLVIPDDIPPIQPPEFNLDTSPPRWKEVENTVRRARAASAPGPNGVPYKLYKNAPDVLRFLWKLMRVVWKKQTIPKAWRRAGGVLIPKEKNASDISQFRPICLLNVEGKIFFSIVSQRLSTYLVTNKYIDTSVQKAGIPGFSGCLEHTSMIWHQIQAAKKEKRDLHVIFLDLANAFGSVPHELLWESFAFFHVPELITTLVKSYFQDLQLCFTTADFSTTWQRLEVGIMAGCTVSPLAFTMAMEVVIRASKWVVGGERTRAGLRLPPIRAYMDDMTTLTTTAACTKRLLGKLQENIKWARMKIKPCKSRSISIVKGVLRDTRFCIGDDPIPTVSEQPVKSLGRWYNASLKDKEQVEQLRQEIVNGLENINQTLLPGKLKLWCLQFGLLPRTMWPLTIYEAPITTVEKMERTITSYAKKWLGVPRCLTNIGLYGKGVLELPLTSLTEEYKCSKVRLQMTLRDSRDKTISAVAPPLVTGRKWTPSDALQQASSALRYKDIVGQVQQGRGGFGLTTSKPTWRKATTSERRTLVVEEVRRQEEAARSAKAVSLAKQGQWMQWEGVERRKISWKELWEMEASKISFIIRATYDVLPSPKNLHQWYGEDPTCALCPTPATLKHIMVGCKTSLTQGRYTWRHNQVLKSLASALENRRCATNSLPPRASNPLPLRATTFVREGQKTSKHPSTRSEEGNLCRARDWRMLADIGRQLVFPPEIASTNLRPDLVFWSPSQKTAYIIELTVPWENSVEEAYERKKLHYAELAAEATQRGWNTKVYPVEVGCRGFVASSTIRLLKELGIHGQALRKTIRSLSEAAERSSRWIWLKRKDPCWAPSISG

SEQ ID NO: 8958 - protein, 1180 aa, Amblyraja radiata
MIAVPNAVSVSWRHPLNATKSKLKRIPLEPARAGAEDGSPIDNTVTDPGTETTTDKESMAHETSTTAAGHKLQVCICGWEKITSVKGLKIHQGRKKCLREQRHGPRIDQYFLRSNQSNQSSEAQRQDSNQSSQSISTHVTEEGDTSTEMPVEEPTQQRQRPPLEGKIKGHKPGVKWPKAVEKKEWETVNSDLIHILEQQAGTAVEKLERMGNTIYSYGEERFGVSKGRGGKKLPTPIKSRRQQEIERLIRERRQLKKQWKKATEAERECLMLLQEDIKSRLATLRKAENLRKLRRKKEHTRTRFYKDPFKFIKDLFAKEKSGTLKTSKRELEEHLEKAHQDTKRHEQLVIPHDIPPIQPPEFNLDTSPPRWKEVENTVRRARAASAPGPKGVPYKLYKNAPDVLRFLWKLMRVVWKKQTIPKAWRRAGGVLIPKEKDASDISQYRPICLLNVEGKIFFSIVSQRLSTYLVTNKYIDTSVQKAGIPGFSGCLEHTSMIWHQIQAAKKEKRDLHVIFLDLANAFGSVPHELLWESFAFFHVPELITTLVKSYFQDLQLCFTTADFSTTWQRLEVGIMAGCTVSPLAFTMAMEVIIRASKWVVGGERTRAGLRLPPIRAYMDDMTTLTTTAACTKRLLGKLQENIKWARMKIKPCKSRSISIVKGVLRDTRFCIGDDPIPTVSEQPVKSLGRWYNASLKDKEQVEQLRQEIVNGLENINQTLLPGKLKLWCLQFGLLPRTMWPLTIYEAPITTVEKMERTITSYAKKWLGVPRCLTNIGLYGKGVLELPLTSLTEEYKCSKVRLQMTLRDSRDKTISAVAPPLVTGRKWTPSDAVQQASSALRYKDIVGQVQQGRGGFGLTTSKPTWRKATTSERRTLVVEEVRRQEEAARSAKAVSLAKQGQWMQWEGVERRKISWKELWEMEASKISFIIRATYDVLPSPKNLHQWYGEDPTCALCPTPATLKHIMVGCKTSLTQGRYTWRHNQVLKSLASALENRRCATNSLPPRASNHLPLRATTFVREGQKTSKHPSTRSEEGNLCRARDWRMLADIGRQLVFPPEIASTNLRPDLVFWSPSQKTAYIIELTVPWENSVEEAYERKKLRYSELAAEATQRGWNTKVYPVEVGCRGFVASSTIRLLKELGIHGQALRKTIRSLSEAAERSSQWIWLKRKDPCWAPSISG

SEQ ID NO: 8959 - protein, 1180 aa, Amblyraja radiata
MIAVPNAVSVSWRHPLNATKSKLKRIPLEPARAGAEDGSPIDNTVTDQGTETTTDKESMAHETSTTAAGHKLQVCICGWEKITSVKGLKIHQGRKKCLREQRHGPRIDQYFLRSNQSNQSSEAQRQDSNQSSQSISTHVTEEGDTSTEMPVEEPTQQRQRPPLEGKIKGHKPGVKWPKAVEKKEWETVNSDLIHILEQQAGTAVEKLERMGNTIYSYGEERFGVSKGRGGKKLPTPIKSRRQQEIERLIRERRQLKKQWKKATEAEREGLMLLQEDIKSRLATLRKAENLRKLRRKKEHTRTRFYKDPFKFIKDLFAKEKSGTLKTSKRELEEHLEKAHQDTKRHEQLVIPHDIPPIQPPEFNLDTSPPRWKEVENTVRRARAASAPGPNGVPYKLYKNAPDVLRFLWKLMRVVWKKQTIPKAWRRAGGVLIPKEKDASDISQFRPICLLNVEGKIFFSIVSQRLSTYLVTNKYIDTSVQKAGIPGFSGCLEHTSMIWHQIQAAKKEKRDLHVIFLDLANAFGSVPHELLWESFAFFHVPELITTLVKSYFQDLQLCFTTADFSTTWQRLEVGIMAGCTVSPLAFTMAMEVIIRASKWVVGGERTRAGLRLPPIRAYMDDMTTLTTTAACTKRLLGKLQENIKWARMKIKPCKSRSISIVKGVLRDTRFCIGDDPIPTVSEQPVKSLGRWYNASLKDKEQVEQLRQEIVNGLENINQTLLPGKLKLWCLQFGLLPRTMWPLTIYEAPITTVEKMERTITSYAKKWLGVPRCLTNIGLYGKGVLELPLTSLTEEYKCSKVRLQMTLRDSRDKTISAVAPPLVTGRKWTPSDALQQASSALRYKDIVGQVQQGRGGFGLTTSKPTWRKVTTSERRTLVVEEVRRQEEAARSAKAVSLAKQGQWMQWEGVERRKISWKELWEMEASKISFIIRATYDVLPSPKNLHQWYGEDPTCALCPTPATLKHIMVGCKTSLTQGRYTWRHNQVLKSLASALENRRCATNSLPPRASNPLPLRATTFVREGQKTSKHPSTRSEEGNLCRARDWRMLADIGRQLVFPPEIASTNLRPDLVFWSPSQKTAYIIELTVPWENSVEEAYERKKLHYAELAAEATQRGWNTKVYPVEVGCRGFVASSTIRLLKELGIHGQALRKTIRSLSEAAERSSRWIWLKRKDPCWAPSISG

SEQ ID NO: 8960 - protein, 1180 aa, Amblyraja radiata
MIAVPNAVSVSWRHPLNATKSKLKRIPLEPARAGAEDGSPIDNTVTDQGTETTTDKESMAHETSTTAAGHKLQVCICGWEKITSVKGLKIHQGRKKCLREQRHGPRIDQYFLRSNQSNQSSEAQRQDSNQSSQSISTHVTEEGDTSTEMPVEEPTQQRQRPPLEGKIKGHKPGVKWPKAVEKKEWETVNSDLIHILEQQAGTAVEKLERMGNTIYSYGEERFGVSKGRGGKKLPTPIKSRRQQEIERLIRERRQLKKQWKKATEAEREGLMLLQEDIKSRLATLRKAENLRKLRRKKEHTRTRFYKDPFKFIKDLFAKEKSGTLKTSKRELEEHLEKAHQDTKRHEQLVIPHDIPPIQPPEFNLDTSPPRWKEVENTVRRARAASAPGPNGVPYKLYKNAPDVLRFLWKLMRVVWKKQTIPKAWRRAGGVLIPKEKNASDISQFRPICLLNVEGKIFFSIVSQRLSTYLVTNKYIDTSVQKAGIPGFSGCLEHTSMIWHQIQAAKKEKRDLHVIFLDLANAFGSVPHELLWESFAFFHVPELITTLVKSYFQDLQLCFTTADFSTTWQRLEVGIMAGCTVSPLAFTMAMEVIIRASKWVVGGERTRAGLRLPPIRAYMDDMTTLTTTAACTKRLLGKLQENIKWARMKIKPCKSRSISIVKGVLRDTRFCIGDDPIPTVSEQPVKSLGRWYNASLKDKEQVEQLRQEIVNGLENINQTLLPGKLKLWCLQFGLLPRTMWPLTIYEAPITTVEKMERTITSYAKKWLGVPRCVTNIGLYGKGVLELPLTSLTEEYKCSKVRLQMTLRDSRDKTISAVAPPLVTGRKWTPSDALQQASSALRYKDIVGQVQQGRGGFGLTTSKPTWRKATTSERRTLVVEEVRRQEEAARSAKAVSLAKQGQWMQWEGVERRKISWKELWEMEASKISFIIRATYDVLPSPKNLHQWYGEDPTCALCPTPATLKHIMVGCKTSLTQGRYTWRHNQVLKSLASALENRRCATNSLPPRASNPLPLRATTFVREGQKTSKHPSTRSEEGNLCRARDWRMLADIGRQLVFPPEIASTNLRPDLVFWSPSQKTAYIIELTVPWENSVEEAYERKKLHYAELAAEATQRGWNTKVYPVEVGCRGFVASSTIRLLKELGIHGQALRKTIRSLSEAAERSSRWIWLKRKDPCWAPSISG

SEQ ID NO: 8961 - protein, 1180 aa, Amblyraja radiata
MIAVPNAVSVSWRHPLNATKSKLKRIPLEPARAGAEDGSPIDNTVTDPGTETTTDKESMAHETSTTAAGHKLQVCICGWEKITSVKGLKIHQGRKKCLREQRHGPRIDQYFLRSNQSNQSSEAQRQDSNQSSQSISTHVTEEGDTSTEMPVEEPTQQRQRPPLEGKIKGHKPGVKWPKAVEKKEWETVNSDLIHILEQQAGTAVEKLERMGNTIYSYGEERFGVSKRRGGKILPTPIKSRRQQEIERLIRERRQLKKQWKKATEAEREGLMLLQEDIKSRLATLRKAENLRKLRRKKEHTRTRFYKDPFKFIKDLFAKEKSGTLKTSKRELEEHLEKAHQDTKRHEQLVIPHDIPPIQPPEFNLDTSPPRWKEVENTVRRARAASAPGPNGVPYKLYKNAPDVLRFLWKLMRVVWKKQTIPKAWRRAGGVLIPKEKDASDISQFRPICLLNVEGKIFFSIVSQRLSTYLVTNKYIDTSVQKAGIPGFSGCLEHTSMIWHQIQAAKKEKRDLHVIFLDLANAFGSVPHELLWESFAFFHVPELITTLVKSYFQDLQLCFTTADFSTPWQRLEVGIMAGCTVSPLAFTMAMEVIIRASKWVVGGERTRAGLRLPPIRAYMDDMTTLTTTAACTKRLLGKLQENIKWARMKIKPSKSRSISIVKGVLRDTRFCIGDDPIPTVSEQPVKSLGRWYNASLKDKEQVEQLRQEIVNGLENINQTLLPGKLKLWCLQFGLLPRTMWPLTIYEAPITTVEKMERTITSYAKKWLGVPRCLTNIGLYGKGVLELPLTSLTEEYKCSKVRLQMTLRDSRDKTISAVAPPLVTGRKWTPSDAVQQASSALRYKDIVGQVQQGRGGFGLTTSKPTWRKATTSERRTLVVEEVRRQEEAARSAKAVSLAKQGQWMQWEGVERRKISWKELWEMEASKISFIIRATYDVLPSPKNLHQWYGEDPTCALCPTPATLKHIMVGCKTSLTQGRYTWRHNQVLKSLASALENRRCATNSLPPRASNPLPLRATTFVREGQKTSKHPSTRSEEGNLCRARDWRMLADIGRQLVFPPEIASTNLRPDLVFWSPSQKTAYIIELTVPWENSVEEAYERKKLRYAELAAVATQRGWNTKVYPAEVGCRGFVASSTIRLLKELGIHGQALRKTIRSLSEAAERSSRWIWLQRKDPCWAPSISG

SEQ ID NO: 8962 - protein, 1180 aa, Amblyraja radiata
MIAVPNAVSVSWRHPLNATKSKLKRIPLEPARAGAEDGSPIDNTVTDQGTETTTDKESMAHETSTTAAGHKLQVCICGWEKITSVKGLKIHQGRKKCLREQRHGPRIDQYFLRSNQSNQSSEAQRQDSNQSSQSISTHVTEEGDTSTEMPVEEPTQQRQRPPLEGKIKGHKPGVKWPKAVEKKEWETVNSDLIHILEQQAGTAVEKLERMGNTIYSYGEERFGVSKGRGGKKLPTPIKSRRQQEIERLIRERRQLKKQWKKATEAEREGLMLLQEDIKSRLATLRKAENLRKLRRKKEHTRTRFYKDPFKFIKDLFAKEKSGTLKTSKRELEEHLEKAHQDTKRHEQLVIPHDIPPIQPPEFNLDTSPPRWKEVENTVRRARAASAPGPNGVPYKLYKNAPDVLRFLWKLMRVVWKKQTIPKAWRRAGGVLIPKEKNASDISQFRPICLLNVEGKIFFSIVSQRLSTYLVTNKYIDTSVQKAGIPGFSGCLEHTSMIWHQIQAAKKEKRDLHVIFLDLANAFGSVPHELLWESFAFFHVPELITTLVKSYFQDLQLCFTTADFSTTWQRLEVGIMAGCTVSPLAFTMAMEVIIRASKWVVGGERTRAGLRLPPIRAYMDDMTTLTTTAACTKRLLGKLQENIKWARMKIKPCKSRSISIVKGVLRDTRFCIGDDPIPTVSEQPVKSLGRWYNASLKDKEQVEQLRQEIVNGLENINQTLLPGKLKLWCLQFGLLPRTMWPLTIYEAPITTVEKMERTITSYAKKWLGVPRCLTNIGLYGKGVLELPLTSLTEEYKCSKVRLQMTLRDSRDKTISAVAPPLVTGRKWTPSDALQQASSALRYKDIVGQVQQGRGGFGLTTSKPTWRKATTSERRTLVVEEVRRQEEAARSAKAVSLAKQGQWMQWEGVERRKISWKELWEMEASKISFIIRATYDVLPSPKNLHQWYGEDPTCALCPTPATLKHIMVGCKTSLTQGRYTWRHNQVLKSLASALENRRCATNSLPPRASNPLPLRATTFVREGQKTSKHPSTRSEEGNLCRARNWRMLADIGRQLVFPPEIASTNLRPDLVFWSPSQKTAYIIELTVPWENSVEEAYERKKLHYAELAAEATQRGWNTKVYPVEVGCRGFVASSTIRLLKELGIHGQALRKTIRSLSEAAERSSRWIWLKRKDPCWAPSISG

SEQ ID NO: 8963 - protein, 1006 aa, Amblyraja radiata
MPVEEPTQQRQRPPLEGKIKGHKPGVKWPKAVEKKEWETVNSDLIHILEQQAGTAVEKLERMGNTIYSYGEERFGVSKGRGGKKLPTPIKSRRQQEIERLIRERRQLKKQWKKATEAERDGLMLLQEDIKSRLATLRKAENLRKLRKKKEHTRTRFYKDPFKFIKDLFAKEKSGTLKTSKRELEEHLEKAHQDTKRHEQLVIPHDIPPIQPPEFNLDTSPPRWKEVENTVRRARAASAPGPNGVPYKLYKNAPDVLRFLWKLMRVVWKKQTIPKAWRRAGGVLIPKEKDASDISQFRPICLLNVEGKIFFSIVSQRLSTYLVTNKYIDTSVQKAGIPGFSGCLEHTSMIWHQIQAAKKEKRDLHVIFLDLANAFGSVPHELLWESFAFFHVPELITTLVKSYFQDLQLCFTTADFSTTWQRLEVGIMAGCTVSPLAFTMAMEVIIRASKWVVGGERTRAGLRLPPIRAYMDDMTTLTTTAACTKRLLGKLQENIKWARMKIKPSKSRSISIVKGVLRDTRFCIGDDPIPTVSEQPVKILGRWYNASLKDKEQVEQLRQEIVNGLENINQTLLPGKLKLWCLQFGLLPRTMWPLTIYEAPITTVEKMERTITSYAKKWLGVPRCLTNIGLYGKGLLELPLTSLTEEYKCSKVRLQMTLRDSRDKTISAVAPPLVTGRKWTPSDAVQQASSALRHKDIVGQVQQGRGGFGLTTSKPTWRKATTSERRTLVVEEVRRQEEAARSAKAVSLAKQGQWMQWEGVERRKISWKELWEMEASKISFIIRATYDVLPSPKNLHQWYGEDPTCALCPTPATLKHIMVGCKTSLTQGRYTWRHNQVLKSLASALENRRCATNSLPPRASNPPSLRATTFVREGQKTSKHPSTRSEEGNLCRARDWRMLADIGRQLVFPPEIASTNLRPDLVFWSPSQKTAYIIELTVPWENSVEEAYERKKLRYAELAAEATQRGWNTKVYPVEVGCRGFVASSTIRLLKELGIHGQALRKTIRPL

SEQ ID NO: 8964 - protein, 1180 aa, Amblyraja radiata
MIAVPNAVSVSWRHPLNATKSKLKRIPLEPARAGAEDGSPIDNTVTDPGTETTTDKESMAHETSTTAAGHKLQVCICGWEKITSVMGLKIHQGRKKCLREQRHGPRIDQYFLRSNQSNQSSEAQRQDSNQSSQSISTHVTEEGDTSTEMPVEEPTQQRQRPPLEGKIKGHKPGVKWPKAVEKKEWETVNSDLIHILEQQAGTAVEKLERMGNTIYSYGEEQFGVSKGRGGKKLPTPIKSRRQQEIERLIRERRQLKKQWKKATEAEREGLMLLQEDIKSRLATLRKAENLRKLRKKKEHTRTRFYKDPFKFIKDLFAKEKSGTLKTSKRELEEHLEKAHQDTKRHEQLVIPHDIPPIQPPEFNLDTSPPRWKEVENTVRRARASSAPGPNGVPYKLYKNAPDVLRFLWKLMRVVWKKQTIPKAWRRAGGVLIPKEKDASDISQFRPICLLNVEGKIFFSIVSQRLSTYLVTNKYIDTSVQKAGIPGFSGCLEHTSMIWHQIQAAKKEKRDLHVIFLDLANAFGSVPHELLWESFAFFHVPELITTLVKSYFQDLQLCFTTADFSTTWQRLEVGIMAGCTVSPLAFTMAMEVIIRASKWVVGGERTRAGLRLPPIRAYMDDMTTLTTTAACTKRLLGKLQENIKWARMKIKPSKSRSISIVKGVLRDTRFCIGDDPIPTVSEQPVKSLGRWYNASLKDKEQVQQLRQEIVNGLENINQTLLPGKLKLWCLQFGLLPRTMWPLTIYEAPISTVEKMERTITSYAKKWLGVPRCLTNIGLYGKGVLELPLTSLTEEYKCSKVRLQMTLRDSRDKTISAVAPPLVTGRKWTPSDAVQQASSALRHKDIVGQVQQGRGGFGLTTSKPTWRKATTSERRTLVVEEVRRQEEAARSAKAVSLAKQGQWMQWEGVERRKISWKELWEMEASKISFIIRATYDVLPSPKNLHQWYGEDPTCALCPTPATLKHIMVGCKTSLTQGRYTWRHNQVLKSLASALENSRCATNSLPPRASNPLPLRATTFVREGQKTSKHPSTRSEEGNLCRARDWRMLADIGRQLVFPPEIASTNLRPDLVFWSPSQKTAYIIELTVPWENSVEEAYERKKLRYAELAAEATQRGWNTKVYPVEVGCRGFVASSTIRLLKELGIHGQALRKTIRSLSEAAERSSRWIWLKRKDPCWAPSTSG

SEQ ID NO: 8965 - protein, 971 aa, Amblyraja radiata
MGNTIYSYGEERFGVSKGRGGKKLPTPIKSRRQQEIERLIRERRQLKKQWKKATEAEREGLMLLQEDIKSRLATLRKAENLRKLRRKKEHTRTRFYKDPFKFIKDLFAKEKSGNLKTSKRELEEHLEKAHQDTKRHEQLVIPHDIPPIQPPEFNLDTSPPRWKEVENTVRRARAASAPGPNGVPYKLYKNAPDVLHFLWKLMRVVWKKQTIPKAWRRAGGVLIPKEKDASDISQFRPICLLNVEGKIFFSIVSQRLSTYLVTNKYIDTSVQKAGIPGFSGCLEHTSMIWHQIQAAKKEKRDLHVIFLDLANAFGSVPHELLWESFAFFHVPELITTLVKSYFQDLQLCFTTADFSTTWQRLDVGIMAGCTVSPLAFTMAMEVIIRASKWVVGGERTRAGLRLPPIRAYMDDMTTLTTTAACTKRLLGKLQENIKWARMKIKPSKSRSISIVKGVLRDTRLCIGDDPIPTVSEQPVKSLGRWYNASLKDKEQVEQLRQEIVNGLENINQTLLPGKLKLWCLQFGLLPRTMWPLTIYEAPITTVEKMERTITSYAKKWLGVPRCLTNIGLYGKGVLELPLTSLTEEYKCSKVRLQMTLRDSRDKTISAVAPPLVTGRKWTPSDAVQQASSALRYKDIVGQVQQGRGGFGLTTSKPTWRKATTSERRTLVVEELRRQEEAARSANSVSLAKQGQWMQWEGVERRKISWKELWEMEASKISFIIRATYDVLPSPKNLHQWYGEDPTCALCPTPATLKHIMVGCKTSLTQGRYTWRHNQVLKSLASALENRRCATNSLPPRASNPLPLRATTFVREGQKTSKHPSTRSEEGNLCRARDWRMLADIGRQLVFPPEIASTNLRPGLVFWSPSQKTAYIIELTVPWENSVEEAYERKKLRYAELAAEATQRGWNTKVYPVEVGCRGFVASSTIRLLKELGIHGQALRKTIRSLSEVAERSSRWIWLKRKDPCWAPSISG

SEQ ID NO: 8966 - protein, 1180 aa, Amblyraja radiata
MIAVPNAVSVSWRHPLNATKSKLKRIPLEPARAGAEDGSPIDNTVTDPGTETTTDKESMAHETSTTAAGHKLQVCICGWEKITSVKGLKIHQGRKKCLREQRHGPRIDQYFLRSNQSNQSSEAQRQDSNQSSQSISTHVTEEGDTSTEMPVEEPTQQRQRPPLEGKIKGHKPGVKWPKAVEKKEWETVNSDLIHILEQQAGTAVEKLERMGNTIYSYGEERFGVSKGRGGKKLPTPIKSRRQQEIERLIRERRQLKKQWKKATEAEREGLMLLQEDIKSRLATLRKAENLRKLRRKKEHTRTRFYKDPFKFIKDLFAKEKSGTLKTSKRELEEHLEKAHQDTKRHEQLVIPHDIPPIQPPEFNLDTSPPRWKEVENTVRRARAASAPGPNGVPYKLYKNAPDVLRFLWKLMRVVWKKQTIPKAWRRAGGVLIPKEKDASDISQFRPICLLNVEGKIFFSIVSQRLSTYLVTNKYIDTSVQKAGIPGFSGCLEHTSMIWHQIQAAKKEKRDLHVIFLDLANAFGSVPHELLWESFAFFHVPELITTLVKSYFQDLQLCFTTADFSTTWQRLEVGIMAGCTVSPLAFTMAMEVIIRASKWVVGGERTRAGLRLPPIRAYMDDMTTLTTTAACTKRLLGKLQENIKWARMKIKPSKSRSISIVKGVLRDTRFCIGDDPIPTVSEQPVKSLGRWYNASLKDKEQVEQLRQEIVNGLENINQTLLPGKLKLWCLQFGLLPRTMWPLTIYEAPITTVEKMERTITSYVKKWLGVPRCLTNIGLYGKGVLELPLTSLTEEYKCSKVRLQMTLRDSRDKTISAVAPPLVTGRKWTPSDAVQQASSALRYKDIVGQIQQGRGGFGLTTSKPTWRKATTSERRTLVVEEVRRQEEAARSAKAVSLAKQGQWMQWEGVERRKISWKELWEMEASKISFIIRATYDVLPSPKNLHQWYGEDPTCALCPTPATLKHIMVGCKTSLTQGRYTWRHNQVLKSLASALENRRCATNSLPPRASNPLPLRATTFVREGQKTSKHPSTRSEEGNLCRARDWRMLADIGQQLVFPPEIASTNLRPDLVFWSPSQKTAYIIELTVPWENSVEEAYERKKLRYAELAAEATQRGWNTKVFPVEVGCRGFVASSTIRLLKELGIHGQALRKTIRSLSEAAERSSRWIWLKRKDPCWAPSISG

SEQ ID NO: 8967 - protein, 910 aa, Amblyraja radiata
MLLQEDIKSRLATLRKAENLRKLRRKKEHTRTRFYKDPFKFIKDLFAKEKSGTLKTSKRELEEHLEKAHQDTKRHEQLVIPHDIPPIQPPEFNLDTSPPRWKEVENTVRRARAASAPGPNGVPYKLYKNAPDVLRFLWKLMRVVWKKQTIPKAWRRAGGVLIPKEKNASDISQFRPICLLNVEGKIFFSIVSQRLSTYLVTNKYIDTSVQKAGIPGFSGCLEHTSMIWHQIQAAKKEKRDLHVIFLDLANAFGSVPHELLWESFAFFHVPELITTLVKSYFQDLQLCFTTADFSTTWQRLEVGIMAGCTVSPLAFTMAMEVIIRASKWVVGGERTRAGLRLPPIRAYMDDMTTLTTTAACTKRLLGKLQENIKWARMKIKPCKSRSISIVKGVLRDTRFCIGDDPIPTVSEQPVKSLGRWYNASLKDKEQVEQLRQEIVNGLENINQTLLPGKLKLWCLQFGLLPRTMWPLTIYEAPITTVEKMERTITSYAKKWLGVPRCLTNIGLYGKGVLELPLTSLTEEYKCSKVRLQMTLRDSRDKTISAVAPPLVTGRKWTPSDALQQASSALRYKDIVGQVQQGRGGFGLTTSKPTWRKATTSERRTLVVEEVRRQEEAARSAKAVSLAKQGQWMQWEGVERRKISWKELWEMEASKISFIIRATYDVLPSPKNLHQWYGEDPTCALCPTPATLKHIMVGCKTSLTQGRYTWRHNQVLKSLASALENRRCATNSLPPRASNPLPLRATTFVREGQKTSKHPSTRSEEGNLCRARDWRMLADIGRQLVFPPEIASTNLRPDLVFWSPSQKTAYIIELTVPWENSVEEAYERKKLHYAELAAEATQRGWNTKVYPVEVGCRGFVASSTIRLLKELGIHGQALRKTIRSLSEAAERSSRWIWLKRKDPCWAPSISG

SEQ ID NO: 8968 - protein, 1180 aa, Amblyraja radiata
MIAVPNAVSVSWRHPLNATKSKLKRIPLEPARAGAEEGSPIDNTVTDQGTETTTDKESMAHETSTTAAGHKLQVCICGWEKITSVKGLKIHQGRKKCLREQRHGPRIDQYFLRSNQSNQSSEAQRQDSNQSSQSISTHVTEEGDTSTEMPVEEPTQQRQRPPLEGKIKGHKPGVKWPKAVEKKEWETVNSDLIHILEQQAGTAVEKLERMGNTIYSYGEERFGVSKGRGGKKLPTPIKSRRQQEIERLIRERRQLKKQWKKATEAEREGLMLLQEDIKSRLATLRKAENLRKLRRKKEHTRTRFYKDPFKFIKDLFAKEKSGTLKTSKRELEEHLEKAHQDTKRHEQLVIPHDIPPIQPPEFNLDTSPPRWKEVENTVRRARAASAPGPNGVPYKLYKNAPDVLRFLWKLMRVVWKKQTIPKAWRRAGGVLIPKEKNASDISQFRPICLLNVEGKIFFSIVSQRLSTYLVTNKYIDTSVQKAGIPGFSGCLEHTSMIWHQIQAAKKEKRDLHVIFLDLANAFGSVPHELLWESFAFFHVPELITTLVKSYFQDLQLCFTTADFSTTWQRLEVGIMAGCTVSPLAFTMAMEVIIRASKWVVGGERTRAGLRLPPIRAYMDDMTTLTTTAACTKRLLGKLQENIKWARMKIKPCKSRSISIVKGVLRDTRFCIGDDPIPTVSEQPVKSLGRWYNASLKDKEQVEQLRQEIVNGLENINQTLLPGKLKLWCLQFGLLPRTMWPLTIYEAPITTVEKMERTITSYAKKWLGVPRCLTNIGLYGKGVLELPLTSLTEEYKCSKVRLQMTLRDSRDKTISAVAPPLVTGRKWTPSDALQQASSALRYKDIVGQVQQGRGGFGLTTSKPTWRKATTSERRTLVVEEVRRQEEAARSAKAVSLAKQGQWMQWEGVERRKISWKELWEMEASKISFIIRATYDVLPSPKNLHQWYGEDPTCALCPTPATLKHIMVGCKTSLTQGRYTWRHNQVLKSLASALENRRCATNSLPPRASNPLPLRATTFVREGQKTSKHPSTRSEEGNLCRARDWRMLADIGRQLVFPPEIASTNLRPDLVFWSPSQKTAYIIELTVPWENSVEEAYERKKLHYAELAAEATQRGWNTKVYPVEVGCRGFVASSTIRLLKELGIHGQALRKTIRSLSEAAERSSRWIWLKRKDPCWAPSISG

SEQ ID NO: 8969 - protein, 1032 aa, Amblyraja radiata
MPVEEPTQQRQRPPLEGKIKGHKPGVKWPKAVEKKEWETVNSDLIHILEQQAGTAVEKLERMGNTIYSYGEERFGVSKGRGGKKLPTPIKSRRQQEIERLIRERRQLKKQWKKATEAEREGLMLLQEDIKSRLATLRKAENLRKLRRKKEHTRTRFYKDPFKFIKDLFAKEKSGTLKTSKRELEEHLEKAHQDTKRHEQLVIPHDIPPIQPPEFNLDTSPPRWKEVENTVQRARAASAPGPNGVPYKLYKNAPDVLRFLWKLMRVVWKKQTIPKAWRRAGGVLIPKEKNASDISQFRPICLLNVEGKIFFSIVSQRLSTYLVTNKYIDTSVQKAGIPGFSGCLEHTSMIWHQIQAAKKEKRDLHVIFLDLANAFGSVPHELLWESFAFFHVPELITTLVKSYFQDLQLCFTTADFSTTWQRLEVGIMAGCTVSPLAFTMAMEVIIRASKWVVGGERTRAGLRLPPIRAYMDDMTTLTTTAACTKRLLGKLQENIKWARMKIKPCKSRSISIVKGVLRDTRFCIGDDPIPTVSEQPVKSLGRWYNASLKDKEQVEQLRQEIVNGLENINQTLLPGKLKLWCLQFGLLPRTMWPLTIYEAPITTVEKMERTITSYAKKWLGVPRCLTNIGLYGKGVLELPLTSLTEEYKCSKVRLQMTLRDSRDKTISAVAPPLVTGRKWTPSDALQQASSALRYKDIVGQVQQGRGGFGLTTSKPTWRKATTSERRTLVVEEVRRQEEAARSAKAVSLAKQGQWMQWEGVERRKISWKELWEMEASKISFIIRATYDVLPSPKNLHQWYGEDPTCALCPTPATLKHIMVGCKTSLTQGRYTWRHNQVLKSLASALENRRCATNSLPPRASNPLPLRATTFVREGQKTSKHPSTRSEEGNLCRARDWRMLADIGRQLVFPPEIASTNLRPDLVFWSPSQKTAYIIELTVPWENSVEEAYERKKLHYAELAAEATQRGWNTKVYPVEVGCRGFVASSTIRLLKELGIHGQALRKTIRSLSEAAERSSRWIWLKRKDPCWAPSISG

SEQ ID NO: 8970 - protein, 1122 aa, Amblyraja radiata
MAHETSTTAAGHKLQVCICGWEKITSVKGLKIHQGRKKCLREQRHGPRIDQYFLRSNQSNQSSEAQRRDSNQSSQSISTHVTEEGDTSTEMPVEEPTQQRQRPPLEGKIKGHKPGVKWPKAVEKKEWETVNSDLIHILEQQAGTAVEKLERMGNTIYSYGEERFGVSKGRGGKNLPTPIKSRRQQEIERLIRERRQLKKQWKKATEAEREGLMLLQEDIKSRLATLRKAENLRKLRRKKEHTRTRFYKDPFKFIKDLFAKEKSGTLKTSKRELEEHLEKTHQDTKRHEQLVIPHDIPPIQPPEFNLDTSPPRWKEVENTVRRARAASAPGPNGVPYKVYKNAPDVLRFLWKLMRVVWKKQTIPKAWRRAGGVLIPKEKDASDISQFRPICLLNVEGKIFFSIVSQRLSTYLVTNKYIDTSVQKAGIPGFSGCLEHTSMIWHQIQAAKKEKRDLHVIFLDLANAFGSVPHELLWESFAFFHVPELITTLVKSYFQDLQLCFTTADFSTTWQRLEVGIMAGCTVSPLAFTMAMEVIIRASKWVVGGERTRAGLRLPPIRAYMDDMTTLTTTAACTKRLLGKLQENIKWARMKIKPSKSRSISIVKGVLRDTRLCIGDDPIPTVSEQPVKSLGRWYSASLKDKEQVEQLRQEIVNGLENINQTLLPGKLKLWCLQFGLLPRTMWPLTIYEAPITTVEKMERTITSYAKKWLGVPRCLTNIGLYGKGVLELPLTSLTEEYKCSKVRLQMTLRDSRDKTISAVAPPLVTGRKWTPSDAVQQASSALRHKDIVGQVQQGRGGFGLTTSKPTWRKATTSERRTLVVEEVRRQEEAARSAKAVSLAKQGQWMQWEGVERRKISWKELWEMEASKISFIIRATYDVLPSPKNLHQWYGEDPTCALCPTPATLKHIMVGCKTSLTQGRYTWRHNQVLKSLASALENRRCATNSLPPRASNPLPLRATTFVREGQKTSKHPSTRSEEGNLCRARDWRMLADIGRQLVFPPEIASTNLRPDLVFWSPSQKTAYIIELTVPWENSVEEAYERKKLRYAELAAEATQRGWNTKVYPVEVGCRGFVASSTIRLLKELGIHGQALRKTIRSLSEAAERSSRWIWLKRKDPCWAPSISG

SEQ ID NO: 8971 - protein, 1180 aa, Amblyraja radiata
MIAVPNAVSVSWRHPLNATKSKLKRIPLEPARAGAEDGSPIDNTVTDPGTETTTDKESMAHETSTTAAGHKLQVCICGWEKITSVKGLKIHQGKKKCLREQRHGPRIDQYFLRSNQSNQSSEAQRQDSNQSSQSISTHVTEEGDTSTEMPVEEPTQQRQRPPLEGKIKGHKPGVKWPKAVEKKEWETVNSDLIHILEQQAGTAVEKLERMGNTIYSYGEERFGVSKGRGGKKLPTPIKSRRQQEIERLIRERRQLKKQWKKATEAEREGLMLLQEDIKSRLATLRKAENLRKLRRKKEHTRSRFYKDPFKFIKDLFAKEKSGTLKTSKRELEEHLEKAHQDTKRHEQLVIPHDIPPIQPPEFNLDTSPPRWKEVENTVRRARAASAPGPNGVPYKLYKNAPDVLRFLWKLMRVVWKKQTIPKAWRRAGGVLIPKEKDASDISQFRPICLLNVEGKIFFSIVSQRLSTYLVTNKYIDTSVQKAGIPGFSGCLEHTSMIWHQIQAAKKEKRDLHVIFLDLANAFGSVPHELLWESFAFFHVPELITTLVKSYFQDLQLCFTTADFSTTWQRLEVGIMAGCTVSPLAFTMAMEVIIRASKWVVGGERTRAGLRLPPIRAYMDDMTTLTTTAACTKRLLGKLQENIKWARMKIKPSKSRSISIVKGVLRDTRFCIGDDPIPTVSEQPVKSLGRWYNASLKDKEQVEQLRQEIVNGLENINQTLLPGKLKLWCLQFGLLPRTMWPLTIYEAPITTVEKMERTITSYAKKWLGVPRCLTNIGLYGKGVLELPLTSLTEEYKCSKVRLQMTLRDSRDKTISAVAPPLVTGRKWTPSDAVQQASSALRYKDIVGQVQQGRGGFGLTTSKPTWRKATTSERRTLVVEEVRRQEEAARSAKAVSLAKQGQWMQWEGVERRKISWKELWEMEASKISFIIRATYDVLPSPKNLHQWYGEDPTCALCPTPATLKHIMVGCKTSLTQGRYTWRHNQVLKSLASALENRRCATNSLPPRTSNPLPLRATTFVREGQKTSKHPSTRSEEGNLCRARDWRMLADIGRQLVFPPEIASTNLRPDLVFWSPSQKTAYIIELTVPWENSVEEAYERKKLRYAELAAEATQRGWNTKVYPVEVGCRGFVASSTIRLLKELGIHGQALRKTIRSLSEAAERSSRWIWLKRKDPCWAPSISG

SEQ ID NO: 8972 - protein, 1180 aa, Amblyraja radiata
MIAVPNAVSVSWRHPLNATKSKLKRIPLEPARAGAEDGSPIDNTVTDPGTETTTDKESMAHETSTTAAGHKLQVCICGWEKITSVKGLKIHQGRKKCLREQRHGPRIDQYFLRSNQSNQSSEAQRQDSNQSSQSISTHVTEEGDTSTEMPVEEPTQQRQRLPLEGKIKGHKPGVKWPKAVEKKEWETVNSDLIHILEQQAGTAVEKLERMGNTIYSYGEERFGVSKGRGGKKLPTPIKSRRQQEIERLIRERRQLKKQWKKATEAEREGLMLLQEDIKSRLATLRKAENLRKLRRKKEHTRTRFYKDPFKFIKDLFAKEKSGTLKTSKRELEEHLEKAHQDTKRHEQLVIPHDIPPIQPPEFNLDTSPPRWKEVENTVRRARAASAPGPNGVPYKLYKNAPDVLRFLWKLMRVVWKKQTIPKAWRRAGGVLIPKEKDASDISQFRPICLLNVEGKIFFSIVSQRLSTYLVTNKYIDTSVQKAGIPGFSGCLEHTSMIWHQIQAAKKEKRDLHVIFLDLANAFGSVPHELLWESFAFFHVPELITRLVKSYFQDLQLCFTTADFSTTWQRLEVGIMAGCTVSPLAFTMAMEVIIRASKWVVGGERTRAGLRLPPIRAYMDDMTTLTTTAACTKRLLGKLQENIKWARMKIKPSKSRSISIVKGVLRDTRFCIGDDPIPTVSEQPVKSLGRWYNASLKDKEQVEQLRQEIVNGLENINKTLLPGKLKLWCLQFGLLPRTMWPLTIYEAPITTVQKMERTITSYAKKWLGVPRCLTNIGLYGKGVLELPLTSLTEEYKCSKVRLQMTLRDSRDKTISAVAPPLVTGRKWTPSDAVQQASSALRHKDIVGQVQQGRGGFGLTTSKPTWRKATTSERRTLVVEEVRRQEEAARSAKAVSLAKQGQWMQWEGVERRKISWKELWEMEASKISFIIRATYDVLPSPKNLHQWYGEDPTCALCPTPATLKHIMVGCKTSLKQGRYTWRHNQVLKSLASALENRRCATNSLPPRASNPLPLRATTFVREGQKTSKHPSTRSEEGNLCRARDWRMLADIGRQLVFPREIASTNLRPDLVFWSPSQKTAYIIELTVPWENSVEEAYERKKLRYAELAAEATQRGWNTKVYPVEVGCRGFVASSTIRLLKELGIHGQALRKTIRSLSEAAERSSRWIWLKRKDPCWAPSISG

SEQ ID NO: 8973 - protein, 1180 aa, Amblyraja radiata
MIAVPNAVSVSWRHPLNATKSKLKRIPLEPARAGAEDGSPIDNTVTDQGTETTTDKESMAHETSTTAAGHKLQVCICGWEKITSVKGLKIHQGRKKCLREQRHGPRIDQYFLRSNQSNQSSEAQRQDSNQSSQSISTHVTEEGDTSTEMPVEEPTQQRQRPPLEGKIKGHKPGVKWPKAVEKKEWETVNSDLIHILEQQAGTAVEKLERMGNTIYSYGEERFGVSKGRGGKKLPTPIKSRRQQEIERLIRERRQLKKQWKKATEAEREGLMLLQEDIKSRLATLRKAENLRKLRRKKEHTRTRFYKDPFKFIKDLFAKEKSGTLKTSKRELEEHLEKAHQDTKRHEQLVIPHDIPPIQPPEFNLDTSPPRWKEVENTVRRARAASAPGPNGVPYKLYKNAPDVLRFLWKLMRVVWKKQTIPKAWRRAGGVLIPKEKDASDISQFRPICLLNVEGKIFFSIVSQRLSTYLVTNKYIDTSVQKAGIPGFSGCLEHTSMIWHQIQAAKKEKRDLHVIFLDLANAFGSVPHELLWESFAFFHVPELITTLVKSYFQDLQLCFTTADFSTTWQRLEVGIMAGCTVSPLAFTMAMEVIIRASKWVVGGERTRAGLRLPPIRAYMDDMTTLTTTAACTKRLLGKLQENIKWARMKIKPCKSRSISIVKGVLRDTRFCIGDDPIPTVSEQPVKSLGRWYNASLKDKEQVEQLRQEIVNGLENINQTLLPGKLKLWCLQFGLLPRTMWPLTIYEAPITTVEKMERTITSYAKKWLGVPRCLTNIGLYGKGVLELPLTSLTEEYKCSKVRLQMTLRDSRDKTISAVAPPLVTGRKWTPSDALQQASSALRYKDIVGQVQQGRGGFGLTTSKPTWRKATTSERRTLVVEEVRRQEEAARSAKAVSLAKQGQWMQWEGVERRKISWKELWEMEASKISFIIRATYDVLPSPKNLHQWYGEDPTCALCPTPATLKHIMVGCKTSLTQGRYTWRHNQVLKSLASALENRRCATNSLPLRASNPLPLRATTFVREGQKTSKHPSTRSEEGNLCRARDWRMLADIGRQLVFPPEIASTNLRPDLVFWSPSQKTAYIIELTVPWENSVEEAYERKKLHYAELAAEATQRGWNTKVYPVEVGCRGFVASSTIRLLKELGIHGQALRKTIRSLSEAAERSSRWIWLKRKDPCWAPSISG

SEQ ID NO: 8974 - protein, 1032 aa, Amblyraja radiata
MPVEEPTQQRQRPPLEGKIKGHKPGVKWPKAVEKKEWETVNSDLIHILEQQAGTAVEKLERMGNTIYSYGEERFGVSKGRGGKKLPTPIKSRRQQEIERLIRERRQLKKQWKKATEAEREGLMLLQEDIKSRLATLRKAENLRKLRRKKEHTRTRFYKDPFKFIKDLFAKEKSGTLKTSKRELEEHLEKAHQDTKRHEQLVIPHDIPPIHPPEFNLDTSPPRWKEVENTVRRARAASAPGPNGVPYKLYKNAPDVLRFLWKLMRVVWKKQTIPKAWRRAGGVLIPKEKDASDISQFRPICLLNVEGKIFFSIVSQRLSTYLVTNKYIDTSVQKAGIPGFSGCLEHTSMIWHQIQAAKKEKRDLHVIFLDLANAFGSVPHELLWESFAFFHVPELITTLVKSYFQDLQLCFTTADFSTTWQRLEVGIMAGCTVSPLAFTMAMEVIIRASKWVVGGERTRAGLRLPPIRAYMDDMTTLTTTAACTKRLLGKLQENIKWARMKIKPSKSRSISIVKGVLRDTRFCIGDDPIPTVSEQPVKSLGRWYNASLKDKEQVEQLRQEIVNGLENINQTLLPGKLKLWCLQFGLLPRTMWPLTIYEAPITTVEKMERTITSYAKKWLGVPRCLTNIGLYGKGVLELPLTSLTEEYKCSKVRLQMTLRDSRDKTISAVAPPLVTGRKWTPSDAVQQASSALRYKDIVGQVQQGRGGFGLTTSKPTWRKATTSERRTLVVEEVRRQEEAARSAKSVSLAKQGQWMQWEGVERRKISWKELWEMEASKISFIIRATYDVLPSPKNLHQWYGEDPTCALCPTPATLKHIMVGCKTSLTQGRYTWRHNQVLKSLASALENRRCATNSLPPRASNPLPLRATTFVREGQKTSKHPSTRSEEGNLCRARDWRMLADIGRQLVFPPEIASTNLRPDLVFWSPSQKTAYIIELTVPWENSVEEAYERKKLRYAELAAEATQRGWNTKVYPVEVGCRGFVASSTIRLLKELGIHGQALRKTIRSLSEAAERSSRWIWLKRKDPCWAPSISG

SEQ ID NO: 8975 - protein, 910 aa, Amblyraja radiata
MLLQEDIKSRLATLRKAENLRKLRRKKEHTRTRFYKDPFKFIKDLFAKGKSGTLKTSKRELEEHLEKAHQDTKRHEQLVIPHDIPPIQPPEFNLDTSPPRWKEVENTVRRARAASAPGPNGVPYKLYKNAPDVLRFLWKLMRVVWKKQTIPKAWRRAGGVLIPKEKDASDISQFRPICLLNVEGKIFFSIVSQRLSTYLVTNKYIDTSVQKAGIPGFSGCLEHTSMIWHQIQAAKKEKRDLHVIFLDLANAFGSVPHELLWESFAFFHVPELITTLVKSYFQDLQLCFTTADFSTTWQRLEVGIMAGCTVSPLAFTMAMEVIIRASKWVVGGERTRAGLRLPPIRAYMDDMTTLTTTAACTKRLLGKLQENIKWARMKIKPSKSRSISIVKGVLRDTRFCIGDDQIPTVSEQPVKSLGRWYNASLKDKEQVEQLRQEIVNGLENINQTLLPGKLKLWCLQFGLLPRTMWPLTIYEAPITTVEKMERTITSYAKKWLGVPRCLTNIGLYGKGVLELPLTSLTEEYKCSKVRLQMTLRDSRDKTISAVAPPLVTGRKWTPSDAVQQASSALRHKDIVGQVQQGRGGFGLTTSKPTWRKATTSERRTLVVEEVRRQEEAARSAKAVSLAKQGQWMQWEGVERRKISWKELWEMEASKISFIIRATYDVLPSPKNLHQWYGEDPTCALCPTPATLKHIMVGCKTSLTQGRYTWRHNQVLKSLASALENRRCATNSLPPRASNPLPLRATTFVREGQKTSKHPSTRSEEGNLCRARDWRMLADIGRQLVFPPEIASTNLRPDLVFWSPSQKTAYIIELTVPWENSVEEAYERKKLRYAELAAEATQCGWNTKVYPVEVGCRGFVASSTIRLLKELGIHGQALRKTIRSLSEAAERSSRWIWLKRKDPCWAPSISG

SEQ ID NO: 8976 - protein, 1032 aa, Amblyraja radiata
MPVEEPTQQRQRPPLEGKIKGHKPGVKWPKAVEKKEWETVNSDLIHILEQQAGTAVEKLERMGNTIYSYGEERFGVSKGRGGKKLPTPIKSRRQQEIERLIRERRQLKKQWKKATEAEREGLMLLQEDIKSRLATLRKAENLRKLRRKKEHTRTRFYKDPFKFIKDLFAKEKSGTLKTSKRELEEHLEKAHQDTKRHEQLVIPHDIPPIQPPEFNLDTSPPRWKEVENTVRRARAASAPGPNGVPYKLYKNAPDVLRFLWKLMRVVWKKQTIPKAWRRAGGVLIPKEKDASDISQFRPICLLNVEGKIFFSIVSQRLSTYLVTNKYIDTSVQKAGIPGFSGCLEHISMIWHQIQAAKKEKRDLHVIFLDLANAFGSVPHELLWESFAFFHVPELITTLVKSYFQDLQLCFTTADFSTTWQRLEVGIMAGCTVSPLAFTMAMEVIIRASKWVVGGERTRAGLRLPPIRAYMDDMTTLTTTAACTKRLLGKLQENIKWARMKIKPCKSRSISIVKGVLRDTRFCIGDDPIPTVSEQPVKSLGRWYNASLKDKEQVEQLRQEIVNGLENINQTLLPGKLKLWCLQFGLLPRTMWPLTIYEAPITTVEKMERTITSYAKKWLGVPRCLTNIGLYGKGVLELPLTSLTEEYKCSKVRLQMTLRDSRDKTISAVAPPLVTGRKWTPSDALQQASSALRYKDIVGQVQQGRGGFGLTTSKPTWRKATTSERRTLVVEEVRRQEEAARSAKAVSLAKQGQWMQWEGVERRKISWKELWEMEASKISFIIRATYDVLPSPKNLHQWYGEDPTCALCPTPATLKHIMVGCKTSLTQGRYTWRHNQVLKSLASALENRRCATNSLPPRASNPLPLRATTFVREGQKTSKHPSTRSEEGNLCRARDWRMLADIGRQLVFPPEIASTNLRPDLVFWSPSQKTAYIIELTVPWENSVEEAYERKKLHYAELAAEATQRGWNTKVYPVEVGCRGFVASSTIRLLKELGIHGQALRKTIRSLSEAAERSSRWIWLKRKDPCWAPSISG

SEQ ID NO: 8977 - protein, 1180 aa, Amblyraja radiata
MIAVPNAVSVSWRHPLNATKSKLKRIPLEPARAGAEDGSPIDNTVTDPGTETTTDKESMAHETSTTAAGHKLQVCICGWEKITSVKGLKIHQGKKKCLREQRHGPRIDQYFLRSNQSNQSSEAQRQDSNQSSQSISTHVTEEGDTSTEMPVEEPTQQRQRPPLEGKIKGHKPGVKWPKAVEKKEWETVNSDLIHILEQQAGTAVEKLERMGNTIYSYGEERFGVSKGRGGKKLPTPIKSRRQQEIERLIRERRQLKKQWKKATEAEREGLMLLQEDIKSRLATLRKAENLRKLRRKKEHTRTRFYKDPFKFIKDLFAKEKSGTLKTSKRELEEHLEKAHQDTKRHEQLVIPHDIPPIQPPEFNLDTSPPRWKEVENTVRRARAASAPGPNGVPYKLYKNAPDVLRFLWKLMRVVWKKQTIPKAWRRAGGVLIPKEKDASDISQFRPICLLNVEGKIFFSIVSQRLSTYLVTNKYIDTSVQKAGIPGFSGCLEHTSMIWHQIQAAKKEKRDLHVIFLDLANAFGSVPHELLWESFAFFHVPELITTLVKSYFQDLQLCFTTADFSTTWQRLEVGIMAGCTVSPLAFTMAMEVIIRASKWVVGGERTRAGLRLPPIRAYMDDMTTLTTTAACTKRLLGKLQENIKWARMKIKPSKSRSISIVKGVLRDTRFCIGDDPIPTVSEQPVKSLGRWYNASLKDKEQVEQLRQEIVNGLENINQTLLPGKLKLWCLQFGLLPRTMWPLTIYEAPITTVEKMERTITSYAKKWLGVPRCLTDIGLYGKGVLELPLTSLTEEYKCSKVRLQMTLRDSRDKTISAVAPPLVTGRKWTPSDAVQQASSALRYKDIVGQVQQGRGGFGLTTSKPTWRKATTSERRTLVVEEVRRQEEAARSAKAVSLAKQGQWMQWEGVERRKISWKELWEMEASKISFIIRATYDVLPSPKNLHQWYGEDPTCALCPTPATLKHIMVGCKTSLTQGRYTWRHNQVLKSLASALENRRCATNSLPPRASNPLPLRATTFVREGQKTSKHPSTRSEEGNLCRARDWRMLADIGRQLVFPPEIASTNLRPDLVFWSPSQKTAYIIELTVPWENSVEEAYERKKLRYAELAAEATQRGWNTKVYPVEVGCRGFVASSTIRLLKELGIHGQALRKTIRSLSEAAERSSRWIWLKRKDPCWAPSISG

SEQ ID NO: 8978 - protein, 1303 aa, Amblyraja radiata
MHIYTYIIYTYIHIDIDIENTYIHTYIYIHILHIHIYIHTYIYIYIYIYIYIYIYTYIHTYIYTYIYTYIYTHIYIHIYTHIYIYINIYTHIYIHIYTHIYIHIYIHIYTHIYIYIYTYIYIYIHIHIYIYTYIYTYIYIHIYIYTYIYIHIYTYIYTYIYIYIYIYIHIQGTETTTDKESMAHETSTTAAGHKLQVCICGWEKITSVKGLKIHQGRKKCLREQRHGPRIDQYFLRSNQSNQSSEAQRQDSNQSSQSISTHVTEEGDTSTEMPVEEPTQQRQRPPLEGKIKGHKPGVKWPKAVEKKEWETVNSDLIHILEQQAGTAVEKLERMGNTIYSYGEERFGVSKGRGGKKLPTPSKSRRQQEIERLIRERRQLKKQWKKATEAEREGLMLLQEDIKSRLATLRKAENLRKLRRKKEHTRTRFYKDPFKFIKDLFAKEKSGTLKTSKRELEEHLEKAHQDTKRHEQLVIPHDIPPIQPPEFNLDTSPPRWKEVENTVRRARAASAPGPNGVPYKLYKNAPDVLRFLWKLMRVVWKKQTIPKAWRRAGGVLIPKEKDASDISQFRPICLLNVEGKIFFSIVSQRLSTYLVTNKYIDTSVQKAGIPGFSGCLEHTSMIWHQIQAAKKEKRDLHVIFLDLANAFGSVPHELLWESFAFFHVPELITTLVKSYFQDLQLCFTTADFSTTWQRLEVGIMAGCTVSPLAFTMAMEVIIRASKWVVGGERTRAGLRLPPIRAYMDDMTTLTTTAACTKRLLGKLQENIKWARMKIKPCKSRSISIVKGVLRDTRFCIGDDPIPTVSEQPVKSLGRWYNASLKDKEQVEQLRQEIVNGLENINQTLLPGKLKLWCLQFGLLPRTMWPLTIYEAPITTVEKMERTITSYAKKWLGVPRCLTNIGLYGKGVLELPLTSLTEEYKCSKVRLQMTLRDSRDKTISAVAPPLVTGRKWTPSDALQQASSALRYKDIVGQVQQGRGGFGLTTSKPTWRKATTSERRTLVVEEVRRQEEAARSAKAVSLAKQGQWMQWEGVERRKISWKELWEMEASKISFIIRATYDVLPSPKNLHQWYGEDPTCALCPTPATLKHIMVGCKTSLTQGRYTWRHNQVLKSLASALENRRCATNSLPPRASNPLPLRATTFVREGQKTSKHPSTRSEEGNLCRARDWRMLADIGRQLVFPPEIASTNLRPDLVFWSPSQKTAYIIELTVPWENSVEEAYERKKLHYAELAAEATQRGWNTKVYPVEVGCRGFVASSTIRLLKELGIHGQALRKTIRSLSEAAERSSRWIWLKRKDPCWAPSISG

SEQ ID NO: 8979 - protein, 910 aa, Amblyraja radiata
MLLQEDIKSRLATLRKAENLRKLRRKKEHTRTRFYKDPFKFIKDLFAKEKSGTLKTSKRELEEHLEKAHQDTKRHEQLVIPHDIPPIQPPEFNLDTSPPRWKEVENTVRRARAASAPGPNGVPYKLYKNAPDVLRFLWKLMRVVWKKQTIPKAWRRAGGVLIPKEKNASDISQFRPICLLNVEGKIFFSIVSQRLSTYLVTNKYIDTSVQKAGIPGFSGCLEHTSMIWHQIQAAKKEKRDLHVIFLDLANAFGSVPHELLWESFAFFHVPELITTLVKSYFQDLQLCFTTADFSTTWQRLEVGIMAGCTVSPLAFTMAMEVIIRASKWVVGGERTRAGLRLPPIRAYMDDMTTLTTTAACTKRLLGKLQENIKWARMKIKPCKSRSISIVKGVLRDTRFCIGDDPIPTVSEQPVKSLGRWYNASLKDKEQVEQLRQEIVNGLENINQTLLPGKLKLWCQQFGLLPRTMWPLTIYEAPITTVEKMERTITSYAKKWLGVPRCLTNIGLYGKGVLELPLTSLTEEYKCSKVRFQMTLRDSRDKTISAVAPPLVTGRKWTPSDALQQASSALRYKDIVGQVQQGRGGFGLTTSKPTWRKATTSERRTLVVEEVRRQEEAARSAKAVSLAKQGQWMQWEGVERRKISWKELWEMEASKISFIIRATYDVLPSPKNLHQWYGEDPTCALCPTPATLKHIMVGCKTSLTQGRYTWRHNQVLKSLASALENRRCATNSLPPRASNPLPLRATTFVREGQKTSKHPSTRSEEGNLCRARDWRMLADIGRQLVFPPEIASTNLRPDLVFWSPSQKTAYIIELTVPWENSVEEAYERKKLRYAELAAEATQRGWNTKVYPVEVGCRGFVASSTIRLLKELGIHGQALRKTIRSLSEAAERSSRWIWLKRKDPCWAPSISG

SEQ ID NO: 8980 - protein, 1180 aa, Amblyraja radiata
MIAVPNAVSVSWRHPLNATKSKLKRIPLEPARAGAEDGSPIDNTVTDQGTETTTDKESMAHETSTTAAGHKLQVCICGWEKITSVKGLKIHQGRKKCLREQRHGPRIDQYFLRSNQSNQSSEAQRQDSNQSSQSISTHVTEEGDTSTEMPVEEPTQQRQRPPLEGKIKGHKPGVKWPKAVEKKEWETVNSDLIHILEQQAGTAVEKLERMGNTIYSYGEERFGVSKGRGGKKLPTPIKSRRQQEIERLIRERRQLKKQWKKATEAEREGLMLLQEDIKSRLATLRKAENLRKLRRKKEHTRTRFYKDPFKFIKDLFAKEKSGTLKTSKRELEEHLEKAHQDTKRHEQLVIPHDIPPIQPPEFNLDTSPPRWKEVENTVRRARAASAPGPNGVPYKLYKNAPDVLRFLWKLMRVVWKKQTIPKAWRRAGGVLIPKDKNASDISQFRPICLLNVEGKIFFSIVSQRLSTYLVTNKYIDTSVQKAGIPGFSGCLEHTSMIWHQIQAAKKEKRDLHVIFLDLANAFGSVPHELLWESFAFFHVPELITTLVKSYFQDLQLCFTTADFSTTWQRLEVGIMAGCTVSPLAFTMAMEVIIRASKWVVGGERTRAGLRLPPIRAYMDDMTTLTTTAACTKRLLGKLQENIKWARMKIKPCKSRSISIVKGVLRDTRFCIGDDPIPTVSEQPVKSLGRWYNASLKDKEQVEQLRQEIVNGLENINQTLLPGKLKLWCLQFGLLPRTMWPLTIYEAPITTVEKMERTITSYAKKWLGVPRCLTNIGLYGKGVLELPLTSLTEEYKCSKVRLQMTLRDSRDKTISVVAPPLVTGRKWTPSDALQQASSALRYKDIVGQVQQGRGGFGLTTSKPTWRKATTSERRTLVVEEVRRQEEAARSAKAVSLAKQGQWMQWEGVERRKISWKELWEMEASKISFIIRATYDVLPSPKNLHQWYGEDPTCALCPTPATLKHIMVGCKTSLTQGRYTWRHNQVLKSLASALENRRCATNSLPPRASNPLPLRATTFVREGQKTSKHPSTRSEEGNLCRARDWRMLADIGRQLVFPPEIASTNLRPDLVFWSPSQKTAYIIELTVPWENSVEEAYERKKLHYAELAAEATQRGWNTKVYPVEVGCRGFVASSTIRLLKELGIHGQALRKTIRSLSEAAERSSRWIWLKRKDPCWAPSISG

SEQ ID NO: 8981 - protein, 1180 aa, Amblyraja radiata
MIAVPNAVSVSWRHPLNATKSKLKRIPLEPARAGAEDGSPIDNTVTDPGTETTTDKESMAHETSTTAAGHKLQVCICGWEKITSVKGLKIHQGRKKCLREQRHGPRIDQYFLRSNQSNQSSEAQRQDSNQSSQSISTHVTEEGDTSTEMPVEEPTQQRQRPPLEGKIKGHKPGVKWPKAVEKKEWETVNSDLIHILEQQAGTAVEKLERMGNTIYSYGEERFGVSKGRGGKKLPTPIKSRRQQEIERLIRERRQLKKQWKKATEAEREGLMLLQEDIKSRLATLRKAENLRKLRRKKEHTRTRFYKDPFKFIKDLFAKEKSGTLKTSKRELEEHLEKAHQDTKRHEQLVIPHDIPPIQPPEFNLDTSPPRWKEVENTVRRARAASAPGPNGVPYKLYKNAPDVLRFLWKLMRVVWKKQTIPKAWRRAGGVLIPKEKDASDISQFRPICLLNVEGKIFFSIVSQRLSTYLVTNKYIDTSVQKAGIPGFSGCLEHTSMIWHQIQAAKKEKRDLHVIFLDLANAFGSVPHELLWESFAFFHVPELITTLVKSYFQDLQLCFTTADFSTTWQRLEVGIMAGCTVSPLAFTMAMEVIIRASKWVVGGERTRAGLRLPPIRAYMDDMTTLTTTAACTKRLLGKLQENIKWARMKIKPCKSRSSSIVKGVLRDTRFCIGDDPIPTVSEQPVKSLGRWYNASLKDKEQVEQLRQEIVNGLENINQTLLPGKLKLWCLQFGLLPRTMWPLTIYEAPITTVEKMERTITSYAKKWLGVPRCLTNIGLYGKGVLELPLTSLTEEYKCSKVRLQMTLRDSRDKTISAVAPPLVTGRKWTPSDAVQQASSALRYKDIVGQVQQGRGGFGLTTSKPTWRKATTSERRTLVVEEVRRQEEAARSAKAVSLAKQGQWMQWEGVERRKISWKELWEMEASKISFIIRVTYDVLPSPKNLHQWYGEDPTCALCPTPATLKHIMVGCKTSLTQGRYTWRHNQVLKSLASALENRRCATNSLPPRASNPLPLRATTFVREGQKTSKHPSTRSEEGNLCRARDWRMLADIGRQLVFPPEIASTNLRPDLVFWSPSQKTAYIIQLTVPWENSVEEAYERKKLRYAELAAEATQRGWNTKVYPVEVGCRGFVASSIIRLLKELGIHGQALRKTIRSLSEAAERSSRWIWLKRKDPCWAPSISG

SEQ ID NO: 8982 - protein, 1122 aa, Amblyraja radiata
MAHETSTTAAGHKLQVCICGWEKITSVKGLKIHQGRKKCLREQRHGPCIDQYFLRSNQSNQSSEAQRQDSNQSSQSISTHVTEEGDTSTEMPVEEPTQQRQRPPLEGKIKGHKPGVKWPKAVEKKEWETVNSDLIHILEQQAGTAVEKLERMGNTIYSYGEERFGVSKGRGGKKLPTPIKSRRQQEIERLIRERRQLKKQWKKATEAEREGLMLLQEDIKSRLATLRKAENLRKLRRKKEHTRTRFYKDPFKFIKDLFAKEKSGTLKTSKRELEEHLEKAHQDTKRHEQLVIPHDIPPIQPPEFNLDTSPPRWKEVENTVRRARAASAPGPNGVPYKLYKNAPDVLRFLWKLMRVVWKKQTIPKAWRRAGGVLIPKEKNASDISQFRPICLLNVEGKIFFSIVSQRLSTYLVTNKYIDTSVQKAGIPGFSGCLEHTSMIWHQIQAAKKEKRDLHVIFLDLANAFGSVPHELLWESFAFFHVPELITTLVKSYFQDLQLCFTTADFSTTWQRLEVGIMAGCTVSPLAFTMAMEVIIRASKWVVGGERTRAGLRLPPIRAYMDDMTTLTTTAACTKRLLGKLQENIKWARMKIKPCKSRSISIVKGVLRDTRFCIGDDPIPTVSEQPVKSLGRWYNASLKDKEQVEQLRQEIVNGLENINQTLLPGKLKLWCLQFGLLPRTMWPLTIYEAPITTVEKMERTITSYAKKWLGVPRCLTNIGLYGKGVLELPLTSLTEEYKCSKVRLQMTLRDSRDKTISAVAPPLVTGRKWTPSDALQQASSALRYKDIVGQVQQGRGGFGLTTSKPTWRKATTSERRTLVVEEVRRQEEAARSAKAVSLAKQGQWMQWEGVERRKISWKELWEMEASKISFIIRATYDVLPSPKNLHQWYGEDPTCALCPTPATLKHIMVGCKTSLTQGRYTWRHNQVLKSLASALENRRCATNSLPPRASNPLPLRATTFVREGQKTSKHPSTRSEEGNLCRARDWRMLADIGRQLVFPPEIASTNLRPDLVFWSPSQKTAYIIELTVPWENSVEEAYERKKLHYAELAAEATQRGWNTKVYPVEVGCRGFVASSTIRLLKELGIHGQALRKTIRSLSEAAERSSRWIWLKRKDPCWAPSISG

SEQ ID NO: 8983 - protein, 1032 aa, Amblyraja radiata
MPVEEPTQQRQRPPLEGKIKGHKPGVKWPKAVEKKEWETVNSDLIHILEQQAGTAVEKLERMGNTIYSYGEERFGVSKGRGGKKLPTPIKSRRQQEIERLIRERRQLKKQWKKATEAEREGLMLLQEDIKSRLATLRKAENLRKLRRKKEHTRTRFYKDPFKFIKDLFAKEKSGTLKTSKRELEEHLEKAHQDTKRHEQLVIPHDIPPIQPPEFNLDTSPPRWKEVENTVRRARAASAPGPNGVPYKLYKNAPDVLRFLWKLMRVVWKKQTIPKAWRRASGVLIPKEKNASDISQFRPICLLNVEGKIFFSIVSQRLSTYLVTNKYIDTSVQKAGIPGFSGCLEHTSMIWHQIQAAKKEKRDLHVIFLDLANAFGSVPHELLWESFAFFHVPELITTLVKSYFQDLQLCFTTADFSTTWQRLEVGIMAGCTVSPLAFTMAMEVIIRASKWVVGGERTRAGLRLPPIRAYMDDMTTLTTTAACTKRLLGKLQENIKWARMKIKPCKSRSISIVKGVLRDTRFCIGDDPIPTVSEQPVKSLGRWYNASLKDKEQVEQLRQEIVNGLENINQTLLPGKLKLWCLQFGLLPRTMWPLTIYEAPITTVEKMERTITSYAKKWLGVPRCLTNIGLYGKGVLELPLTSLTEEYKCSKVRLQMTLRDSRDKTISAVAPPLVTGRKWTPSDALQQASSALRYKDIVGQVQQGRGGFGLTTSKPTWRKATTSERRTLVVEEVRRQEEAARSAKAVSLAKQGQWMQWEGVERRKISWKELWEMEASKISFIIRATYDVLPSPKNLHQWYGEDPTCALCPTPATLKHIMVGCKTSLTQGRYTWRHNQVLKSLASALENRRCATNSLPPRASNPLPLRATTFVREGQKTSKHPSTRSEEGNLCRARDWRMLVDIGRQLVFPPEIASTNLRPDLVFWSPSQKTAYIIELTVPWENSVEEAYERKKLHYAELAAEATQRGWNTKVYPVEVGCRGFVASSTIRLLKELGIHGQALRKTIRSLSEAAERSSRWIWLKRKDPCWAPSISG

SEQ ID NO: 8984 - protein, 1032 aa, Amblyraja radiata
MPVEEPTQQRQRPPLEGKIKGHKPGVKWPKAVEKKEWETVNSDLIHILEQQAGTAVEKLERMGNTIYSYGEERFGVSKGRGGKKLPTPIKSRRQQEIERLIRERRQLKKQWKKATEAEREGLMLLQEDIKSRLATLRKAENLRKLRRKKEHTRTRFYKDPFKFIKDLFAKEKSGTLKTSKRELEEHLEKAHQDTKRHEQLVIPHDIPPIQPPEFNLDTSPPRWKEVENTVRRARAASAPGPNGVPYKLYKNAPDVLRFLWKLMRVVWKKQTIPKAWRRAGGVLIPKEKDASDISQFRPICLLNVEGKIFFSIVSQRLSTYLVTNKYIDTSVQKAGIPGFSGCLEHTSMIWHQIQAAKKEKRDLHVIFLDLANAFGSVPHELLWESFAFFHVPELITTLVKSYFQDLQLCFTTADFSTTWQRLEVGIMAGCTVSPLAFTMAMEVIIRASKWVVGGERTRAGLRLPPIRAYMDDMTTLTTTAACTKRLLGKLQENIKWARMKIKPSKSRSISIVKGVLRDTRFCIGDDPIPTVSEQPVKSLGRWYNASLKDKEQVEHLRQEIVNGLENINQTLLPGKLKLWCLQFGLLPRTMWPLTIYEAPITTVEKMERTITSYAKKWLGVPRCLTNIGLHGKGVLELPLTSLTEEYKCSKVRLQMTLRDSRDKTISAVAPPLVTGRKWTPSDAVQQASSALRYKDIVGQVQQGRGGFGLTTSKPTWRKATTSERRTLVVEEVRRQEEAARSAKAVSLAKQGQWMQWEGVERRKISWKELWEMEASKISFIIRATYDVLPSPKNLHQWYGEDPTCALCPTPATLKHIMVGCKTSLTQGRYTWRHNQVLKSLASALENRRCATNSLPPRASNPLPLRATIFVREGQKTSKHPSTRSEEGNLCRARDWRMLADIGRQLVFPPEIASTNLRPDLVFWSPSQKTAYIIELTVPWENSVEEAYERKKLRYAELAAEATQRGWNTKVYPVEVGCRGFVASSTIRLLKELGIHGLALRKTIRSLSEAAERSSRWIWLKRKDPCWAPSISG

SEQ ID NO: 8985 - protein, 1051 aa, Beryx splendens
MKHSNWTQTIVCSASVPLSWRTTTEVELTTGVKLTQPPSPAIERRLPGHRPYVKWPGASDKKLWETVNTDLTLTLEKLRGTVEKKLERMGDIIYEYGAERFGVQEAKGGKKVPTPPVSRRQQEIKRLVQERRQLRKQWKKALEVEKEGIEALQADIKTRLASLRRAENLRKRRRKKEQTRTRFYKDPFKFLKSLFTKEKSGALKTTKKVLEEHLRTTNLDSKRHEHLAIPSDIPSIEPPEHHIETSPPTWKEVENTVRRARTASAPGPNGVPYKVYKNAPDVLRFLWRLMRTAWQKKIIPKVWRRAGGVLIPKEKDAVNISQFRPISLLNAEGKIFFSVIAQRMAEYLQRNAYVDTSVQKAGISGFSGCLEHSSMIWHQIQMAKVEKRDLHVVFLDLANAFGSVPHELLWSAFRFFHIPDTITTLVKSYFQDLQFCFATSEFTTSWQCLNVGIMAGCTISPLAFTMAMEVIIRASKWVVGGQRVDSGFRLPPLRAYMDDITTLTTTVPCTRRLLRKLEENISWARMRIKPSKSRSISIVKGVLSDLKFFIGDDPIPTVSEQPVKSLGRWYDASLKDKDQVQQLRKDISSSLQSIDNTQLPGKLKAWCLQFGLLPRVLWPLAVYEVPISTVEKMERGVTGYLKKWLGVPRCLTTIGLYGDGVLKLPLTSLTEEFKCAKARLQMTLNESQDPVVSNNAPTLATGRKWRPEKAVQEATAALRHADIVGHVQQGRGGLGLTPSRTAWSKATTPERRKMVVQEVRHQEEAARWAKAVSLAKQGQWTRWDSVERRKISWKDLWAMEARRLSFSIRATYDVLPTPVNLHQWYGEDPDCALCSMPANLRHILTGCKTSLTQGRYTWRHNQVLKGLASALEDKRAAINSLPPPAASHPFRTTFVREGAKPPKSGSTPSERDQLRLARDWKMLVDIGRQLVFPPEIATTTLRPDMVLWSHSFKKVFIIELTVPWEDSVDEAYERKHLRYADLAAEARLHGWNTEVRPVEVGCRGFVATSTTRLLRDLGIKGQSQCLAIRAVSEGSSQWLWMKRRDPSWAPK

SEQ ID NO: 8986 - protein, 996 aa, Amblyraja radiata
MVNSDLIHILEQQAGTAVEKLERMGNTIYSYGEERFGMSKGRGGKKLPTPIKSRRQQEIERLIRERRQLKKQWKKATAAEREGLMLLQEDIKSRLATLRKAENLRKLRKKKEHTRTWFYKDPFKFIKDLFAKEKSGTLKTSKRELEEHLEKAHQDTKRHEQLVIPHDIPPIQPPEFNLDTSPPRWKEVENTLWRARAASAPGPNGVPYKLYKNAPDVLRFLWKLMRVVWKKQTIPKAWRRAGGVLIPKEKDASDISQFRPICLLNVEGKIFFSIVSKRLSTYLVTNKYIDTSVQEAGIPGFSGCLEHTSMIWHQIQAAKKDKKDLHVIFLDLANAFGSVPHELLWESFAFFHVPELITTLVKSYFQDLQLCFTTADFSTTWQRLEVGIMAGCTVSPLAFTMAMEVIIRASKWVVGGERTRAGLRLPPIRAYMDDMTTLTTTAACTKRLLGKLQENIKWARMKIKPSKSRSISIVKGVLRDTRFCIGDDPIPTVSEQPVKSLGRWYNASLKDKEQVQQLRQEIVNGLENINQTLLPGKLKLWCLQFGLLPRTMWPLTVYEAPITTVEKMERTITSYAKKWLGVPRCLTNIGLYGKGVLELPLTSLTEEYKCSKARLQMTLRDSRDKTISAVAPPLVTGRKWIPSDAVQQASSALRHKDIVGQVQQGRGGFGLTTSKPTWRKATTSERRTLVVEEVRRQEEAARSAKAVSLAKQGQWMQWEGVEQRKISWKELWEMEASKISFIIRATYDVLPSPKNLHQWYGEDPTCALCPTPATLKHIMVGCKTSLTQGRYMWGHNQVLKSLASALENRRCATNSLPPRASNPPPPPPRATTFVREGQKTSKHPSTRSEEGNLCRARDWRMLADIGRQLIFPPEIASTNLRSDLVLWSLSQKTAYIIELTVPWENSVEEAYERKKLRYAELAAEATQRGWNTKVYPVEVGCRGFVASSTIRLLKELGIHGQALRKTIRSLSEAAERSSRWIWLKRKDPCWAPSTSG

SEQ ID NO: 8987 - protein, 966 aa, Oncorhynchus mykiss
MEDVNSSTEVTTEVEPTTGVELTEPPRPAVEWRLPGHRPYVKWPGASDKKLWETVNTDLTLTLEKLRGTVEKKFERMGDIIYEYGTERFGVEEAKGGRKVPTPPVSRRQQEIKRLVQERRQLKKQWKKASEVEKEGIEALQADIKTRLASLRRAENLRKRRRKKEQTRTRFYKDPFKFLKSLFTKEKSGALKTTKKDLEEHLRTTNFDSKRHEHLAIPSDIPPIEPPEHHIETSPPTWKEVENTVRRARTASAPGPNGVPYKVYENAPDVLRFLWRFMRTAWKNKIIPKVWRRAGGVLIAKEKDAVNISQFRPISLLNVEGKIFFRVIAQRMAEYLQRNAYVDTSVQKAGISMFSGCLEHSSMIWHQIQMAKVEKRDLHVVFLDLANAFGSVPHELLWSAFRFFHIPDTITTLVKSYFQDLQFCFTTSEFTTSWQCLNVGMMAGCTISPLACIMAMEVIIRSSKWVAGGQRVDSGFQLPPLRAYMDDITTLTTTVPCTRRLLRKLENISWARMKIKPSKSRSISIVKGVLSDLKFFIGDDQIPTVSEQPVKSLGRWYDASLKDKDQVQQLRKDISSSLQFIDNTQLPGKLKAWCLQFGVLPRVLWPLAVYEVPISTVEKMERGVTGYLKKWLGVPRCLTTIGLYGDGVLKLPLTSLTEEFKCSKTRLQMTLNESRDPVVSNNAPTLATGRKWRPGKAVQEATAALRHADIVGHVQQGRGGLGLTSRAAWSKATAPERRKMVVQEVRHQEEAARWAKAVSLSKQGQWTRWDSVEKRKISWKDLWAMEARRLSFSIRATYDVLPTPVNLHQWYGEDPDCALCSMPANLRHILTGCKTSLTQGRYTWRHNQVLKNLASTLEDKRAATNSLPPPAASHPLRTNFVREGAKPPKRSSTPLERDQLRLARDWKMLADIGQQFVFPPEIATTTPRPDMVLWSRSLKKVFIIELTVPWEDSVDEAYERKIAMPI

SEQ ID NO: 8988 - protein, 763 aa, Lethenteron reissneri
MKTAWQKKIIPKVWRRAGGVLIPKEKDAVNISQFHPISLLNVEGKIFCRVIAQRMAEYLQRNAYVDTSVQKAGISGFSGCLEHSSMIWHKIQLAKVEKRDLHEVFLDLANAFGSVPHELLWSAFRFFHIPDTITTLVKSYFQDLQFCFTTSEFTTSWQCLNVGIMAGCTISPLAFTMAMEVIIRSSKWVAGGQRVDSGFRLPPLRAYMDDITTLTTTVPCTRRLLKKLENISWARMKIKPSKSRSISIVKRVLCDLKFFIGDDQIPTVSEQPVKSLGRWYDASLKDKDQVQQLRKDISSSLQSIDNTQLPGKLKAWCLQFGLLPRVLWPLAVYEVPISTVEKMERGVTSYLKKWLGVPRCLTTIGLYGDGVLKLPLTSLTEEFKCAKTRLQMTLNESRDPVVSNNAPTLATGRKWRPGKAVQEATAALRHADIVGHVQQGRGGLGLTSRAAWSKATAPERRKMVVQEVRHQEEAARWAKAVSLAKQGQWTRWDSVEKRKISWKDLWAMEARRLSFSIRATYDVLPTPVNLHQWYGEDPDCALCSMSANLRHILTGCKTSLTQGRYTWRHNQVLKNLASALEDKRAATNSLPPPAASHPLRTTFVREGAKPPKSGSTPIERDQLHLARDWKMLADIGRQLVFPPEIATTTLRPDMVLWSRSLKKVFIIELTVPWEDSVDEAYERKHLRYADLAAEARHHGWNTEVRPVEVGCRGFVATSTTRLLRDLGIKGQSQRSAIRAVSEAAEGSSQWLWMKRKDPSWAPK

SEQ ID NO: 8989 - protein, 886 aa, Carassius auratus
MLLQGDIKCRLATLRRAENLRKLRKKKEHTRTRFYKNPFKFVKDLFAKEKSGILKIPKDELEEHLEKGNHDPKRHEQIVIPHDIPPIQPPEFNLETGPPKWKEVESTVRRARSASAPGPNGVPYKLYKNAPDVLRYLWRLMRIVWQKGIIPKGWRRAGGVLIPKEKDATDIGQFRPICLLNVEGKIFFSVIARRLSTYLEKNKYIDTSVQKAGIPGFSGCLEHTSMIWHQIQAAKKDKRDIHVIFLDLANAFGSVPHNLLWESFNFFHVPSSVTSLVKAYFEDLQLCFTTADFTTSWQRVEVGIMAGCTISPLAFTMAMEVIIRASRWVVGGERTKNGIRLPPIQAYMDDMTTLTTTAACTRRLLGKLQENIKWARMKIKPNKSRSISIVKGQLKNVKFCIGDDPIPTVSEQPVKSLGRWYNASLGDKDQVQQVRQDITNSLEDINSTLLPGKLKLWCLQFGLLPRVMWPLTVYELPITTVEKMERTMTSYIKKWLGVPRCLTNISLYGKGVLELPITSLTEEYKCSKVRLQMTLKDSRDQTISNAVPLLVTGRKWTPSDAVQQATSALKHSDIVGHVQLGRGGFGLTAGKPTWRKASTSERRKMVVEEVRRQEETERSAKAVSLVRQGQWMRWEGLERRKLSWRELWEMEASNISFIIRATYDVLPSPKNLNQWYGDILTQGRYTWRHNQVLKSLAAALESQRNTTNSLPLRAIDSITAPTFIREGQKKPKHPPTKTEAGQLAMARDWKMLVDIGQQLIFPPEIAVTTLRPDLVLWSPSLKTVYIIELTVPWENSTDEAYERKKLRYIELAADAQQRGWKAKVYPVEVGCRGFVASSTIRLLKDLGIHGQALRQTIKSVSEAAERSSQWIWIKRKDPCWAQRAST

SEQ ID NO: 8990 - protein, 1176 aa, Carassius gibelio
MAAVSDAASVCWRHPLNATESEQRNIPPEPARAGAQDGSMTDSMVTDSGTDMTTSKNTAHETTTAAAGHSLQVCTCGWAKITSFRGLRTHQGKRGCLREQRQGPRIDQYFLRSNQSNQSIEAQRREKNQSSQSISTSVPEEDNTSTEMPVEEPTQPQRPPKEEKIKGHRPSVKWPKAVEKREWEIVNNDLTKILEQQVGTAEKKLERMVDIIYHYGEERFGVNARRSNKAISAPAKSRRQQEIEILVRERRQLRKQWKKASDAEREGLMLLQGDIKCRLATLRRAENLRKLRRKKEHTRTRFYKNPFKFVKDLFAKEKSGILKIPKEELEEHLEKGNHDPKRHEQIVIPHDIPPIQLPEFNLETGPPKWKEVESIVRRARSASAPGPNGVPYKLYKNAPDVLRYLWRLMRIVWQKGIIPKGWRRAGGVLIPKEKDATDIGQFRPICLLNVEGKIFFSVIARRLSTYLEKNKYIDTSVQKAGIPGFSGCLEHTSMIWHQIQAAKKDKRDIHVIFLDLANAFGSVPHNLLWESFNFFHVPSSVTSLVKAYFEDLQLCFTTADFTTSWQRVEVGIMAGCTISPLAFTMAMEVIIRASRWVVGGERTKNGIRLPPIRAYMDDMTTLTTTAACTRRLLGKLQENIKWARMKIKPNKSRSISIVKGQLKNVKFCIGDDPIPTVSEQPVKSLGRWYNASLGDKDQVQQVRQDITNSLEDINSTLLPGKLKLWCLQFGLLPRVMWPLTVYELPITTVEKMERTMTSYIKKWLGVPRCLTNISLYGKGVLELPITSLTEEYKCSKVRLQMTLKDSRDQTISNAVPLLVTGRKWTPSDAVQQATSALKHSDIVGHVQLGRGGFGLTASKPTWRKASTSERRKMVVEEVRRQEETERSAKAVSLVRQGQWMRWEGLERRKLSWRELWEMEASNISFIIRATYDVLPSPKNLNQWYGEDPTCALCPTPATLKHILAGCKTCLTQGRYTWRHNQVLKSLAAALEIQRNTTNSLPLRAIDSITAPTFIREGQKKPKHPPTKTEAGQLAMARDWKMLVDIGQQLIFPHEIAVTTLRPDLVLWSPSLKTVYIIELTVPWENSTDEAYERKKLRYIELAADAQQRGWKAKVYPVEVGCRGFVASSTIRLLKDLGIHGQALRQTIKSVSEAAERSSQWIWIKRKDPCWAQRAST

SEQ ID NO: 8991 - protein, 1095 aa, Neogobius melanostomus
MTAVSNASGVWTHPPNATESQQRKIPLEPARAGAQDGSLIDNMASDPGMDTTTSKNTAHETSTAAAGHSLQSCTCGWVKMTSLRGLKIHQGKKGCLREQRQGPRIDSYFLRSNQPNKSIEAQRRDKKQSSQSISTLDTEEDNTSTEMPEEEPTQPQRPPREKIKGHRQSVKWPKAVERREWETVNNVLTKILDQQVGTVEKRLERMGDIIYHYGEERFGVHTWRKDKAVPAPAKSRRQQEIERLVKERRQLRKQWKKASDAERDGLTLLQGDIKSRVAILRRAENLRKLRKRKERTRTSFYKNPFKFVKDLFSKERSGILKISREKLEEHLEKVHQDTKRHEQFAIPHDIPPIQSPAFNMETGPPKWREVENTIRRARSASAPGPNGVPYKLYKNAPDVLRHLWRLMRVVWKKGVIPKAWRRAGGVLIPKEKDATDISQFRPICLLNVEGKIFFSVIAQRLSTYLEKNKYVDTSVQKAGITGFSGCLEHNSMIWHQIQAAKKNKRDLHVIFLDLANAFGSVPHNLLWESFNFFHVPSSITSLVKAYFEDLQLCFATADFTTTWQQVEVGIMAGCTISPLAFTMAMEIIIRASRWVVGGERTKNGTRLPPIRAYMDDMTILTTTAACTRRLLGKLQENIKWARLKIKPSKSRSISVVKGELKNVKFYIDDDQIPTVSEQPVKSLGRWYNASLKDKDQVHQLKQDFTSGLENINKTLLPGKLKLWCLQFGLLPRVMWPLTIYEVPITTVEKMERTMTSYAKKWLGVPRCLTNISLYGKGVLELPFTSLTEEYKCSKVRLQVMLKDSRDRTISNAAPPLLTGRKWTPSDAVEDAMSALRHNDIMGHVQLGRGGFGLADLGRGGAPSGGGRKKRKGCLSCQTGTMDEVGRVGETEAQLERALGNGGKKISFIIRATYDVFPSPKNLHQWYGDDPTCALCPTPATLHHILTGCKTSLTQGRYTWRHNQVLKTLAAALESKRNTINSLPLGATNSSMATTFIREGQEKPKHPSAKSEAGQLAEAQDWKMLVDIGQQLIFPPEIAATNLRPDLVLWSPSLKAVYIVELTVPWETSAEEAYERKKLRYTELATARMECKSLSS

SEQ ID NO: 8992 - protein, 771 aa, Amblyraja radiata
MRVVWKKQTIPKAWRRAGGVLIPKEKDASDISQFRPICLLNVEGKIFFSIVSQRLSTYLVTNKYIDTSAQKAGIPGFSGCLEHTSMIWHQIQAATKDKRDLHVIFLDLANAFGSVPYELLWESFAFFHVPELITTLVKSYFQDLQLCFTTADFSTTWQRLEVGIMAGCTVSPLVFTMAMEVIIRASKWVVGGERTRAGLRLPPIRAYMDDMTTLTTTAACTKRLLGKLQENIKWARMKIKPSKSRSISIVMGVLRDTRFCIGDDPIPTVSEQPVKSLGRWYNASLKDKEQVEQLRQEIVNGLENIDQTLLPGKLKLWCLQFGLLPRTMWPLTIYEAPITTVEKMERTITSYAKKWLGVPRCLTNIGLYGKGVLELPLTSLTEEYKCSKVRLQMTLRDSRDKTISAVAPPLVTGRKWTPSDAVQQASSALRHNDIVGQVQQGRGGFGLTTSKPTWRKATTSERRTLVVEEVRRQEEAARSAKAVSLAKQGQWMQWEGVERRKISWKELWEMEASKISFIIRATYDVLPSPKNLHQWYGEDPTCALCPTPATLKHIMVGCKTSLTQGRYTWRHNQVLKSLASALENRRCATNSLPPRASNPPPPLRATTFVREGQKTSKHPSTRSEEGNLCRARDWRMLADIGRQLVFPPEIASTNLRPDLVFWSPLKKTAYIIELTVPWENSVEEAYERKKLRYAELAAEATQRGWNTKVYPVEVGCRGFDASSTIRLLKELGIHGQALRKTIRSLSEAAERSSRWIWLKRKDPCWAPSISG

SEQ ID NO: 8993 - protein, 929 aa, Amblyraja radiata
MGNTIYSYGEERFGVSKGRGGKKLPTPIKSRRQQEIERLIRERRQLKKQWKKATEAEREGLMLLQEDIKSRLATLRKAENLRKLRKKKEHTRTRFYKDPFKFIKDLFAKEKSGTLKTSKRELEEHLEKAHQDTKRHEQLVIPHDIPPIQPPEFNLNTSPPRWKEVENTVRRARAASAPGPNGVPYKLYKNAPDVLRFLWKLMRVVWKKQTIPKAWRRAGGVLIPKEKDASDISQFRPICLLNVEGKIFFSIVSQRLSSYLVTNKYIDTSAQKAGIPGFSGCLEHTSMIWHQIQAATKDKRDLHVIFLDLANAFGSVPYELLWESFAFFHVPELITTLVKSYFQDLQLCFTTADFSTTWQRLEVGIMAGCTVSPLVFTMAMEVIIRASKWVVGGERTRAGLRLPPIRAYMDDMTTLTTTAACTKRLLGKLQENIKWARMKIKPSKSRSISIVMGVLRDTRFCIGDDPIPTVSEQPVKSLGRWYNASLKDKEQVEQLRQEIVNGLENINQTLLPGKLKLWCLQFGLLPRTMWPLTIYEAPITTVEKMERTITSYAKKWLGVPRCLTNIGLYGKGVLELPLTSLTEEYKCSKVRLQMTLRDSRDKTISAVAPPLVTGRKWTPSDAVQQASSALRHKDIVGQVQQGRGGFGLTTSKPTWRKATTSERRTLVVEEVRRQEEAARSAKAVSLAKQGQWMQWEGVERRKISWKELWEMEASKISFIIRATYDVLPSPKNLHQWYGEDPTCALCPTPATLKHIMVGCKTSLTQGRYTWRHNQVLKSLASALENRRCATNSLPPRASNPPPPLRATTFVREGQKTSKHPSTSSEEGNLCRARDWRMLADIGRQLVFPPEIASTNLRPDLVFWSPLKKTAYIIELTVPWENSVEEAYERKKLRYAELHHQRQRSVAGTPKSIQLKWDAEDLLRHLPSDC

SEQ ID NO: 8994 - protein, 1015 aa, Trinectes maculatus
MLVVKCRWLQITPDDVFVICRQDANQSSQSISTPVIEESNASTEMPVDAESNTSTEMPGDELAQPRRPPREEKIKGHRASVKWPKAVEKKEWETINNDLIKILEQQAGTAEKKLEKIGDIIYHYGEERFGVNKRRSGKAPSAPAKSRRQQEIDLLVRERRQLRKQWKKASEAEREGLTLLQVDIKSRLATLRRAENLRKLRKRKEHSRTRFYKNPFKFLKDLFTNEKSGTLKTPKQELEEHLDKVHQDTKRDEQLIIPHDIPPIQPPEFSLDINPTKWKEVENAVRRARAASAPGPNGVPYKLYKNAPDVLRFLWRLMRIVWQKEVIPKAWRRAGGVLIPKEKDATDISQFRPICLLNVEGKIFFSVIAQRLSTYLERNKYIDTAVQKAGIPGFSGCLEHTSMIWHQIQAAKKDKRDLHVIFLDLANAFGSVPHKLLWESFNFFHVPEPITTLVKAYFQDLQLCFTTTWQRLDVGIMAGCTISPLAFTMAMEVIIRASRWVVGGERTKSGLRLPPIRAYMDDMTTITTTAACTRRLLGKLQENIKWARMKIKPSKSRSVSIVKGQLKDVRFHIGDNPIPTVSEQPVKSLGRWYNESLKDQDQVQQLRRDIVNGLENINKTLLPGKLKLWCLQFGLLPRVMWPLTIYEVPITTVEKMERTITSYAKKWLGVPRCLSNTALYGKGVLELPLTSLTEEYKCSKVRLQMTLKDSKDLTISKAAPPLLTGRKWTPSNAVQQATSALRHQDIVGIVQHGRGGFGLSASKPTWHKASTSERRKLVVEEVRRQEETARSAKAVSLAKQGQWMRWEGLERRKINGSELWQMEASNISFIIRAIYDVLPSPKNLHRWYGEDPTCPLCPAPATLRHIMTGCKTSLTQGRYTWRHNQVLKSLAAALETKRSATNSLPPRTSNPIKTTTFIREGQERPRHPPATPETGHLAMARDWKMLVDIGQQLAFPPEIAFTNLRPDMVLWSPSHKSVYIIELTVPWESSVEEAFERKKLRYTEMSYPVLFVKAL

SEQ ID NO: 8995 - protein, 1057 aa, Hirundichthys speculiger
MKQAQRQDTNHSSQSISTPVIEEDNTSTDMPVDELNQSQRPPKEEKIKGHRPNVKWPKAVEKKEWETINNDLIKILEQQKGTAEKKLERMGDIIYHYGEDRFGVSIRRNGKAQPAPAKSRRQQEIEKLVRERRQLRKQWKKASEAEKEGLMLLQADIKCRLITLRRAENLRKLRKKKEHLRTRFYKNPFKFVKDLFAKDKSGILKTPKRVLEEHLEKVHQDPKRHEQIIIPHDIPPIQPPKVKLDTDPPKWKEVENIVRRARAASAPGPNGVPYRLYKNAPDVLRFLWRLMRIVWQKEIIPKAWRRAGGVLIPKEKDSTDINQFRPICLLNVEGKIFFSIIAQRLSTYLEKNNYVDTSVQKAGIPGFSGCLEHTSMIWHQIQAAKKDKRDLYVIFLDLANAFGSVPHKLLWESFNFFHVPESITTLVKAYFQDLQLCFTTPDFTTTWQRLEVGIMAGCTISPLAFTMAMEVIIRASRWVVGGERTKNGLRLPPIRAYMDDMTTLTTTPACTKRLLAKLQENIKWARMQVKPNKSRSVAIVKGQLKDVKFCIGDDPIPTVSEQPVKSLGRWYSASLKDTDQVQQLRQDIANGLERINRTLLPGKLKLWCLQFGLLPRVMWPLTMYEVPITAVEKMERTITSYAKKWLGVPRCLSNISLYGKGVLELPLTSLTEEYKCSKVRLEMTLRDSRDQTIRSAAPPVITGRKWIPSNAVQQATSALRHQDILGHIQHGRGGFGLAASKPSWRKATTSERRRKLVVEEVRRQEETVRSTKAVSLAKQGQWMRWEGLERRKINWSELWQMDTCNISFIIRAVYDVLPTPKNLHQWYGEDPTCPLCPAPATLRHILTGCKTSLTQGRYTWRHNQVLKSLAAAVEIKRNATNSLPPRSTNPLETTTFIREGQKKPKHTTTKPETGHLAMARDWKMLVDVGQQLIFPSEIATTNLRPDMVLWSPSRRSVFIIELTVPWENSVEEAYERKKLRYTELAADAIQHGWNAKVCPVEVGCRGFVASSTIRLLKELGIHGQALRQTIRSVSEAAERTSHWLWIKRKDPCWAIRT

SEQ ID NO: 8996 - protein, 1435 aa, Photinus pyralis
MKMEFKQSLGKMPLPEERQGTSGAIAGRCSMRADSDELVNRRPLVGIPETSTAERRLRRGQRPPEEDRHEETFVPASQPLVDGTSAKDTSKRRMKWDEGMNRFIFGTYLEITKMETDRTAYRGKLYHAFITQYPHLAHLTEQRIADQRRVIIKNTLLTLDTQEQIRHEIEALLNTNNTLIVQDNTPVLNNTEIQIFATPQQSIDTNNHINQTLTSLQKEFDNALLEFSNTDPTQRARIPKQSHTTKLRTLSKTLNDHILPNYINDNTSLHQLHFVVYCGAVAVSRCNGSRITTNREHHTTKKRSPPAWEKRLINRIDDIRRDLGRITQYIQGTRSSKLTRQVQHITTKLNNHTTREQNTNYNEHRDTLTQKLSIYTNRLKRYRETADRKRHNTQFKHNEKLFYRSLTQNSTNEKLIPPSLHSLQQYWSDLWTKDIKHNPHAPWITTETTRTEYITPMNNTNITTTDIIQTINHLHNWKSPGIDNIHNFWWKYFTYTHSYLAQQFTELLNSPDRTPAFFTQGITYMLPKDNNTQDPSKYRPITCLPTIYKILTSCITNKIYQHCTDNNILYEEQKGCTKYSRGCKEQLIIDSVILEQSRHNKRNIHTAYIDYKKAFDSVPHSWLQQVLSIYKVSNNITQFLNYIMSCWNTTLTLTLNDTKLITDPIQIKRGIFQGDSLSPLWFCLALNPLSYLLNTTNFGYNIKHNHEIHHNITHLFYMDDLKLYSSTSIKLNHLLHITETFSRDIQMDFGIDKCKTQHITAGKRQLLDYELEQGNLINSMDENETYKYLGFQQNTHIKHTSIKQTLITQYLQRVRSILKTKLHGRNTIKAINTYAIPVLTYSFGIIRWTNTDLEQIQRNTRTLLTKHHIHHPHSSTIRLYLPRSEGGRGLTDIKLLHQTQIHNLRQYFYNKSDTSVLHKTVTYADKSYTPLNLHETNVLPPTSKLTYITNNIQTWNQKPLHGRFPQEVSQDCVDSIATHTWLSECDVFPETEGFMLAIQDQVINTRNYKKHIHKDKTVTNDSCRLCSQTSETIQHIISACTRLAQTEYKHRHDQVAKIIHQKLALKHNLITDTTPYYKYTPQIILENNTHKLYWDRTLLTDKTIHNNRPDITLIDKAQKSICIIDIAIPNTNNLTKTHAEKHRKYTDIAIELKTQWRMKSTVIVPIILSATGVIPKTIHHNLQLLGLDKNTYKHLQKAVIINTCHIVRKFLNITQDTTYRNDPQRIHVNNSTRSQHGTQHTVISPPLTQTNTQIQLTEQTSTTNDTTYTTIRDSPLKQTTLSQPISIQPKRKSLNSTLDSQHDTQHTVIFPNLTQPTTQTQLPEQTNAINTSNATRTTKTPSPTRPSTAKKHNTLSSQKHTTLSQTQPTRTQPKRNNLNSTTGSQNTVMSPPITHATTEIQLQEQRNTINTSNATCTTKTGPSNKVTRPSTLKNT

SEQ ID NO: 8997 - protein, 1438 aa, Photinus pyralis
MKWDEGMNRFIFGTYLEITKMETDRTAYRGKLYHAFITQYPHLAHLTEQRIADQRRVIIKNTLLTLDTQEQIRHEIEALLNTNNTLTVQDNTSVLNNSEIQTFATLQPSIDTNNHTNQTLTSLQKEFDNALLEFSNTDPTQRPRIPKQSHTTKLRTLSKTLNDHILPNYINDNTSLHQLHFVVYCGAVAVSRCNGARIAINKQQHTTKKRSPPAWEKRLINRIDDIRRDLGRITQYIQGTRSSKLTRQVQHITTKLNNHTTREQNTNYNEHRDTLTQKLSIYTNRLKRYRETADTKRHNTQFKHNEKLFYRSLTQNSTNEKLIPPSLHSLQQYWFDLWTKDIKHNPHAPWITTETTRTEYITPMNNTNITTTDIIQTINHLHNWKSPGIDNIHNFWWKYFTYTHSYLAQQFTELLNSPDRTPAFFTQGITYMLPKDNNTQDPSKYRPVTCLPTIYKILTSCITNKIYQHCTDNNILYEEQKGCTKCSRGCKEQLIIDSVILEQSRHNKRNIHTAYIDYKKAFDSVPHSWLQQVLSIYKVSNNITQFLNYIMSCWNTTLTLTLNDTKLITDPIQIKRGIFQGDSLSPLWFCLALNPLSYLLNTTNFGYNIKHNHEIHHNITHLFYMDDLKLYSSTSIKLNHLLHITDTFSRDIQMDFGIDKCKTQHITAGKRQLLDYELEQGNLINSMDENETYKYLGFQQNTHIKHTSIKQTLITQYLQRVRSILTTKLHGRNTIKAINTYAIPVLTYSFGIIRWTNTDLEQIQRNTRTLLTKHHIHHPLSSTIRLYLPRSEGDRGLTDIKLLHQTQIHNLRQYFYNKSDTSVLHKTVTYADKSNTPLNLHETNVLPPTSKLTYITNNIQTWNQKPLHGRFPQEVGQDCVDPIATHSWLSECDVFPETEGFMLAIQDQVINTRNYKKHIHKDKTVTNDSCRLCSQTSETIEHIISACTRLAQTEYKHRHDQVAKIIHQKLALKHNLITDTRPYYKYTPQIILENNTHKLYWDRTLLTDKTIHNNRPDITLIDKTQKSICIIDIAIPNTNNLTKTHVEKHRKYTDIAIELKTQWRMKSTVIVPIILSATGVIPKTIQHNLQLLGLDKNTYKHLQKAVIINTCHIVRKFLNITQNTTYTNDPQRIHVNNSTRSQHGTQHTVISPPLTQTNTQIQLTEQTSTTNDTTYTTIRDSPLKQTTLSPPISIQPKRKSLNSTLNSQHDTQHTVISPPLTQPTTQTQLPEQTNAINTSNATRTTKTPSPTRPSTAKKHNTLSSQKHTTLSQTQLTRTQPKRNNLNSTTGSQNTVMSPPITHATTEIQLQEQRNTINTSNATYTTKTGPSNKVTRPSTFKKHKTPSSQKRTTFSQPTRIQPKRKNLNRTTGSQHTKISPPKTQAISQIQPQEQRNIINTSNATCTTKTGPSNKVTRPSTVKKHFSETTHSYTTETQKP

SEQ ID NO: 8998 - protein, 1162 aa, Photinus pyralis
METDRTAYRGKLYHAFITQYPHLAHLTEQRIADQRRVIIKNTLLTLDTQEQIRHEIEALLNTNNTLIVQDNTPVLNNTEIQIFATPQQSIDTNNPINQTLTSLQKEFDNALLEFSNTDPTQRARIPKQSHTTKLRTLSKTLNDHILPNYINDNTSLHQLHFVVYCGAVAVSRCNGSRITTNKEHHTTKKRSPPAWEKRLINRIDDIRRDLGRITQYIQGTRSSKLTRQVQHITTKLNNHTTREQNTNYNEHRDTLTQKLSIYTNRLKRYRETADRKRHNTQFKHNEKLFYRSLTQNSTNEKLIPPSLHSLQQYWFDLWTKDIKHNPHAPWITTETTRTEYITPMNNTNITTTDIIQTINHLHNWKSPGIDNIHNFWWKYFTYTHSYLAQQFTELLNSPDRTPAFFTQGITYMLPKDNNTQDPSKYRPITCLPTIYKILTSCITNKIYQHCTDNNILYEEQKGCTKCSRGCKEQLIIDSVILEQSRHNKRNIHTAYIDYKKAFDSVPHSWLQQVLSIYKVSNNITQFLNYIMSCWNTTLTLTLNDTKLITDPIQIKRGIFQGDSLSPLWFCLALNPLSHLLNTTNFGYNIKHNHEIHHNITHLFYMDDLKLYSSTSIKLNHLLHITETFSRDIQMDFGIDKCKTQHITAGKRQLLDYELEQGNLINSMDENETYKYLGFQQNTHIKHTSIKQTLITQYLQRVRSILKTKLHGRNTIKAINTYAIPVLTYSFGIIRWTNTDLEQIQRNTRTLLTKHHIHHPHSSSIRLYLPRSEGGRGLTDIKLLHQTQIHNLRQYFYNKSDTSVLHKTVTYADKSYTPLNLHETNVLPPTSKVTYITNNIQTWNQKPLHGRFPQEVGQDCVDSIATHSWLSECDVFPETEGFMLAIQDQVINTRNYKKHIHKDKTVTNDSCRLCSQTSETIQHIISACTRLAQTEYKHRHDQVAKIIHQKLALKHNLITDTTPYYKYTPQIILENNTHKLYWDRTLLTDKTIHNNRPDITLIDKTQKSICIIDIAIPNTNNLTKTHAEKHRKYTDIAIELKTQWRMKSTVIVPIILSATGVIPKTIHHNLQLLGLDKNTYKHLQKAVIINTCHIVRKFLNITQDTTYRNDPQRIHVNNSTRSQHGTQHTVISPPLTQTSTQIQLTEQTSTTNDTTYTTSEIHL

SEQ ID NO: 8999 - protein, 1579 aa, Photinus pyralis
MKMEFKQSLGKMPLPEERQGTSGAIAGRCSMRADSDELVNRRPLVGIPETSTAERRLRREQRPPEEDRHEETFVPASQPLVDGTSAKDTSKRRMKWDEGMNRFIFGTYLEITKMETDRTAYRGKLYHAFITQYPHLAHLTEQRIADQRRVIIKNTLLTLDTQEQIRHEIEALLNTNNTLIVQDNTPVLNNTEIQIFATPQQSIDTNNHINQTLTSLQKEFDNALLEFSNTDPTQRARIPKQSHTTKLRTLSKTLNDHILPNYINDNTSLHQLHFVVYCGAFAVSRCNGSRITTNKEHHTTKKRSPPAWEKRLINRIDDIRRDLGRITQYIQGTRSSKLTRQVQHITTKLNNHTTREQNTNYNEHRDTLTQKLSIYTNRLKRYRETADRKRHNTQFKHNEKLFYRSLTQNSTNEKLIPPSLHSLQQYWFDLWTKDIKHNPHAPWITTETTRTEYITPMNNTNITTTDIIQTINHLHNWKSPGIDNIHNFWWKYFTYTHSYLAQQFTELLNSPDRTPAFFTQGITYMLPKDNNTQDPSKYRPITCLPTIYKILTSCITNKIYQHCTDNNILYEEQKGCTKYSRGCKEQLIIDSVILEQSRNIHTAYIDYKKAFDSVPHSWLQQVLSIYKVSNNITQFLNYIMSCWNTTLTLTLNDTKLITDPIQIKRGIFQGDSLSPLWFCLALNPLSHLLNTTNFGYNIKHNHEIHHNITHLFYMDDLKLYSSTSIKLNHLLHITETFSRDIQMDFGIDKCKTQHITAGKRQLLDYELEQGNLINSMDENETYKYLGFQQNTHIKHTSIKQTLITQYLQRVRSILKTKLHGRNTIKAINTYAIPVLTYSFGIIRWTNTDLEQIQRNTRTLLTKHHIHHPHSSTIRLYLPRSEGGRGLTDIKLLHQTQIHNLRQYFYNKSDTSVLHKTVTYADKSYTPLNLHETNVLPPTSKLTYITNNIQTWNQKPLHGRFPQEVGQDCVDSIATHSWLSECDVFPETEGFMLAIQDQVINTRNYKKHIHKDKTVTNDSCRLCSQTSETIQHIISACTRLAQTEYKHRHDQVAKIIHQKLALKHNLITDTTPYYKYTPQIILENNTHKLYWDRTLLTDKTIHNNRPDITLIDKTQKSICIIDIAIPNTNNLTKTHAEKHRKYTDIAIELKTQWRMKSTVIVPIILSATGVIPKTIHHNLQLLGLDKNTYKHLQKAVIINTCHIVRKFLNITQDTTYRNDPQRIHVNNSTRSQHGTQHTVISPPLTQTNTQIQLTEQTSTTNDTTYTTIRDSPLKQTTLSQPISIPPKRKSLNSTLDSQHDTQHTVIFPNLTQPTTQTQLPEQTNAINTSNATCTTKTPSPNKVTRPSTAKKHNTLSSQKHTSLSQPTRTQRKRSNLNSTRGSQNTVMSPPIMRVTTQTQPLEQRNTINTSNATCTTKTGPPNKVTRPSTVKKRNTPSSQKQPTRIQPKRKNLDSTTSLQNTAISPPKTQATTQIQPQEQRNTTNTSNATCTTKTGPPNKVTRPSTIKKHKTPSSQKHTTLSQPTRIQPKRENLNRTTCSQHTVISPPKTQATTQIQRQEQRNTINTSNATCTTKTGPPTP

SEQ ID NO: 9000 - protein, 1155 aa, Photinus pyralis
MAINKQQHTTKKRSPPAWEKRLITRIDDIRRDLGRITQYIQGTRSSKLTRQVQHITTKLNNHTTREQNTNYNEHRDTLTQKLSIYTNRLKRYRETADRKRHNTQFKHNEKLFYRSLTQNSTNEKLIPPSLHSLQQYWSDLWTKDIKHNPHAPWITTETTRTEYITPMNNTNITTTDIIQTINHLHNWKSPGIDNIHNFWWKYFTYTHSYLAQQFTELLNSPDRTPAFFTQGITYMLPKDNNTQDPSKYRPITCLPTIYKILTSCITNKIYQHCTDNNILYEEQKRCTKCSRGCKEQLIIDSVILEQSRHNKRNIHTAYIDYKKAFDSVPYSWLQQVLSMYKVSNNITQFLNYIMSCWNTTLTLTLNDTKLITDPIQIKRGIFQGDSLSPLWFCLALNPLSYLLNTTNFGYNIKHNHEIHHNITHLFYMDDLKLYSSTSIKLNHLLHITETFSRDIQMDFGIDKCKTQHITAGKRQLLDYGLEQGNLINSMDENETYKYLGFQQNAHIKHTSIKQTLITQYLQRIRSILKTKLHGRNTIKAINTYATPVLTYSFGIIRWTNTDLEQIQRNTRTLLTKHHIHHPHSSTIRLYLPRSEGGRGLTDIKLLRQTQIHNLRQYFYNKSDTSVLHKTVTYADKSYTPLNLHETNILPPTSKLTYITNNIQTWNQKSLHGRFPQEVSQDCVDSIATHRWLSECDVFPETEGFMLAIQDQVINTRNYKKHIHKDKTVTNDSCRLCSQTSETIQHIISACTRLAQTEYKHRHDQVAKIIHQKLALKHNLITDKTPYYKYTPQIILENNTHKLYWDRTLLTDKTIHNNRPDITLIDKTQKSICIIDIAIPNTNNLTKTHAEKHCKYTDIAIELKTQWRMKSTVIVPIILSATGVIPKTIHHNLQLLGLDKNTYKNLQKAVIINTCHIVRKFLNITQDTTYRNDPQRIHVNNSTPSQHGTQHTVISPPLTQTNTQIQLTEQTSTTNDTTYTTIRYSPLKQTTLSRPISIQPKRKNLNSTLDSQHETQPTVISPPLTQPTTQTQLPEQTNAINTSNATCTTKTCPPNKVTRPSTVKKHITPSSHKHTTLSQPIRIQPKRKNLYSTTSSQNTVISPPITQATSQIQPQEQRNTINTIKKHKTPSSQKHTTLSQPTRIQPKRKAKETLTQ

SEQ ID NO: 9001 - protein, 1490 aa, Photinus pyralis
MPLPEERQGTSGAIAGRCSMRADSDELVIRRPLVGIPETFTAERRPRRRQRPLEEDHQEETFVPASQPLVDGTSAKETSKRRMKWDEGMNRFIFGTYLEITKMETDRTAYRGKLYHAFITQYPHLAHLTEQRIADQRRVIIKNTLLTLDTQEQIRHEIEALLNTNNTLAVQDNTSVLNNSEIQTFATLQPSIDTNNHTNQTLTSLQKEFDNALLEFSNTDPTQRPRIPKQSHTTKLRTLSQTLNDHILPNYINDNTSLHQLHFVVYCGAVAVSRCNGARIAINKQQHTTKKRSPPAWEKRLITRIDDIRRDLGRITQYIQGTRSSKLTRQVQHITTKLNNHTTREQNTNYNEHRDTLTQKLSIYTNRLKRYRETADRKRHNTQFKHNEKLFYRSLTQNSTNEKLIPPSLHSLQQYWSDLWTKDIKHNPQAPWITTETTRTEYITPMNNTNITTTDIIQTINHLHNWKSPGIDNIHNFWWKYFTYTHSYLAQQFTELLNSPDRTPAFFTQGITYMLPKDNNTQDPSKYRPITCLPTIYKILTSCITNKIYQHCTDNNILYEEQKGCTKYSRGCKEQLIIDSVILEQSRHNKRNIHTAYIDYKKAFDSVPHSWLQQVLSIYKVSNNITQFLNYIMSCWNTTLTLTLNDTKLITDPIQIKRGIFQGDSLSPLWFCLALNPLSYLLNTTNFGYNIKHNHEIHHNITHLFYMDDLKLYSSTCIKLNHLLHITETFSRDIQMDFGIDKCKTQHITAGKRQLLDYELEQGNLINSMDENETYKYLGFQQNTHIKHTSIKQTLITQYLQRVRSILKTKLHGRNTIKAINTYATPVLTYSFGIIRWTNTDLEQIQRNTRTLLTKHHIHHPHSSTIRLYLPRSEGGRGLTDIKILHQTQIHNLRQYFYNKTDTSVLHKTVTYADKSYTPLNLHETNILPPPSKLTYITNNIQTWNQKPLHGRFPQEVSQDCVDSIATHTWLSECDIFPETEGFMLAIQDQVINTRNYKKHIHKDKTVTNDSCRLCSQTSETIQHIISACTRLAQTEYKHRHDQVAKIIHQKLALKHNLITDKTPYYKYTPQIILENNTHKLYWDRTLLTDKTIHNNRPDITLIDKTQKSICIIDIAIPNTNNLTKTHAEKHRKYTDIAIELKTQWRMKSTVIVPIIVSATGVIPKTIHHNLQLLGLDKNTYKHLQKAVIINTCHIVRKFLNITQDTTYRNDPQRIHVNNSTPSQHGTQHTVISPPLTQTNTQIQLTEQTSTTNDTTYTTFRDSPLKQTTLSRPISIQPKRKSLNSTLDSQHDTQHTAISPPLTQPTTQTQLPEQTNAINTSNATCTTKTGPPNKVTRPSTVKKHKTPSSHKHTTLSQPTRIQPKRENLNRTTRSQHTVISPPKTQATTQIQPQEQRNTINTSNATCTTKTGPPNKVTRPSTVKKRNTPSSQKQPTRIQPKRKNRDSTTSSQNTAISPPKTQATTQIQPQEQRNTTNTSNATCTTKDRSTQ

SEQ ID NO: 9002 - protein, 1240 aa, Photinus pyralis
MKMEFKQSLGKMPLPEERQGTSGAIAGRCSMRADSDELVIRRPLVGIPETFTAERRPRRRQRPLEEDHQEETFVPASQPLVDGTSAKETSKRRMKWDEGMNRFIFGTYLEITKMETDRTAYRGKLYHAFITQYPHLAHLTEQRIADQRRVIIKNTLLTLDTQEQIRHEIEALLNTNNTLAVQDNTSVLNNSEIQTFATLQPSIDTNNHTNQTLTSLQKEFDNALLEFSNTDPTQRPRIPKHSHTTKLRTLSQTLNDHILPNYINDNTSLHQLHFVVYCGAVAVSRCNGARIAINKQQHTTKKRSPPAWEKRLITRIDDIRRDLGRITQYIQGTRSSKLTRQVQHITTKLNNHTTREQNTNYNEHRDTLTQKLSIYTNRLKRYRETADRKRHNTQFKHNEKLFYRSLTQNSTNEKLIPPSLHSLQQYWSDLWTKDIKHNPQAPWITTETTRTEYITPMNNTNITTTDIIQTINHLHNWKSPGIDNIHNFWWKYFTYTHSYLAQQFTELLNSPDRTPAFFTQGITYMLPKDNNTQDPSKYRPITCLPTIYKILTSCITNKIYQHCTDNNILYEEQKGCTKYSRGCKEQLIIDSVILEQSRHNKRNIHTAYIDYKKAFDSVPHSWLQQVLSIYKVSNNITQFLNYIMSCWNTTLTLTLNDTKLITDPIQIKRGIFQGDSLSPLWFCLALNPLSYLLNTTNFGYNIKHNHEIHHNITHLFYMDDLKLYSSTCIKLNHLLHITETFSRDIQMDFGIDKCKTQHITAGKRQLLDYELEQGNLINSMDENETYKYLGFQQNTHIKHTSIKQTLITQYLQRVRSILKTKLHGRNTIKAINTYATPVLTYSFGIIRWTNTDLEQIQRNTRTLLTKHHIHHPHSSTIRLYLPRSEGGRGLTDIKILHQTQIHNLRQYFYNKTDTSVLHKTVTYADKSYTPLNLHETNILPPPSKLTYITNNIQTWNQKPLHGRFPQEVSQDCVDSIATHTWLSECDIFPETEGFMLAIQDQVINTRNYKKHIHKDKTVTNDSCRLCSQTSETIQHIISACTRLAQTEYKHRHDQVAKIIHQKLALKHNLITDKTPYYKYTPQIILENNTHKLYWDRTLLTDKTIHNNRPDITLIDKTQKSICIIDIAIPNTNNLTKTHAEKHRKYTDIAIELKTQWRMKSTVIVPIILSATGVIPKTIHHNLQLLGLDKNTYKHLQKAVIINTCHIVRKFLNITQDTTYRNDPQRIHVNNSTHNTVHNIL

SEQ ID NO: 9003 - protein, 1123 aa, Photinus pyralis
MKMEFKQSLGKMPLPEERQGTSGAIAGRCSMRADSDELVNRRPLVGIPETSTAERRLRRGQRPPEEDRHEETFVPASQPLVDGTSAKDTSKRRMKWDEGMNRFIFGTYLEITKMETDRTAYRGKLYHAFITQYPHLAHLTEQRIADQRRVIIKNTLLTLDTQEQIRHEIEALLNTNNTLIVQDNTPVLNNTEIQIFATPQQSIDTNNHINQTLTSLQKEFDNALLEFSNTDPTQRARIPKQSHTTKLRTLSKTLNDHILPNYINDNTSLHQLHFVVYCGAVAVSRCNGSRITTNKEHHTTKKRSPPAWEKRLINRIDDIRRDLGRITQYIQGTRSSKLTRQVQHITTKLNNHTTREQNTNYNEHRDTLTQKLSIYTNRLKRYRETADRKRHNTQFKHNEKLFYRSLTQNSTNEKLIPPSLHSLQQYWFDLWTKDIKHNPHAPWITTETTRTEYITPMNNTNITTTDIIETINHLHNWKSPGIDNIHNFWWKYFTYTHSYLAQQFTELLNSPDRTPAFFTQGITYMLPKDNNTQDPSKYRPITCLPTIYKILTSCITNKIYQHCTDNNILYEEQKGCTKYSRGCKEQLIIDSVILEQSRHNKRNIHTAYIDYKKAFDSVPHSWLQQVLSIYKVSNNITQFLNYIMSCWNTTLTLTLNDTKLITDPIQIKRGIFQGDSLSPLWFCLALNPLSHLLNTTNFGYNIKHNHEIHHNITHLFYMDDLKLYSSTSIKLNHLLHITETFSRDIQMDFGIDKCKTQHITAGKRQLLDYELEQGNLINSMDENETYKYLGFQQNTHIKHTSIKQTLITQYLQRVRSILKTKLHGRNTIKAINTYAIPVLTYSFGIIRWTNTDLEQIQRNTRTLLTKHHIHHPHSSTIRLYLPRSEGGRGLTDIKLLHQTQIHNLRQYFYNKSDTSVLHKTVTYADKSYTPLNLHETNVLPPTSKLTYITNNIQTWNQKPLHGRFPQEVGQDCVDSIATHSWLSECDVFPETEGFMLAIQDQVINTRNYKKHIHKDKTVTNDSCRLCSQTSETIQHIISACTRLAQTEYKHRHDQVAKIIHQKLALKHNLITDTTPYYKYTPQIILENNTHKLYWDRTLLTDKTIHNNRPDITLIDKNKNPFVL

SEQ ID NO: 9004 - protein, 1019 aa, Photinus pyralis
MKWGEGMNRFIFGTYLVITKLETDRTAYRGKLHHAFITQYPHLAHLTEQRIADQRRVIIKNTLLTLDTQEQIRHEIEALLNTNNTLAVQDNTSVLNNSEIQTFATLQPSIDTNNHTNQTLTSLQKEFDNALLEFSNTDPTQRPRIPKQSHTTKLRTLSQTLNDHILPNYINDNTSLHQLHFVVYCGAVAVSRCNGARIAINKQQHTTKKRSPPAWEKRLITRIDDIRRDLGRITQYIQGTRSSKLTRQVQHITTKLNNHTTREQNTNYNEHRDTLTQKLSIYTNRLKRYRETADRKRHNTQFKHNEKLFYRSLTQNSTNEKLIPPSLHSLQQFWSDLWTKDIKHNPQAPWITTETTRTEYITPMNNTNITTTDIIQTINHLHNWKSPGIDNIHNFWWKYFTYTHSYLAQQFTELLNSPDRTPAFFTQGITYMLPKDNNTQDPSKYRPITCLPTIYKILTSCITNKIYQHCTDNNILYEEQKGCTKYSRGCKEQLIIDSVILEQSRHNKRNIHTAYIDYKKAFDSVPHSWLQQVLSIYKISNNITQFLNYIMSCWNTTLTLTLNDTKLITDPIQIKRGIFQGDSLSPLWFCLALNPLSYLLNTTNFGYNIKHNHEIHHNITHLFYMDDLKLYSSTCIKLNHLLHITETFSRDIQMDFGIDKCKTQHITAGKRQLFDYELEQGNLINSMDENETYKYLGFQQNTHIKHTSIKQTLITQYLQRVRSILKTKLHGRNTIKAINTYATPVLTYSFGIIRWTNTDLEQIQRNTRTLLTKHHIHHPHSSTIRLYLPRSEGGRGLTDIKILHQTQIHNFRQYFYNKTDTSVLHKTVTYADKSYTPLNLHETNILPPPSKLTYITNNIQTWNQKPLHGRFPQEVSQDCVDSIATHTWLSECDIFPETEGFMLAIQDQVINTRNYKKHIHKDKTVTNDSCRLCSQTSETIQHIISACTRLAQTEYKHRHDQVAKIIHQKLALKHNLITDKTPYYKYTPSYLKTTHTNYIGTGHYSQTKLSTIIDQILHL

SEQ ID NO: 9005 - protein, 1073 aa, Photinus pyralis
METDRTAYRGKLYHAFITQYPHLAHLTEQRIADQRRVIIKNTLLTLDTQEQIRHEIEALLNTNNTLTVQDNTSVLNNCEIQTFATLQPSIDTNNHTNQTLTSLQKEFDNALLEFSNTDPTQRPRIPKQSHTTKLRTLSQTLNDHILPNYINDNTSLHQLHFVVYCGAVAVSRCNGARITINKQQHTTKKRSPPAWEKRLITRIDDIRRDLGRITQYIQGTRSSKLTRQVQHITTKLNNHTTREQNTNYNEHRDTLTQKLSIYTNRLKRYRETADRKRHNTQFKHNEKLFYRSLTQNSTNEKLIPPSLHSLQQYWSDLWTKDIKHNPHAPWITTETTRTEYITPMNNTNITTTDIIQTINHLHNWKSPGIDNIHNFWWKSFTYTHSYLAQQFTELLNSPDRTPAFFTQGITYMLPKDNNTQDPSKYRPITCLPTIYKILTSCITNKIYQHCTDNNILYEEQKGCTKYSRGCKEQLIIDSVILEQSRHNKRNIHTAYIDYKKAFDSVPHSWLQQVLSIYKVSNNITQFLNYIMSCWNTTLTLTLNDTKLITDPIQIKRGIFQGDSLSPLWFCLALNPLSYLLNTTNFGYNIKHNHEIHHNITHLFYMDDLKLYSSTSIKLNHLLHITETFSRDIQMDFGIDKCKTQHITAGKKQLLDYELEQGNLINSMDENETYKYLGFQQNTHIKHTGIKQTLITQYLQRVRSILKTKLHGRNTIKAINTYATPVLTYSFGIIRWTNTDLEQIQRNTRTLLTKHHIHHPHSSTIRLYLPRSEGGRGLTDIKLLHQTQIHNLRQYFYNKTDTSVLHKTVTYADKSYTPLNLHETNILPPPSKLTYITNNIQTWNQKPLHGRFPQEVSQDCVDSIATHTWLSECDIFPETEGFMLAIQDQVINTRNYKKHIHKDKTVTTDSCRLCSQTSETIQHIISACTRLAQTEYKHRHDQVAKIIHQKLALKHNLITDKTPYYKYTPQIILENNTHKLYWDRTLLTDKTIHNNRPDITLIDKTQKSICIIDIAIPNTNNLTKTHAEKHRKYTDIAIELKTQWRMKSTTVIVPIILIVLLELYQRQYTTIYNY

SEQ ID NO: 9006 - protein, 1103 aa, Photinus pyralis
MYIRCYELCNNNNNNNNNNNISVLNNSEIQTFARLQPSIDTNNYTNQTLTSLQKEFDNALLEFSNTDPTQRPRIPKQSHTTKLRTLSQTLNDQILPNYINNNTSFHRLHFVVYCGAVAVSRCNGARIAINKQQHTTKKRSLPAWEKRLINRIDDIRRDLGRITQYIQGTRSSKLTRQVQHITTKLNNHTTREQNTNYNEHRDTLTQKLSICTNRLKRYRETADRKRHNTQFKHNEKLFYRSLTQNSTNEKLIPPSLHSLQQYWSDLWTKDIKHNPHAPWITTETTRTEYITPMNNTNITTTDIIQTINHLHNWKSPGIDNIHNFWWKYFTYTHSYLAQQFTELLNSPDRTPAFFTQGITYMLPKDNNTQDPSKYRPITCLPTIYKILTSCITNKIYQHCTDNNILYEEQKGCTKYSRGCKEQLIIDSVILEQSRHNKRNIHTAYIDYKKAFDSVPHSWLQQVLSIYKVSNNITQFLNYIMSCWNTTLTLTLNDTKLITDPIQIKRGIFQGDSLSPLWFCLALNPLSYLLNTTNFGYNIKHNHEIHHNITHLFYMDDLKLYSSTSIKLNHLLHITETFSRDIQMDFGIDKCKTQHITAGKRQLLDYELEQGNLINSMDENETYKYLGFQQNTHIKHTSIKQTLITQYLQRVRSILKTKLHGRNTIKAINTYATPVLTYSFGIIRWTNTDLEQIQRNTRTLLTKHHIHHPHSSTIRLYLPRSEGGRGLTDIKILHQTQIHNLRQYFYNKTDTSVLHKTVTYADKSYTPLNLHETNILPPPSKLTYITNNIQTWNQKPLHGRFPQEVSQDCVDSIATHTWLSECDIFPETEGFMLAIQDQVINTRNYKKHIHKDKTVTNDSCRLCSQTSETIQHIISACTRLAQTEYKHRHDQVAKIIHQKLALKHNLITDKTPYYKYTPQIILENNTHKLYWDRTLLTDKTIHNNRPDITLIDKTQKSICIIDIAIPNTNNLTKTHAEKHRKYTDIAIELKTQWRMKSTVIVPIILSATGVIPKTIHHNLQLLGLDKNTYKHLQKAVIINTCHIVRKFLNITQDTTDTNDPQRIQYTCKQQHSLTTRYTTYCNISTSNPNKHTNTTYRTNKYLNK

SEQ ID NO: 9007 - protein, 736 aa, Photinus pyralis
MNNTNITTTDIIQTINHLHNWKSPGIDNIHNFWWKYFTYTHSYLAQQFTELLNSPDRTPAFFTQGITYMLPKDNNTQDPSKYRPITCLPTIYKILTSCITNKIYQHCTDNNILYEEQKGCTKCSRGCKEQLIIDSVILEQSRHNKRNIHTAYIDYKKAFDSVPHSWLQQVLSIYKVSNNITQFLNYIMSCWNTTLTLTLNDTKLITDPIQIKRGIFQGDSLSPLWFCLALNPLSYLLNTTNFGYNIKHNHEIHHNITHLFYMDDLKLYSSTSIKLNHLLHITETFSRDIQMDFGIDKCKTQHITAGKRQLLDYELEQGNLINSMDENETYKYLGFQQNTHIKHTSIKQTLITQYLQRVRSILKTKLHGRNTIKAINTYAIPVLTYSFGIIRWTNTDLEQIQRNTRTLLTKHHIHHPHSSTIRLYLPRSEGGRGLTDIKLLHQTQIHNLRQYFYNKSDTSVLHKTVTYADKSYTPLNLHETNVLPPTSKLTYITNNIQTWNQKPLHGRFPQEVGQDCVDSIATHSWLSECDVFPETEGFMLAIQDQVINTRNYKKHIHKDKTVTNDSCRLCSQTSETIQHIISASCTRLAQTEYKHRHDQVAKIIHQKLALKHNLITDKTPYYKYTPQIILENNTHKLYWDRTLLTDKTIHNNRPDITLIDKTQKSICIIDIAIPNTNNLTKTHAENHRKYTDIAIELKTQWRMKSTVIVPIILSATGVIPKTIHHNLQLLGLDKNT

SEQ ID NO: 9008 - protein, 1251 aa, Photinus pyralis
MKWDEGMNRFIFGTYLEITKLETDRTAYRGKLHHAFITQYPHLAHLTEQRIADQRRVIIKNTLLTLDTQEQIRHEIEALLNTNNTLAVQDNTSVLNNSEIQTFATLQPSIDTNNHTNQTFTSLQKEFDNALLEFSNTDPTQRPRIPKQSHTTKLRTLSQTLNDHILPNYINDNTSLHQLHFVVYCGAVAVSRCNGARIAINKQQHTTKKRSPPAWEKRLITRIDDIRRDLGRITQYIQGTRSSKLTRQVQHITTKLNNHTTREQNTNYNEHRDTLTQKLSIYTNRLKRYRETADRKRHNTQFKHNEKLFYRSLTQNSTNEKLIPPSLHSLQQYWSDLWTKDIKHNPQAPWITTETTRTEYITPMNNTNITTTDIIQTINHLHNWKSPGIDNIHNFWWKYFTYTHSYLAQQFTELLNSPDRTPAFFTQGITYMLPKDNNTQDPSKYRPITCLPTIYKILTSCITNKIYQHCTDNNILYEEQKGCTKYSRGCKEQLIIDSVILEQSRHNKRNIHTAYIDYKKAFDSVPHSWLQQVLSIYKVSNNITQFLNYIMSCWNTTLTLTLNDTKLITDPIQIKRGIFQGDSLSPLWFCLALNPLSYLLNTTNFGYNIKHNHEIHHNITHLFYMDDLKLYSSTCIKLNHLLHITETFSRDIQMDFGIDKCKTQHITAGKRQLLDYELEQGNLINSMDENETYKYLGFQQNTHIKHTSIKQTLITQYLQRVRSILKTKLHGRNTIKAINTYATPVLTYSFGIIRWTNTDLEQIQRNTRTLLTKHHIHHPHSSTIRLYLPRSEGGRGLTDIKILHQTQIHNLRQYFYNKTDTSVLHKTVTYADKSYTPLNLHETNILPPPSKLTYITNNIQTWNQKPLHGRFPQEVSQDCVDSIATHTWLSECDIFPETEGFMLAIQDQVINTRNYKKHIHKDKTVTNDSCRLCSQTSETIQHIISACTRLAQTEYKHRHDQVAKIIHQKLALKHNLITDKTPYYKYTPQIILENNTHKLYWNRTLLTDKTIHNNRPDITLIDKTQKSICIIDIAIPNINNLTKTHAEKHRKYTDIAIELKTQWRMKSTVIVPIILSATGVIPKTIHHNLQLLGLDKNTYKHLQKAVIINTCHIVRKFLNITQDTTYRNDPQRIHVNNSTPSQHGTQHTVISPPLTQTNTQIQLTEQTSTTNDTTYTTFRDSPLKQTTLSQPISIQPKRKSLNSTLDSQHDTQHTVISPPLTQPTTQTQLPEQTNAINTSNATCTTKTPLAQ

SEQ ID NO: 9009 - protein, 1504 aa, Photinus pyralis
MKWDEGMNRFIFGTYLEITKLETDKTTYRGKLHQAFVKQYPHLSHLTEQRIADQRRVIIKNTLLTLDTQEQIRHEIEALLNTNNTIIVQDNTPVLNNSEIQTFATPQQSIDTNNHINQTLTSLQKEFDNALLEFSNTDPTQRARIPKQSHTTKLRTLSKTLNDHILPNYINDNTSLHQLHYVVYCGAVAVSRCNGSRITTNKEHHTTKKRSPPAWEKRLINRIDDIRRDLGRITQYIQGTRSSKLTRQVQHITTKLNNHTTREQNTNYNEHRDTLTQKLSIYTNRLKRYRETADRKRHNTQFKHNEKLFYRSLTQNSTNEKLIPPSLHSLQQYWSDLWTKDIKHNPHAPWITTETTRTEYITPMNNTNITTTDIIQTINHLHNWKSPGIDNIHNFWWKYFTYTHSYLAQQFTELLNSPDRTPAFFTQGITYMLPKDNNTQDPSKYRPITCLPTIYKILTSCITNKIYQHCTDNNILYEEQKGCTKCSRGCKEQLIIDSVILEQSRHNKRNIHTAYIDYKKAFDSVPHSWLQQVLSIYKVSNNITQFLNYIMSCWNTTLTLTLNDTKLITDPIQIKRGIFQGDSLSPLWFCLALNPLSYLLNTTNFGYNIKHNHEIHHNITHLFYMDDLKLYSSTSIKLNHLLHITETFSRDIQMDFGIDKCKTQHITAGKRQHLDYELEQGNLINSMDENETYKYLGFQQNTHIKHTSIKQTLITQYLQRVRSILKTKLHGRNTIKAINTYATPVLTYSFGIIRWTNTDLEQIQRNTRTLLTKHHIHHPHSSTIRLYLPRSEGGRGLTDIKLLHQTQIHNLRQYFYNKSDTSVLHKTVTYADKSYTPLNLHETNILPPTSKITYITNNIQTWNQKPLHGRFPQEVSQDCVDSIATHSWLSECDVFPETEGFMLAIQDQVINTRNYKKHIHKDKTVTNDSCRLCSQTSETIQHIISACTRLAQTEYKHRHDQVAKIIHQKLALKHNLITDKTPYYKYTPQIILENNTHKLYWDRTLLTDKTIHNNRPDITLIDKTQKSICIIDIAIPNTNNLTKTHAEKHRKYTDIAIELKTQWRMKSTVIVPIILSATGVIPKTIHHNLQLLGLDKNTYKHLQKAVIINTCHIVRKFLNITQDTTYTNDQQRIHVNNSTRSQHGTQHTVISPPLTQTYTQIQLTEQTSTTNDTTYTTIRDSPLKQTTLSRPISIQPKRKNLNSTLDSQHDTQHTVISPPLTQPTTQTQLPEQTNAINTSNATCTTKTSSPNKVTRLSTAKKHNTLSSRKHTTLSQPTRIQSKRKNLNSTTGSQNTVTSPPITQANTQIQPQEQRNTINTSNATCTTKTGPPNKVTRASTVKKHNTSTSQKQPTRIQPKRKNLNSTTGSQHTGISPPNTQATSQIQPQKQRTTINTSNTTCTTKTGPPNKVTRPSTLKKHNTPSSQKQPTRIQPKLKNLNSITGSQNTAISPPKTQATSQIRPQEQRNTINTIKKHKTPSSQKHTTLLQPTRIQPKRKAKETLTQ

SEQ ID NO: 9010 - protein, 1766 aa, Photinus pyralis
MKMEFKQSLGKMPLPEERQGTSGAIAGRCSMRADSDELVNRRPLVGIPETSTAERRLRRGQRPPEEDRHEETFVPASQPLVDGTSAKDTSKRRMKWDEGMNRFIFGTYLEITKMETDRTAYRGKLYHAFITQYPHLAHLTEQRIADQRRVIIKNTLLTLDTQEQIRHEIEALLNTNNTLIVQDNTPVLNNTEIQIFATPQQSIDTNNHINQTLTSLQKEFDNALLEFSNTDPTQRARIPKQSHTTKLRTLSKTLNDHILPNYINDNTSLHQLHFVVYCGAVAVSRCNGSRITTNKEHHTTKKRSPPAWEKRLINRIDDIRRDLGRITQYIQGTRSSKLTRQVQHITTKLNNHTTREQNTNYNEHRDTLTQKLSIYTNRLKRYRETADRKRHNTQFKHNEKLFYRSLTQNSTNEKLIPPSLHSLQQYWFDLWTKDIKHNPHAPWITTETTRTEYITPMNNTNITTTDIIQTINHLHNWKSPGIDNIHNFWWKYFTYTHSYLAQQFTELLNSPDRTPAFFTQGITYMLPKDNNTQDPSKYRPITCLPTIYKILTSCITNKIYQHCTDNNILYEEQKGCTKCSRGCKEQLIIDSVILEQSRHNKRNIHTAYIDYKKAFDSVPHSWLQQVLSIYKVSNNITQFLNYIMSCWNTTLTLTLNDTKLITDPIQIKRGIFQGDSLSPLWFCLALNPLSYLLNTTNFGYNIKHNHEIHHNITHLFYMDDLKLYSSTSIKLNHLLHITETFSRDIQMDFGIDKCKTQHITAGKRQLLDYELEQGNLINSMDENETYKYLGFQQNTHIKHTSIKQTLITQYLQRVRSILKTKLHGRNTIKAINTYAIPVLTYSFGIIRWTNTDLEQIQRNTRTLLTKHHIHHPHSSTIRLYLPRSEGGRGLTDIKLLHQTQIHNLRQYFYNKSDTSVLHKTVTYADKSYTPLNLHETNVLPPTSKLTYITNNIQTWNQKPLHGRFPQEVSQDCVDSIATHSWLSECDVFPETEGFMLAIQDQVINTRNYKKHIHKDKTVTNDSCRLCSQTSETIQHIISACTRLAQTEYKHRHDQVAKIIHQKLALKHNLITDTTPYYKYTPQIILENNTHKLYWDRTLLTDKTIHNNRPDITLIDKTQKSICIIDIAIPNTNNLTKTHAEKHRKYTDIAIELKTQWRMKSTVIVPIILSATGVIPKTIHHNLQLLGLDKNTYKHLQKAVIINTCHIVRKFLNITQDTTYTNDPQRIHVNNSTRSQHGTQHTVISPTLTQTKHTNTTYRTNKYLPTTNDTTYTTIRDSPLKQTTLPPPISIQPKRKSLNSTLDSQHDTQHTVIFPNLTQPITQTQLPEQTNAINTSNATRTTKTPSPTRPSTAKKHNTLSSQKHTTLSQTQPTRTQPKRNNLNSTTGTQNTVMSPPITHATTEIQLQEQRNTINTSNATCTTKTGPYNKVTRPSTFKKHKTPSSQKHTTFSQPTRIQPKRKNLNRTTGSQHTKITPPKTQATSQIQPQEQRNIINTSNATCTTKTGPPNKITRPSTVKKHITPSSQKHTTFSQPTRIQPKRKNLNRTTGSQHTKISPAKTQATSQTQPQEQRNIINTSNATCTTKTGPPNTVTRPSTIKKHITPSSPKHTTLSQPTRIQPKRKNLYSTTSSQNTVISPSITQATSQIPPQEQKNTINTSNATCTTKTGPSNKVTRPSTVKKHNTRSSQKQPTRIQPKRKNLNSTTGSQSTAISPPKTQATSQIRPQEQINTINTIKKHKTPSSQKHTTLSQPTRIQPKRKAKETLTQ

SEQ ID NO: 9011 - protein, 1428 aa, Photinus pyralis
MNVEFKQSLGKMPLPEERQGTSGAIAGRCSMRADSDELVNRRPLVGIPETSTAERRLRRGQRPPEEDRHEETFVPASQPLVDGTSAKETSKRRMKWDEGMNRFIFGTYLEITKMETDRTAYRGKLYHAFITQYPHLAHLTEQRIADQRRVIIKNTLLTLDTQEQIRHEIEALLNTNNTLTVQDNTSVLNNSERQTFATLQPSIDTNNHTNQTLTSLQKEFDNALLEFSNTDPTERPRIPKQSHTTKLRTLSQTLNDHILPNYINDNTSLHQLHFVVYCGAVAVSRCNGARITINKQQHTTKKRSPPAWEKRLITRIDDIRRDLGRITQYIQGTRSSKLTRQVQHITTKLNNHTTREQNTNYNEHRDTLTQKLSIYTNRLKRYRETADRKRHNTQFKHNEKLFYRSLTQNSTNEKLIPPSLHSLQQYWSDLWTKDIKHNPHAPWITTETTRTEYITPMNNTNITTTDIIQTINHLHNWKSPGIDNIHNFWWKSFTYTHSYLAQQFTELLNSPDRTPAFFTQGITYMLPKDNNTQDPSKYRPITCLPTIYKILTSCITNKIYQHCTDNNILYEEQKGCTKYSRGCKEQLIIDSVILEQSRHNKRNIHTAYIDYKKAFDSVPHSWLQQVLSIYKVSNNITQFLNYIMSCWNTTLTLTLNDTKLITDPIQIKRGIFQGDSLSPLWFCLALNPLSYLLNTTKFGYNIKHNHEIHHNITHLFYMDDLKLYSSTSIKLNHLLHITETFSRDIQMDFGIDKCKTQHITAGKRQLLDYELEQGNLINSMDENETYKYLGFQQNTHIKHTSIKQTLITQYLQRVRSILKTKLHGRNTIKAINTYATPVLTYSFGIIRWTNTDLEQIQRNTRTLLTKHHIHHPHSSTIRLYLPRSEGGRGLTDIKLLHQTQIHNLRQYFYNKTDTSVLHKTVTYADKSYTPLNLHETNILPPPSKLTYITNNIQTWNQRPLHGRFPQEVSQDCVDSIATHTWLSECDIFPETEGFMLAIQDQVINTRNYKKHIHKDKTVTNDSCRLCSQTSETIQHIISACTRLAQTEYKHRHDQVAKIIHQKLALKHNLITDKTPYYKYTPQIILENNTHKLYWDRTLLTDKTIHNNRPDITLIDKTQKSICIIDIAIPNTNNLTKTHAEKHRKYTDIAIELKTQWRMKSTVIVPIILSATGVIPKTIHHNLQLLGLDKNTYKHLQKAVIINTCHIVRKFLNITQDTTYRNDPQRIHVNNSTPSQHGTQHTVISPPLTQTNTQIQLTEQTSTTNDTTYTTIRDSPLKQTTLSRPISIQPKRKSLNSTLDSQHDTQHTVISPPLTQPTTQTQLPEQTNAINTSNATCTTKTPSPNKVTRPSTAKKHNTLSSQKHTTLSQPTRTQPKRSNLNSTRGSQNTVMSPPIIQATTQIQHLEQRNTINTSNATCTTKTDPPNKVK

SEQ ID NO: 9012 - protein, 1564 aa, Photinus pyralis
MKMEFKQSLGKMPLPEERQGTSGAIAGRCSMRADSDELVNRRPLVGIPETSTAERRLRRGQRPPEEDRHEETFVPASQPLVDGTSAKETSKRRMKWDEGMNRFIFGTYLEITKMETDRTAYRGKLYHAFITQYPHLAHLTEQRIADQRRVIIKNTLLTLDTQEQIRHEIEALLNTNNTLTVQDNTSVLNNSEIQTFATLQPSIDTNNHTNQTLTSLQKEFDNALLEFSNTDPTQRPRIPKQSHTTKLRTLSQTLNDHILPNYINDNTSLHQLHFVVYCGAVAVSRCNGARITINKQQHTTKKRSPPAWEKRLITRIDDIRRDLGRITQYIQGTRSSKLTRQVQHITTKLNNHTTREQNTNYNEHRDTLTQKLSIYTNRLKRYRETADRKRHNTQFKHNEKLFYRSLTQNSTNEKLIPPSLHSLQQYWSDLWTKDIKHNPHAPWITTETTRTEYITPMNNTNITTTDISQTINHLHNWKCPGIDNIHNFWWKSFTYTHSYLAQQFTELLNSPDRTPAFFTQGITYMLPKDNNTQDPSKYRPITCLPTIYKILTSCITNKIYQHCTDNNILYEEQKGCTKYSRGCKEQLIIDSVILEQSRHNKRNIHTAYIDYKKAFDSVPHSWLQQVLSIYKVSNNITQFLNYIMSCWNTTLTLTLNDTKLITDPIQIKRGIFQGDSLSPLWFCLALNPLSYLLNTTNFGYNIKHNHEIHHNITHLFYMDDLKLYSSTSIKLNHLLHITETFSRDIQMDFGIDKCKTQHITAGKRQLLDYELEQGNLINSMDENETYKYLGFQQNTHIKHTSIKQTLITQYLQRVRSILKTKLHGRNTIKAINTYATPVLTYSFGIIRWTNTDLEQIQRNTRTLLTKHHIHHPHSSTIRLYLPRSEGGRGLTDIKLLHQTQIHNLRQYFYNKSDTSVLHKTVTYADKSYTPLNLHETNILPPTSKLTYITNNIQIWNQKPLHGRFPQEVSQGCVDSIATHSWLSECDIFPETEGFMLAIQDQVINTRNYKKHIHKDKTVTNDSCRLCSQTSETIQHIISACTRLAQTEYKHRHDQVAKIIHQKLALKHNLITDTTPYYKYTPQIILENNTHKLYWDRTLLTDKTIHNNRPDITLIDKTQKSICIIDIAIPNTNNLTKTHAEKHRKYTDIAIELKTQWRMKSTVIVPIILSATGVIPKTIHHNLQLLGLDKNTYKHLQKAVIINTCHIVRKFLNITQDTTYTNDPQRIHVNNSTRSQHGTQHTVISQPLTQTNTQIQLTEQTSTTNDTTYTTIRDSPLKQTTLSRPISIQPKRKSLNSTLDSQHDTQHTVISPPLTQPTTQTQLPEQTNAINTSNATCTTKTPSLNKVTRPSTAKKHNTLSSQKHTTLSQPTRTQPKRNNLNSTTGSQNTVTSPPITQATTQIQPQEQRNTINTSIATCTTKTGPPNKITRLSTVKKHNTPLSQKQPTRIQPKRNNLKSTTGSQHTVMSPPITQATTQIQPQEQRNTINTSNATCTTKTGPPNKVTRPSTVKKHITHSSQKHTTLSQPTRTQPKRKNLNSTTSSQNTVIPPPITQAITQIQPQETP

SEQ ID NO: 9013 - protein, 1524 aa, Photinus pyralis
MKMEFKQSLGKMPLPEERQGTSGAIAGRCSMRADSDELVNRRPLVGIPETSTAERRLRRGQRPPEEDRHEETFVPASQPLVDGTSAKDTSKRRMKWDEGMNRFIFGTYLEITKMETDRTAYRGKLYHAFITQYPHLAHLTEQRIADQRRVIIKNTLLTLDTQEQIRHEIEALLNTNNTLIVQDNTPVLNNSEIQTFATPQQSIDTNNHINQTLTFLQKEFDNALLEFSNTDPTQRARIPKQSHTTKLRTLSKTLNDHILPNYINDNTSLHQLHFVVYCGAVAVYRCNGSRITTNKEHHTTKKRSPPAWEKRLINRIDDIRRDLGRITQYIQGTRSSKLTRQVQHITTKLNNHTTREQNTNYNEHRDTLTQKLSIYTNRLKRYRETADRKCHNTQFKHNEKLFYRSLTQNSTNEKLIPPSLHSLQQYWSDLWTKDIKHNPHAPWITTETTRTEYITSMNNTNITTTDIIQTNINHLHNWKSPGIDNIHNFWWKYFTYTHSYLAQQFTELLNSPDRTPAFFTQGITYMLPKDNNTQDPSKYRPITCLPTIYKILTSCITNKIYQHCTDNNILYEEQKGCTKCSRGCKEQLIIDSVILEQSRHNKRNIHTAYIDYKKAFDSVPHSWLQQVLSIYKVSNNITQFLNYIMSCWNTTLTLTLNDTKLITDPIQIKRGIFQGDSLSPLWFCLALNPLSHLLNTTNFGYNIKHNHEIHHNITHLFYMDDLKLYSSTSIKLNHLLHITETFSRDIQMDFGIDKCKTQHITAGKRQLLDYELEQGNLINSMDENETYKYLGFQQNTHIKHTSIKQTLITQYLQRVRSILKTKLHGRNTIKAINTYAIPVLTYSFGIIRWTNTDLEQIQRNTRTLLTKHHIHHPHSSTIRLYLPRSEGGRGLTDIKLLHQTQIHNLRQYFYNKTDTSVLHKTVTYADKSYTPLNLHETNILPPPSKLTYITNNIQTWNQKPLHGRFPQEVSQDCVDSIATHTWLSECDIFPETEGFMLAIQDQVINTRNYKKHIHKDKTVTNDSCRLCSQTSETIQHIISACTRLAQTEYKHRHDQVAKIIHQKLALKHNLITDTTPYYKYTPQIILENNTHKLYWDRTLLTDKTIHNNRPDITLIDKTQKSICIIDIAIPNTNNLTKTHAEKHRKYTDIAIERKTQWRMKSTVIVSIILSATGVIPKTIHHNLQLLGLDKNTYKHLQKAVIINTCHIVRKFLNITQDTTYRNDPQRIHVNNSTPSQHGTQHTVISPPLTQTNTQIQLTEQTSTTNDTTYTTIRDSPLKQTTLSQPISIQPKRKSLNSTLDSQHDTQHTVISPPLTQPTTQTQLPEQTNAINTSNATRTTKTPSPNKVTRPSTAKKHNTLSSQKHTTLSQTQPTRTQPKRNNLNSTTGSQNTVMSPPITQATTQIQPQEQRNTINTSNATCTTKTGPSNKVTRPSTVKKHNTSTSQKQPTRIQPKRKNLKSTTGSQNTAIFPPKTQATSQIRPQEQRNTINTIKKHKTPSSQKHTTLSQPTSIQPKRKAKETLTQ

SEQ ID NO: 9014 - protein, 1114 aa, Photinus pyralis
MNNTNITTTDIIQTINHLHNWKSPGIDNIHNFWWKYFTYTHSYLAQQFTELLNSPDRTPAFFTQGITYMLPKDNNTQDPSKYRPITCLPTIYKILTSCITNKIYQHCTDNNILYEEQKGCTKYSRGCKEQLIIDSVILEQSRHNKRNIHTAYIDYKKAFDSVPHSWLQQVLSIYKVSNNITQFLNYIMSCWNTTLTLTLNDTKLITDPIQIKRGIFQGDSLSPLWFCLALNPLSYLLNTTNFGYNIKHNHEIHHNITHLFYMDDLKLYSSTSIKLNHLLHITETFSRDIQMDFGIDKCKTQHITAGKRQLLDYELEQGNLINSMDENETYKYLGFQQNTHIKHTSIKQTLITQYLQRVRSILKTKLHGRNTIKAINTYATPVLTYSFGIIRWTNTDLEQIQRNTRTLLTKHHIHHPHSSTIRLYLPRSEGGRGLTDIKLLHQTQIHNLRQYFYNKSDTSVLHKTVTYADKSYAPLNLHETNILPPTSKLTYITNNIQIWNQKPLHGRFPQEVSQGCVDSIATHSWLSECDIFPETEGFMLAIQDQVINTRNYKKHIHKDKTVTNDSCRLCSQTSETIQHIISACTRLAQTEYKHRHDQVAKIIHQKLALKHNLITDKTPYYKYTPQIILENNTHKLYWDRTLLTDKTIHNNRPDITLIDKTQKSICIIDIAIPNTNNLTKTHAEKHRKYTDMAIELKTQWRMKSTVIVPIILSATGVIPKTIHHNLQLLGLDKNTYKHLQKAVIINTCHIVRKFLNITQDTTYTNDPQRIHVNNSTRSQRGTQHTVISQPLTQTNTQIQLTEQTSTTNDTTYTTIRDSPLKQTTLSRPISIQPKRKSLNSTLDSQHDTQHTVISPPLTQPTTQTQLPEQTNAINTSNATCTTKTPSLNKVTRPSTANKHNTLSSQKHTTLSQPTRTQPKRNNLNSTTGSQNTVTSPPITQATTQIQPQEQRNTRNTSNATCTTKTGPPNKVTRPSTVKKHKTHSSQKHTTLSQPTRIQPKRKNLNSTTSSQNTVISPRITQATTQIQPQEQRNTINTSIATCTTKTGPPNKITRLSTVKKHNTPLSQKQPTRIQPKRNNLKSTHRLTTYCNVSTNNPSNNTDTTSRTKKHHKYK

SEQ ID NO: 9015 - protein, 990 aa, Photinus pyralis
MSVPFFNLIGNNNNNKKKRLINRIDDIRRDLGRITQYIQGTRSSKLTRQVQHITTKLNNHTTREQNTNYNEHRDTLTQKLSIYTNRLKRYRETADRKRHNTQFKHNEKLFYRSLTQNSTNEKLIPPSLHSLQQYWSDLWTKDIKHNPHAPWITTETTRTEYITPMNNTNITTTDIIQTINHLHNWKSPGIDNIHNFWWKYFTYTAQQFTELLNSPDRTPAFFTQGITYMLPKDNNTQDPSKYRPITCLPTIYKILTSCITNKIYQHCTDNNILYEEQKGCTKYSRGCKEQLIIDSVILEQSRHNKRNIHTAYIDYKKAFDSVPHSWLQQVLSIYKVSNNTTQFLNYIMSCWNTTLTLTLNDTKLITDPIQIKRGIFQGDSLSPLWFCLALNPLSYLLNTTNFGYNIKHNHEIHHNITHLFYMDDLKLYSSTSIKLNHLLHITETFSRDIQMDFGIDKCKTQHITAGKRQLLDYELEQGNLINSMDENETYKYLGFQQNTHIKYTSIKQTLITQYLQRIRSILKTKLHGRNTIKAINTYATPVLTYSFGIIRWTNTDLEQIQRNTRTLLTKHHIHHPHSSTIRLYLPRSEGGRGLTDITLLHQTQIHNLRQYFYNKSDTSVLHKTVTYADKSYTPLNLHETNILPPTSKITYITNNIQTWNQKPLHGRFPQEVSQDCVDSIATHSWLSECDVFPETEGFMLAIQDQVINTRNYKKHIHKDKTVTNDSCRLCSQTSETIQHIISACTRLAQTEYKHRHDQVVKIIHQKLALKHNLITDTTPYYKYTPQIILENNTHKLYWDRTLLTDKTIHNNRPDITLIDKTQKSICIIDIAIPNTNNLTKTHAEKHRKYTDIAIELKTQWRMKSTVIVPIILSATGVIPKTIHHNLQLLGLDKNTYKHLQKAVIIKTCHIVRKFLNITQDTTYTNDPQRIHVNNSTRSQHGTQHTVISPPLTQTNTQIQLTEQTSTTNDTTYVYYNQRFTSEANHIITTH

SEQ ID NO: 9016 - protein, 1601 aa, Photinus pyralis
MKMEFKQSLGKMPLPEERQGTSGAIAGRCSMRADSDELVNRRPLVGIPETSTAERRLRRGQRPPEEDRHEETFVPASQPLVDGTSAKDTSKRRMKWDEGMNRFIFGTYLEITKMETDRTAYRGKLYHAFITQYPHLAHLTEQRIADQRRVIIKNTLLTLDTQEQIRHEIEALLNTNNTLIVQDNTPVLNNTEIQIFATPQQSIDTNNHINQTLTSLQKEFDNALLEFSNTDPTQRARIPKQSHTTKLRTLSKTLNDHILPNYINDNTSLHQLHFVVYCGAVAVSRCNGSRITTNKEHHTTKKRSPPAWEKRLINRIDDIRRDLGRITQYIQGTRSSKLTRQVQHITTKLNNHTTREQNTSYNEHRDTLTQKLSIYTNRLKRYRETADRKRHNTQFKHNEKLFYRSLTQNSTNEKLIPPSLHSLQQYWFDLWTKDIKHNPHAPWITTETTRTEYITPMNNTNITTTDIIQTINHLHNWKSPGIDNIHNFWWKYFTYTHSYLAQQFTELLNSPDRTPAFFTQGITYMLPKDNNTQDPSKYRPITCLPTIYKILTSCITNKIYQHCTDNNILYEEQKGCTKCSRGCKEQLIIDSVILEQSRHNKRNIHTAYIDYKKAFDSVPHSWLQQVLSIYKVSNNITQFLNYIMSCWNTTLTLTLNDTKLITDPIQIKRGIFQGDSLSPLWFCLALNPLSYLLNTTNFGYNIKHNHEIHHNITHLFYMDDLKLYSSTSIKLNHLLHITETFSRDIQMDFGIDKCKTQHITAGKRQLLDYELEQGNLINSMDENETYKYLGFQQNTHIKHTSIKQTLITQYLQRVRSILKTKLHGRNTIKAINTYAIPVLTYSFGIIRWTNTDLEQIQRNTRTLLTKHHIHHPHSSTIRLYLPRSEGGRGLTDIKLLHQTQIHNLRQYFYNKSDTSVLHKTVTYADKSYTPLNLHETNVLPPTSKLTYITNNIQTWNQKPLHGRFPQEVGQDCVDSIATHSWLSECDVFPETEGFMLAIQDQVINTRNYKKHIHKDKTVTNDSCRLCSQTSETIQHIISACTRLAQTEYKHRHDQVAKIIHQKLALKHNLITDTTPYYKYTPQIILENNTHKLYWDRTLLTDKTIHNNRPDITLIDKTQKSICIIDIAIPNTNNLTKTHAEKHRKYTDIAIELKTQWRMKSTVIVPIILSATGVIPKTIHHNLQLLGLDKNTYKHLQKAVIINTCHIVRKFLNITQDTTYRNDPQRIHVNNSTRSQHGTQHTVISPPLTQTNTQIQLTEQTSTTNDTTYTTIRDSPLKQTTLSPPISIQPKRKSLNSTLDSQHDTQHTVIFPNLTQPTTQTQLPEQTNAINTSNATRTTKTPSPTRPSTAKKHNTLASQKHTTLSQTQPTRTQPKRNNLNSTTGSQNTVMSPPVTHATTEIQLQEQRNTINTSNATCTTKTGPSNKVTRPSTFKKHKTPSSQKHTTFSQPTRIQPKRKNLNRTTGSQHTKISPPKTQATSQIQPQEQRNIINTSNATCTTKTGPSNKVTRPSTVKKHNTPSSQKQPTRIQPKRKNLNSTTGSQNTAISPPKTQATSQTRPQEQRNTINTIKKHKTPSSQKHTTLSQPTRIQPKRKAKETLTQ

SEQ ID NO: 9017 - protein, 1759 aa, Photinus pyralis
MKMEFKQSLGKMPLPEERQGTSGAIAGRCSMRADSDELVNRRPLVGIPETSTAERRLRRGQRPPEEDRHEETFVPASQPLVDGTSAKDTSKRRMKWDEGMNRFIFGTYLEITKMETDRTAYRGKLYHAFITQYPHLAHLTEQRIADQRRVIIKNTLLTLDTQEQIRHEIEALLNTNNTLIVQDNTPVLNNTEIQIFATPQQSIDTNNHINQTLTSLQKEFDNALLEFSNTDPTQRARIPKQSHTTKLRTLSKTLNDHILPNYINDNTSLHQLHFVVYCGAVAVSRCNGSRITTNKEHHTTKKRSPPAWEKRLINRIDDIRRDLGRITQYIQGTRSSKLTRQVQHITTKLNNHTTREQNTNYNEHRDTLTQKLSIYTNRLKRYRETADRKRHNTQFKHNEKLFYRSLTQNSTNEKLIPPSLHSLQQYWFDLWTKDIKHNPHAPWITTETTRTEYITPMNNTNITTTDIIQTINHLHNWKSPGIDNIHNFWWKYFTYTHSYLAQQFTELLNSPDRTPAFFTQGITYMLPKDNNTQDPSKYRPITCLPTIYKILTSCITNKIYQHCTDNNILYEEQKGCTKYSRGCKEQLIIDSVILEQSRHNKRNIHTAYIDYKKAFDSVPHSWLQQVLSIYKVSNNITQFLNYIMSCWNTTLTLTLNDTKLITDPIQIKRGIFQGDSLSPLWFCLALNPLSHLLNTTNFGYNIKHNHEIHHNITHLFYMDDLKLYSSTSIKLNHLLHITETFSRDIQMDFGIDKCKTQHITAGKRQLLDYELEQGNLINSMDENETYKYLGFQQNTHIKHTSIKQTLITQYLQRVRSILKTKLHGRNTIKAINTYAIPVLTYSFGIIRWTNTDLEQIQRNTRTLLTKHHIHHPHSSSIRLYLPRSEGGRGLTDIKLLHQTQIHNLRQYFYNKSDTSVLHKTVTYADKSYTPLNLHETNVLPPTSKLTYITNNIQTWNQKPLHGRFPQEVGQDCVDSIATHSWLSECDVFPETEGFMLAIQDQVINTRNYKKHIHKDKTVTNDSCRLCSQTSETIQHIISACTRLAQTEYKHRHDQVAKIIHQKLALKHNLITDTTPYYKYTPQIILENNTHKLYWDRTLLTDKTIHNNRPDITLIDKTQKSICIIDIAIPNTNNLTKTHAEKHRKYTDIAIELKTQWRMKSTVIVPIILSATGVIPKTIHHNLQLLGLDKNTYKHLQKAVIINTCHIVRKFLNITQDTTYRNDPQRIHVNNSTRSQHGTQHTVISPPLTQTSTQIQLTEQTSTTNDTTYTTIRDSPLKQTTLSQPISIQPKRKSLNSTLDSQHDTQHTVIFPNLTQPTTQTQLPEQTNAINTSNATRTTKTPSPTRPSTSEKHNTLSSQKHTTLSQTQPTRTQPKRNNLNTGSQNTVMSPPITHATTEIQLQEQRNTINTSNATCTTKTGPSNKVTRPSTFKKHKTPSSQKHTTFSQPTRIQPKRKNLNRTTGSQHTKISPAKTQATSQIQPQEQRNTINTTNATCTTKTGPPNKITRPSTVKKHITPSSQKHTTFSQPTRIQPQRKNLNRTTGSQHTKISPPKTQATSQIQPQEQRNIINTSNATCTTKTGPPNKVARPSTIKKHITPSSPKHTTLSQPTRIQPKRRNLYSTTSSQNTVISPSITQATSQIQPQEQRNTINTSNATCTTKTGPSDKVTRPSTVKKHNTPSSQKQPTRIQPKRKNLNTGSQNTAISPPKTQATSQIRPQEQRNTINTIKKHKTPSSQKHTTLSQPTRIQPKRKAKETLTQ

SEQ ID NO: 9018 - protein, 1228 aa, Strongyloides papillosus
MERWTEEELQIVEKILDQNSENLDYAKIKDEHFTKRTVPAIKKKILEIKKRKNNGSTARAATVWDKLESKKLLNAFVNTPGNLTKTQKCQLIQSDFPNRTIKAMQTHLRTHYLDIYMGYTTKVDESPEKNTSSIPRRPLSKIVDQTPSTSKKKEITKKNVKVIDNKESSLETSTIGSSETSMINNSKFDAQLSNPKEPKSQIEKIFLKYFNLVQTKKLKRLTKFVVQSFHQCKINAVSNLVKNKIASLEKEVKKLPRRHQLCKLAILTGEYTLKESCTKKNMAKKDKPSEILRRKISKLQARVKRTLRIEEGEKISLRLKSEIKEMKRLRMKPKQYISTTKHRIELLEKEVAEAKERDEKWILRFRAGNQPGLKNLNKFTKDDNSIDYIEAEKYFSELYSPFQPPTPETPYYNEWLNYIQDTCLTSEDENLSEAEIRHYVNQHLKTTSNWKAGGWDQITNYLYKYIPAAKEYLIRHMTRIINGTYKLSRKDVQATCVLLHKGGSKEISNYRPLSLICTDIKCYTSIITQTIYDRLPSSIIPQEQLCQPKKWGTVEGLLRDKAYSGTARYRNVEQYSLWVDYRKAYDSICHKQMQRLINLLPIGPSMRNQLQHLTTILNTKLMDNESPNERQTISIKRGVMQGDVISPLLYILVSSSAVYQLKKNLPLKRLCKGNIQVITYMDDLKVFLPNESSLRAATELIEHSSAEIGLFLNSVKSGYFSRKNREDLEGFKIPKVAKYYKYLGILQTDHDVHENYEKLSEAVSKSVKKIFSSKLSFYQKCKLFNCSTIAAATYILGNITTKESVEATLAKARKLDLTIRKDLVSTNQKIRQVSNNRLYIPHQYGGYNLRTIELETSLQYIRRYSYLCSVDSMKEPLQLLEQMQKGGLRTAFSDWKYVKKLYKLPEPNFRSGLSYNEISKELISKVKKIDSDIKKKDWAKSMKYPQRVISTENIDFPGLKSLNLNTEHWRTLTAAGEEQLFLNAKCQSTNYNTKLEGKCRRCGELETSHHVVSMCKGHKYHQRHDIVIYHLLVKLAEKIKIQHSLQFGQATVSFKSEGVSIVAGAPYLSEKKLKFNRPDIICYLYDEGNNLKEIVVLEVAIPHLSQYESSQKRKRIKYEVNSIDEVTDIEKPMRNLNLVSEIQNKEHRKTSLFILAIGTYGEVIYNEETNSTLHMLQEKFLMSNKEVQLLLTKMSYSVMVVVLEFSIVTYRILMIVATKIHLHNICHG

SEQ ID NO: 9019 - protein, 2341 aa, Steinernema diaprepesi
MLKVYVYRFSALRLRSKFILVLTSMEKFNCDMEIGLGSGLWSVYPPQGAWSAASNCTSSDGGRILDFLLSAHLSGPVSPGSRVTHESCICGANMGYIGAARDPECTPKDGYGPPRLHAGLCCLPDSSGMTASLGMKSESVALTGWSRGCGINGTTSPATRSHGSLNCRVLSDPRPSPLLRHHHPAAATEMPTTGRATQVSTPRREDGDSSLRQQQKKKIHARGIKKGRRVSTPPGHLCRGIGTVSANHLLGTRPSWKSQGSGLSRKSAQTGRSRGSGINGTSSPASSSTLGVGDGSKSAATMYGYMHPCQASFGVKTDGKTDPRVSCKPEELIEGKYALGIPASAGQYLHGNLPTSGNSRISHPPTALGASTNASVGAKRQVCRWSTIKPTLERAEHVGFYPTKAPSDESVVEGSSDLDFPKLETAARQGPRKGTNNMCGELASKDPILGAHQRRPKGLDEVHHCPIHESLSSTAVKREISRSSSFNEVSEMVAPNCANPRVRKPCPLTRHGLVTAYPSLGNQNSDTSYRREKLGFGGTNKLSKGCCPLTAPGPWTQSLEVPPLSLCGSVSSSGGCDWTCPTNNGCTIDFGNQESAFLSKDHGSDNITGTCPPSRPVPETYARLYGNGIGERRNSQRPPTVFPRREITCEYHRDTCLHCLLERYIDLMSGVGCERRCTCGGGSDPDGTLTYALNSRTAEPLLTSVDSDTVRPKGTGNAASNPVVTKTSTTELRIELTDPKTSILLARTVLVTRHPEPNPLSCPLCDQVYLGVNRIQSVTRHLALVHRIKVVVKHGCLLCDFRPDDLGKGYPKHHVLQHIREVHPNVETLLPVDWNADSRFQCPRCQMDFPSRQGLGNHLRYRSKRCKGLQAVAADSKNEAVVSKTPQAYEQKVDIRCEPNGWTKVRSGTRSSPRSFKPSPTTKSPMMWSPIGPSEDASEPHHDSVDGTGREPQKTQPPSDIRESPCLPTENGGEMMLTDSPSSPQKEAFHLRPLHYLSGRDAWLGDDLVRAYTDHRLPEFLCVDSLTFRKETVSKRRHIVANIQDGLGFGQVFLPILYDCHWRLATFEINEQVVRYYDTFGNPPRPDIESRILEIVKVLKCKATRVVSMPTRFFHSQIDDYNCGAYVLMLAERLAYGKDTRITKAEADEWRSLALKDLTTSHSKTPDRPLGYRRNKTLTGKCTFYEHCNYASVQATKSPATKPIATTISLPSRNPSTVGHKLARTSPKVQALSEMSPMQVDAHDEVGATPRARPKAILRKPTLKAPALGDNDGRPSMSPLVEADPLICGQSLENAAVVTDGSSVPEKIRIGPLLERPIRSWKDVEYIARSIPHMARAITLGLDPRDTRLWKERMEHPSEEEGGIATQTYGKGARGRIATGNPALLTSRDWIRLYKENRSKCISLLLPHTSAVCTIPKAEIEQYFTTQFSAPPAPEFHKLLQKCGTLPQLDEDAQRRLVSDFCPSEVLTALKRPSTAPGPDRVSYAQLREVDPSGLGLARLYTSCLTSCRIPNEWKTAKTVLLYKKGDRKDLANWRPLTLSNTVYKIYTAILAKRVSTITNTLSSSQKGFTTFDGCGDHTATLTVMIERAVNLKRNLAIAWLDLKNAFGSVPHNVITETLQAFGFPEAFVHTIADFYANTTTRVQTQAGLSQPIPIKSGVKQGDPISPMLFNICLEPLLRAMACSHPDVSLLAFADDLALVAPNPEILQQALDAITKFAGTMGLQFQPRKCASLVITKGRAVTTPMTIDNSAITSLDERGVYTYLGIQIGIHSRLDLKGPLKEGLTDAAAICDSRLAPWQKLEALRTYILPRFAFFLRNGDPYLEDLKSFDTKFSGLVKKVINVPILGGSRHYLHGATRLGGMGIGSLVDDYHIGSVATLSRLLFSRDTAVAQVMNEEFERLIRKWSRRQIASAQDKLNFLNCTDAFEGHLQSSESHSVWTRMRRTTRYFKKFFDKFEFVLTDDNTLGLKLDNTPRVIDLSSFAASSCLRQAVMMRHIRVLTSNCRSQGKVLASASKSELSNRFIKSGLYISFSAYRWIHRARLNLHLVNKTNRRHPDDRCRRCEQPETLPHILNNCKPSLHLIGKRHDKLLNRLVRAIPARPHQSIRVNQQVPDSMTSNRPDIVLIDENNKSAVICDVTVPFENGPDALNKAYEQKVAKYRSEAETLVAQGYSVLTCAFVIGTLGTWCPLNDSTLRALGIRRGYIRKMIPLMLAETVELSKDIFWNHILGDRYRTSRNRFFESILDPCSRQHRPTAKTEQPPPARTTDAQQTTPAADLRPKKRGHPPTTPRCAAPPKRRPANTPPPPTPKISKRRRHNFAFQLVTPAYRTPQPKRRLRSSP

SEQ ID NO: 9020 - protein, 1774 aa, Steinernema diaprepesi
MDADACYETAFLRCNGGSDSITLSGCSSPTHVSRPSQPSHARVKYDIGTGKQVRCPKSAVPAREIALCEQHRYDCLSCLLDRYNDLVSEVRCSRHCSCGGGCSMDVTLIRDTDERIKTEPNEPLRTEGREEHAAPLGTDDDAGQAAQPKPTLELCLELTDPAKSVLLVRRVLVDRHPEPEPMSCPLCDVSYVGVNRIQSVTRHLFKDHSVTATLRHACRLCDFEPCIEPGKGYAKLQVNKHIREVHPNVKELLKPDWIADLRFHCPHCQRGFPSEQGVRNHLRSTLCERTSTVADQKNVATGSQIAPASVTSSDAPRQPDEWTTVRPGKRHSPRSFKPKPDLRLGHAPSSPSNDAGSNRAKPGRSANPRVTKHIDACESLSNTVDCGEIMLTDSPSHSPESGNEPHYLEPLRYLSGQGAWLGDDLVRAYTDKRLPDFLCIDSLTFRKGPISRRKDIVANFNTGLGLGQVFMPILYESHWRLATFEINEHVVRYYDTFGQPPRADIEAKILDIVRILNCKADRVICIPPRFFHAQADDYNCGAYVLMLAERLAHNRDTRMTKEEADEWRALALKDFTSKRSMYPNRPLGAKVSERSKLTGQCSLKEHCNYARVQAIKIPQTPIATDRSSNSSNSRNPMSVGRKLVAPRCTVRRDGEMSPMQVDTYDAIRTTPRPPHPAVKRRPMLKAPSLGDSVGRPTVSPLVETVPMDCGQMAEDAAQVEMDSRTSEATQHSSHQDPGLRPVSRNPGPLLTGELASWKDAEAIARSIPHMVQALEKGLDPLDTRLWKERLEHPSEGDEGIACQTHSKGSKGRIALGNPSSLTSSDWIKLYKENRSKCISLLLPHTSAVCTIPKVDVERYFTAQFSAPPALRFHELLQKCGSLPTLDEDMQRRLLSPFCPSEILNALKRPSTAPGPDRVSYAQLRKLDPTGLGLARLYNYCLANSQIPAEWKTAKTTLLYKKGARDDLANWRPITMSNVVYKVFTAILAKRVSTITNTLSSNQKGFTSFDGCGDHTATLTVMIERTVAQRKNLAVCWLDLKNAFGSIPHNVITETLTAFGFPKAFVHTVEDFYTNTTTRVQTQAGLTRPIPVRSGVKQGDPISPILFNICLEPLLRAMMQSFPDLQILAFADDLALVAPSPDFLQSALDAITTFAGSMGLQFQPRKCASMVIEKGKTLMRPMILEGQVITSLDKEGTYTYLGLPLGVHSRAQLQGPLSDGITDATAISTSRLAPWQKLDALRTYILPRFTFSIRNGDPYLGDLKSFDTQLTKLVKTVINVPIMGGSRHYLHGASKLGGMGISSLVDEYHIGSVATLGRLLFSRDAEVANTMNEDFSRTIRDWSHRSTVTDQERLDFLNCTDTFNGHLQGSGAHSYWTRMRRSTRFFKKFFTKFEFVLTPEKALAIQIDDTKRTIDLSLPNASSVLRQAVMTRHIRALTTNCRSQGKVLASASLSELSNRFIKSGLYVSFSAYRWIHRARLNLHLVNNTNRRHHDNRCRRCEQTETLPHILNHCKQALSLITRRHNAVLSRLVRAIPARQNQTLRVNQTVPGSLSSNRPDIVLIDESSKTAVICDVAIPFENGVDSLRKAYEQKVAKYRPEIETLVAQGYSVNACAFIVGALGSWCPLNQHTIDLLGIRRAYTKRMIPLMLAETIELSKDIFWRHILGDRYKVRKHRFFASILDDVPARESTVPRTASISAATPAVQPSDGHRCPQKRPHPPTTQPRLQKKTRPADSPTLKTPKILKRSRHNFAFQLVTPAYRTPQPKRRQLRSSP

SEQ ID NO: 9021 - protein, 886 aa, Paralithodes platypus
MKVSRACELKTRRFLAILASLRQENVLEGGPLNSPPRPLQHQDEPEVPVPGVVIDYSVEVGDLLRELSLTVGVGMPQTIEDVEAQVENWFPAKITPPRNPTGRVPRLYPRPRKKYIYQMTQRSWDRDRAQTIGDIVEGKIPGEIRPYPEGTRDFWVNLFSTPSERDLRTPTLVGPVLYDLAKPISDREIVEALSRTLTKSSPGWDGRQVSDLKTMSLDRIGWVFNALLFLKKPVSAWVKARTVLLPKTEHPLGPSEYRPITIMSAILRVYHKTLFQRSIKARPPPIYQKGFCPKRGTEQNLACLQGMIAHAKKEINDLRVAFIDFKKAFDSINHESVLKTAIRWGFPETIIDYLRELYSRASTNILGREVKIKRGVLQGDPLSPLLFNIALDWVLSALQPTIGYVIDGITCGKLAFADDVILTARTVVGLQMNINIMATEGRKVGLELGIHKCATLSFATNKRSKKWILDASTKFKTEGNEITPLGTGDFYRYLGLLTGMNGIGKGSEVKDKYELALNRLQRASLKPQQKVWGLVNVIGPRTRYGISFGPVTRGLLARLDSRTRHFLRKCLHLPKDTSNSSFHTSIRDGGLGAPTYRRSVPEAHTASWEWIQSSPDPLVRYAVAMFQRHIVPLAATTTTALRRRVREESREGLYRSLDGAGLRGASQTPKSSTWIHDGSHLMTGSKYIQAIKTRLGILYTKLRASRGRLGPVACDLGCAQVESVGHILQRCPFGGPWRTKRHDGVLDLLSGRLRENGFSVIREPALRTPMGLRKPDLLISSEVSGSHVLDVQVVADSHCSTLAQDNALKVEYYNKEFVLAKAQELTGYHAVVSTLTISWRGLMAPASVNTLRSLGLTAGDLKLLVVRSLEGSVLIYDIHRGASGRW

SEQ ID NO: 9022 - protein, 1068 aa, Leptotrombidium pallidum
MESEENENEVDCALGAKIDNPGENGDHNSLNGPFQGPPENETAGNIVEILYTKANNFNFKCSFGTCQQNYTDRGKAVKHLQSHGISTQNIKYKCPSCLKLNANHRSLAQHTCKKEISEEITLPYPCTITGCQRSFQSFPGMRQHLKQAHIVEYSQELACIDPKVKRFSENESIALARLESAASAKDMQRINHFLAEQVGRTYESIRSHRKSQKYQAKLASCRLPQAINEETNAVTELVDERKLTNSEEEAELTDALKHIKPKTFNIRKHETPTNHSRKNKRHAEYVLHQRLYKSDKKCLIQVLTGNNINFSNPVPQTACEFFGKKLENTSAPDIEPFTSKTDNLVNINEPITETEITENLRKMNPKKTPGLDGVKVQELKKLNKDLLVRLFNNWKEAKIPVHHKQNYTKLIPKIPTPKGDGDYRPITVSNNIYRLYSRIMDNRLKREIKLNKAQRAFIPINGCSENIITLTEIIRNAKQKRKSLQLVSLDIAKAFDSVKHSSILRALQRFGLDSASQAMIMDLVEDATTKFIDGEQTTFSIKQGVKQGDPISPTIFNMVVDELLDILDTEMGYKYNNQYVAALCFADDLVLISESVFGMKKLLDQTNKFYAERGLLINAKKSSSVSFRRVPNSKALIRDNSTSFSINNEVIPHADINHLIRYLGIQFNPFERKVVQQIKPITELTEAIRKSKLKPHQKIELIRRNLIGTSLYTAVNSMANKTQLKKIDSEIKKTVKSILHLPSSTSDAVLYMKINKGGLGIMNLSQKVPLMQIRLITKLSKSDSPVTREIAISDNMQKLKDKLMRQCRLNNSIAKAIKQKQQQLTEDLQHQYEKSVQGHGSHQLHGKISNSWIENPQNMKPWTYINCILLRSNQLQTREYHHRGRNIDLDQKLCRQCKKSVEYQSHITQRCPNMTDEIRNRHNYIMNKITTIFQTNKDLEIFSEPILRPLHQMEKRLKPDWLIVRKDKVYVIDLTIPYEGGTNIAESRKAKIRKYKELKTALYTQYPNAKEVIFEAIVIGARGSWPKENDEVFNKLQVPIKDEVKEQLVINTMERTVSIFRNFCKLPI

SEQ ID NO: 9023 - protein, 1215 aa, Hycleus cichorii
MPVTRSTNKIPQKGPLRPDQEKPQTGKTRNTARAASARTEDQKQIDRPQNINPGLRPSTSRSNDDGDKIPKDSNKARTRPTDTKEQDSLACENCGKYYMSASGLARHRKGGCVPRTACGFCPATFGTFAGVRQHERQEHPAEYNKDLETKLNIPENLILEQLAQIEATSTDGIFYKEMMLKTNLTHEQVKYRRRRPIYLTFLERAKQNLKRKSLNNSSSQSTSAANSRTGNVLPVRGRPDGDAAPPSRGQKLSSIKEIPKKIPKETPKQIPKETPQEQKPTTSRELVVPEASSSVVKAAVVPPQAEIKQNNEKTMIKPQTAVRTKIRRSTSLPDLNKNKKDHFIKYFTDCRDQIVEDTILNNILDNVTDLPDAELELQLERWLTENFGDNKKTKRAIKCREKKQPTYGSQNRGRGPRASQYKKAQDLYNKNRSALADIVISGRQLTTDDEYPAINDVERLYAGIYEAGDAEGMPSNHRISISNNSRTNKTDRFKVYRPVTDDDIREAKTKWNNSASGPDGVSHAAVRMFDNSRLAVFFSIILYRRISLRPWKRARTTLIYKDGNRKDPGNWRPITISSMIQRLLHRILAKRIRDNAKLNINQRGFVNGDGTLANTIILNHYIKTRNASRKPFNIISLDIRKAFDTVTHGAVVGALRRQNIDHEIIEYIANTFKNSSTEIKVGNSITRPIEIKRGVKQGDPMSPILFNLVINELLNEIEKGGRGGDLGMNQKCSILAFADDLVLLEDNSIFIPGVLETIERFMAKSGMEVNPKKCCAVTTAIKNGAIVTRTTPIFKINRHWINPIDNINTFKYLGHHFNSSGIFKPTISHLNIWLENIRKAPLKPDQKLEIIRDFILPKLQYSFQTPAITAGILRDADRMIKRAVKRHMHLNIHTNDAMIHAKVKDGGLGIHDLRTNIPRILLNRLTNILDNAELDMVINAVMQHPDTTRLMYNLEKLSGTTPSEHIYREKIKTEVHSKGIELSADDRASRDWILKRPKGWAAKDFVRAVQLRTGNLPTMGISSNPPELRSCRGGCGTSETLNHVLQKCPVTHYERIYRHNEIAKKIAKHCRDKGWHVEEEPHVRHRDGQLFKPDLAIHKNNEIIISDMQVSWEGNKSMSTIWLEKERVYNNNKFIDASKSRWPGKTLKFLPVIMGARGIWPRCNEKTEIELKFTAGLKSSCVHSTLKWGSSIHKAFTKAVWKRVHGRDRARGNNG

SEQ ID NO: 9024 - protein, 930 aa, Cotesia typhae
MSRKQVSRIQCVIEFDTTQRPYTPRIRRIAAELRWRHHTLNKSTLHVIKEESLNKLRALVAAKKSLEKRLKRLVDNSLFRSSPSRFLTPKTDVTGNYPTPERVESFWIELYGDQPNVNTNTPALHDFKVFCREHRRQNADEESPAVSVDEVRSALNGSKNWAAPGPDGINVFWWKKFTSTHLHLARIFTSYIRADDPIPDWLVEGRTVLIPKKGDLSDPKNFRPITCLNAVYKIFTKILNNRILQQIEPVWQQIYEQRGSKRGLSGCKENLIVDRCVLQDAIYYQRNLSMAWIDYRKAFDSTPHELILYLLKCLGVNPEIVECIRRTMQLWRTRFHIGSGNALHVTGVVEYKRGVFQGDSLSPLLFCISLLPISVALVGKTRGYSVGPPGDRKYSITHLLYMDDLKLYSVDEDHLQVALNIVAEYTRDVGMSFGLDKCAVVHLARGKCSDTGDDVELVDGSVLRQLDAGELYRYLGMEEHRTHAVSEVRTTLQSEYVRRLRKFWSSELSGKNKVSATNMLAVPVLLYSFGVLKWARKDLRDLDIKTRKIINMNRSMHPNSSVARLYLSRSIGRRGLQSLERLHDRLVLGLTHEVVNFTADEDDFLMQIVHKHENAHKGSFLYKAAIYAARTLGLGEINAFMELRKEEFKSVIRNAEEKLLLGELMDKSMHSVFFKHVRDHGLSTQLTFSFLKSAGLMSETEGFIFACQDGVINTLEYRSKVLQVQLPDTSCRRCRQHPETLMHLLSACPVLARGAYIQRHNAALRVLYYYLHHCYGIDVTPVLPYLPGDIPQVVENDSCKIYWNMPFATTRWIDHNKPDIVLFDKATRDIYVIEFSAPAEYNISAKEEHKRQIYQDLLFEIGKLYPGYRVKLVVLIVGVLGGMKQSFVSSLAKVPACSSKAEFLAVRMQKAVLLGSLRLLRKMTLACCDH

SEQ ID NO: 9025 - protein, 1054 aa, Cotesia typhae
MNDDDPGALRTYFKWTEELRVDLLVCYQRSEPGVSGYMARMHTLWSDMHPELAHFTPKHLRNYAAHLRRNRRSLVPDRRQSNRLSFPAQLHQERRRSSLDNNNPFVGRQVSISKKITYSQQQLDAVNEDLRANILEDSTLLTVSQVVYGAAVSAFPRERQCLSIEARLKQRISQLGLKIDMSRKQVSRIQCVIEYDTTQTPYTPRIRRIAAELRWRHHTLNKSTLHVIKEECLNKLRALVAAKKSLEKRLKRLVDNSLFRSSPSRFLTPKTDVTGNYPTPERVEAFWTELYGDQPNVNANTPALHDFKVFCREHRRQNADEESPAVSVDEVRSALNGSKNWAAPGPDGINVFWWKKFTSTHLHLARIFTSYIRADDPIPDWLVEGRTVLIPKKGDLSDPKNFRPITCLNAVYKIFTKILNNRILQQIEPVWQQIYEQRGSKRGLSGCKENLIVDRCVLQDAIYYQRNLSMAWIDYRKAFDSTPHELILYLLKCLGVNPEIVECIRRTMQLWRTRFHIGSGNALHVTGVVEYKRGVFQGDSLSPLLLFCISLLPISVALRKTRGYSVGPPGDRKYSITHLLYMDDLKLYSADEDHLQAALNIVAEYTRDVGMSFGLDKCAVVHLARGKCSDTGDDVELVDGSVLSQLDAGELYRYLGMEEDRMHAVSEVRTTLQSEYVRRLRKIWSSELSGKNKVSATNMLAVPVLLYSFGVLKWTRKDLRDLDIKTRKIINMNRSMHPNSSVARLYLSRSIGGRGLQSLERLHDRLVLGLTHEVVNFTADEDDFLMQIVHKHENAHKRSFLYKAAIYAARTLGLGEINALMELRKEEFKSVIRNAEEKLLLGELMDKTMHSVFFKHVRDHGLSIQLTFSFLKSAGLMSETEGFIFACQDGVINTLEYRSKVLQVQLPDTSCRRCRQHPETLMHLLSACPVLARGAYIQRHNAALRVLYYYLRHCYGIDVTPVLPYLPGDIPQVVENDSCKIYWNMPFATTRRIDHNKPDIVLFDKATHDIYVIEFSAPAEYNISAKEEHKDKYIRISCLKLVNFTQVTVSSLSS

SEQ ID NO: 9026 - protein, 959 aa, Cotesia typhae
MKDDDPGALRTYFKWTEELRVDLLVCYQRSEAGVSGYMARMHTLWSDMHPELAHFTPKHLRNYAAHLRRNRRSLVPDRRQSNRLSFPAQLHQERRRSSLDNNNPFVGRQVSISKKITYSQQQLDAVNEDLRATILEDSTLLTVSQVVYGAAVSAFPRERHCLSIEARLRQRILQLGSKSDSSRKHVSRIQCVIEFETTQKAYTPRIRRIVAELRWRHHTLNKSMLLVIKEESLNKLRALVTAKKSLEKRLKRLVDNSLFRSSRSRFLTPKTDDTGTYPTPERVEAFWTELYGDKPNVNANTPALHDFKAFCREHRRQNADEESPAVSVDEVRSALNGSKNWAAPRPDGINVFWWKKFTSTHLHLARIFTSYIRADDPIPNWLVEGRTVLIPKKGDLSDPKNFRPITCLNAVYKIFTKILNNRILQQIGPVWQQIYEHRGSKRGLSGCKENLIVDRCVLQDVIYYQRNLSTAWIHYRKAFDSTPHELFLYLLKCLGVNPEIVECIRRTMQLWRTRFHIGSGNALHVTGVVEYKRGVFQGDSLSPLLFCVSLLPISVALRKTRGYSVGPPGDRNYSITHLLYMDDLKLYSADKDHLQAALNIVAEYTRDVGMSFGLDKCAVVHLARGKCSDTGDDVELVDRSVLRQLDAGELYRYLGMEEHRMHAVSEVRATLQSEYVRRLRKIWSTELSGKSKVSATNMLAVPVLLYTFGVLKWARKDLRDLDIKTRKVINMNRSMNPNSSVARLYLPRSIGGRGLQSLERLHDRLVLGLTHEVVNFTADEDDFLMQIVHKHENEHKGSFLYKAAKYAARTLGLGEKNALMKLRKDEFKSVIRNAEEKLLLGELMDKSMHSVFFKHVRDNGLSTQLTFSFLKSAGLMSETEGFIFACQDGVINTLEYRSKVLQVQLPDTSCRRCRQHPETLMHLLSACPVLARGAYIQRHNAALRVLYYYLRHWRYSPGC

SEQ ID NO: 9027 - protein, 1223 aa, Cotesia typhae
MNDDDPGALRTYFKWTEELRVDLLVCYQRSEPGVSGYMARMHTLWSDMHPELAHFTPKHLRNYAAHLRRNRKSLVQDRRQSNRLSFPAQLHQERRRSSLDNNNPFVGRQVSISKKISYSQQQLDAVNEDLRANILEDSILLTVSQVVYGAAVSAFPRERQCLSIEARLKQRISQLGLKIDMSRKQVSRIQCVIEYDTTQTPYTPRIRRIAAELRWRHHTLNKSTLHVIKEESLNKLRALVAAKKSLEKRLKRLVDNSLFRSSPSRFLTPKTDVTGNYPTPERVEAFWTELYGDQPNVNANTPALHDFKVFCREHRRQNADEESPAVSVDEVRSALNGSKNWAAPGPDGINVFWWKKFTSTHLHLARIFTSYIRADDPIPDWLVEGRTVLIPKKGDLSDPKNFRPITCLNAVYKIFTKILNNRILQQIEPVWQQIYEQRGSKRGLSGCKENLIVDRCVLQDAIYYQRNLSMAWIDYRKAFDSTPHELILYLLKCLGVNPEIVECIRRTMQLWRTRFHIGSGNALHVTGVVEYKRGVFQGDSLSPLLFCISLLPISVALRKTHGYSVGPPGDRNYSITHLLYMDDLKLYSADKDHLQAALNIVAEYTRDVGMSFGLDKCAVVHLARGKCSDTGDDVELVDGSVLRQLDAGELYRYLGMEEHRMHAVSEVRTTLQSEYVRRLRKIWSSELSGKNKVSATNMLAVPVLLYSFGVLKWTRKDLRDLDIKTRKIINMNRSMHPNSSVARLYLSRSIGGRGLQSLERLHDRLVLGLTHEVVNFTADEDDFLMQIVHKHENAHKGSFLYKAAIYAARTLGLGEINALMELRKEEFKSVIRNAEEKLLLGELMDKSMHSVFFKHVRDHGLSIQLTFSFLKSAGLMSETEGFIFACQDGVINTLEYRSKVLQVQLPDTSCRRCRQHPETLMRLLSACPVLARGAYIQRHNAALRVLYYYLRHCYGIDVTPVLPYLPGDIPQVVENDSCKIYWNMPFATTRRIDHNKPDIVLFDKATRDIYVIEFSAPAEYNISAKEEHKRQIYQDLLFEIGKLYPGYRVKLVVLIVGVLGGMKQSFVSSLAKVPACSSKAEFLAVRMQKAVLLGSLRLFGFTGYVQELFGYRELLFTDNFSFGIRDRSGDHVMIVDNQHELESIIKINQVKKKKVVVKRTLCSPYWSAVVIRLTISIKTFYDISFSNIISHYRCHLELNIIHYWKKLRDQKKIPNFSVVFNRP

SEQ ID NO: 9028 - protein, 640 aa, Cotesia glomerata
MAWIDYRKAFDSTSHELILYFLKCLGVNPEIVECIRRTMQLWRTRFYIGSGNALRITGVVEYKRGVFQGDSLSPLLFCISLLPISVALRKTHGYSVGPPGDRKYSITHLLYMDDLKLYSADEDHLQAALNIVAEYTRDVGMSFGLDKCAVVHLARGKCSDTSDDVELVDGSILRQLDAGELYRYLGMEEHRMHAVSEVQATLRSEYVRRLRKIWSSELSGKNKVSATNMLAVPVLLYSFGVLKWARKDLRDLDIKTRKVINMNRSMHPNSSVARLYLSRSIGGRGLQSLERLHDRLVLGLTHEVVNFTADEDDFLMQIVHKHENAHKGSFLYKAAIYAARTLGLGEINALMELRKEEFKSVIRNAEEKLLLGELMGKSMHSVFFKHVRDHGLSTQLTFSFLKSAGLMSETEGFIFACQDGVINTLEYRSKVLQVQLPDTTCRACKQHPETLMHILSACPVLARGAYIQRHNAALRVLYYYLRHRYGIDVTPVLPYLPGDIPQVVENDSCKIYWNMPFATTRRIDHNKPDIVLFDKATRDIYVIEFSAPAEYNISAKEEHKRQIYQDLLFEIGKLYPGYRVKLVVLIVGVLGGMKQSFVSSLARVPACSSKAEFLAVRMQKAVILGSLRLLRTMTLACCDH

SEQ ID NO: 9029 - protein, 1074 aa, Cotesia glomerata
MNDDDPGALRTYFKWTEELRVDLLVCYQRSEPGVSGYMARMHTLWSDMHPELEHFTPKHLRNYAAYLRRNRRSLVPDRRQSNRLSFPAQLHQERRRSSLDDNNPFIGRQVSIYSQQQLEAVNEDLRANILEDSTLLTVSQVVYGAAVSAFPRERHCLSIEARLRQRISQLGLKIDRSRKQVSRIQCVIEFETTQRAYTPRIRRIAAELRWRHHTLNKSTLLVIKEESLNKLRALVTAKKSLEKRLKRLVDNSLFRSSPSRFLTPKTDVTGNYPTPERVEAFWTELYGDQPNVNANAPALDDFKAFCREHRRQNADEESPAVSVNEVRSALNGSKNWAAPGPDGINVFWWKKFTSTHLHLARIFTSYIRADEPIPDWLVEGRTVLIPKKGDLSDPKNYRPITCLNAVYKIFTKILNNRILQEIEPVWQQIYEQRGSKRGLSGCKENLIVDRCVTQDAIYYQRNLSMAWIDYRKAFDSTPHELILYLLKCLGVNPEIVECIRRTMQLWRTRFHIGSGNALHITGVVEYKRGVFQGDSLSPLLFCISLLPISVALRKTRGYSVGPPGDRKYSITHLLYMDDLKLYSADEDHLQAALNIVAEYTRDVGMSFGLDKCAVVHLARGKCSVTGDDVELVDGSVLRQLDARELYRYLGMEEHRMHAVSEVQATLRSEYVRRLRKIWSSELSGKNKVSATNTLAVPVLLYSFGVLKWARKDLRDLDIRTRKTINMNRSMHSNSSVARLYLSRSIGGRGLQSLERLHDRLVLGLTHEVVNFTADEDDFLMQIVHKHENAHKGSFLYKAAIYAARTLGLGEINALMELRKEEFKSVIRNAEEKLLLGELMDKSMHSVYFKHVRDHGLSTQLTFSFLKSAGLMSETEGFIFACQDGVINTLEYRSKVLQVQLPDTTCRMCKQHPETLMHILSACPVLARGAYIQRHNAALRVLYYYLRHYYGIDMTPVLPYLPGDIPQVVENDSCKIYWNMPFATTRRIDHNKPDIVLFDKATRDIYVIEFSAPAEHNISAKEEHKRQIYQDLLFEIGKLYPGYRVKLVVLIVGVLGGMKVFCILTCQSSSLLIKS

SEQ ID NO: 9030 - protein, 640 aa, Cotesia glomerata
MAWIDYRKAFDSTSHELILYLLKCLGVNPEIVECIRRTMQLWRTRFHIGKGNALHITGVVEYKRGVFQGDSLSPLLFCISLLPISVALRKTRGYSVGPPGDRKYSITHLLYMDDLKLYSADEDHLQAALNIVAEYTRDVGMSFGLDKCAVVHLARGKCSVTGDDVELVDGSVLRQLDAGELYRYLGMKEHRMHAVSEVQATLRSEYVRRLRKIWSSELSGKIKVSTTNTLAVPVLLYSFDVLKWARKDLRDLDIRTRKTINMNRSMHPNSSVARLYLSRSIGGRGLQSLERLHDRLVLGLTHEVVNFTADEDDFLMQIVHKHENAHKGSFLYKAAIYAARTLGLGEINALMELRKEEFKSVIRNAAEKLLLGKLMDKSMHSVFFKHVRDHGLSTQLTFSFLKSAGLMSETEGFIFACQDGVINTLEYRSKVLQVQLPDTTCRACKQHPETLMHILSACPVLARGAYIQRHNAALRVLYYYLRHRYGIDVTPVLPYLPGDIPQVVENDSCKIYWNMPFATTRRIDHNKPDIVLFDKATRDIYVIEFSAPAEYNISAKEEHKRQIYQDLLFEIGKLYPGYRVKLVVLIVGVLGGMKQSFVSSLARVPACSSKAEFLAVRMQKAVILGSLRLLRKMTLACCDH

SEQ ID NO: 9031 - protein, 602 aa, Cotesia typhae
MQLWRTRFHIGSGNALHVTRAVQYKRGVFQGDSLSPLLFCISLLPISVVLRQTRGYSAGPPSDRVYSITHQLFMDDLKIYSANKDHLQTALNIVAEYTRDVGMSFGLDKCAVVHLAKGKCSDTGGDVELVDGSVLRELDAGELYRYLGIEERRMYAVSEVRTTLRSEYVRRLRKIWSSELSGKNKVSATNMLAVPVLLYSFGVLKWPRNELKDLDIKTRKVINMNQSMHPNSSVARMYLSRNIGGRGLQSLERLHDRLVLGLTYEVANFTADEDDFLMQFVHSHENARKGSFLYKAAIYAANTLGLGEINALIELPKKEFKSVVRIAEEKKLLGEHMDKSMHSVYFKHVRDHGLSTQLTFSFLKSAGLMSETEGFIFACQDGVINTLEYRSKVLQAQLPDTSCRTCKQHPETLMHLLSACLVLARGAYIQRHNAALRVLYYHLRYSYGIDETPVLPYLPGDIPQVVENDSSKIDWNIPFATTRRIDHNKPDIVLFDKATRDIYVIEFSAPAEYNISAKEEHKHQIYQDLLFEIGKLYPGYRVKLVVLVVGVLGGMEQSFVSSLAKIPACSSAAVSLAVRMQKAVILGSLRLLRQMNLACCTH

SEQ ID NO: 9032 - protein, 640 aa, Cotesia glomerata
MAWIDYRKAFDSTSHELILYLLKCLGVNPEIVECIRRTMQLWRTRFHIGSGNALHITGVVEYKRGVFQGDSLSPLLFCISLLPISFALRKTRGYSVGPPGDRKYSITHLLYMDDLKLYSADEDHLQAALNIVAEYTRDVGMSFGLDKCAVVHLARGKCSVTGDDIELVDGSVLRQLDAGELYRYLGMEEHRMHAVSEVQATLRSEYVRRLRKIWSSELSGKNKVSASNMLAVPVLLYSFGVLKWARKDLRDLDIKTRKTINMNRSMHPNSSVARLYLSRSIGGRGLQSLERLHDRLVLGLTHEVVNFTADEDDFLMQIVHKHENAHKGSFLYKAAIYAARTLGLGEINALMELRKEEFKSVIRNAEEKLLLGELMDKSMHSVFFKHVRDHGLSTQLTFSFLKSAGLMSETEGFIFACQDGVINTLEYRSKVLQVQLLDTSCRMCKQHPETLMHLLSACPVLARGAYIQRHNAALRVLYYYLRHYYGIDMTPVLPYLPGDIPQVVENDSCKIYWNMPFATTRRIDHNKPDIVLFDKATRDIYVIEFSAPAEYNISAKEEHKRQIYQDLLFEIGKLYPGYRVKLVVLIVGVLGGMKQSFVSSLARVPACSSKAEFLAVRMQKAVILGSLRLLRKMTLACCDH

SEQ ID NO: 9033 - protein, 1099 aa, Cotesia glomerata
MNDDDPGALRTFFKWTEEVRVDLLVCYQRSEPGVSGYMARMHTLWSDMHPELEHFTPKHLRNYAAYLRRNRRSLVPDRRESNRLSFPAQLHQERRRSSMDDNNPFIGRQVSISKKITYSQQQLEAVNEDLRANILEDSTLLTVSQVVYGAAVSTFPRERHCLSIEASLRQRISQLGLKIDRSRKQVSRIQCVIEFETTQRAYTPRIRRIAAELRWRHHTLNKSTLLVIKEESLNKLRALVTAKKSLEKRLKRLVDNSLFRSSPSRFLTPKTDVTGNYPTPERVEASWTELYGDQPNVNANTPALHDFKAFCREHRRQNADEESPAVSMNEVRSALNGSKNWAAPGPDGINVFWWKKFTSTHLHLARIFTSYIRADEPIPDWLVEGRTVLIPKKGDLSDPKNYRPITCLNAVYKIFTKILNNRILHEIESVWQQIYEQRGSKKGLSGCKENLIVDRCVTQDAIYYQRNLSMAWIDYRKAFDSTSHELILYLLKCLGVNPEIVECIRRTMQLWRTRFHIGSGNALHITGVVEYKRGVFQGDSLSPLLFCISLLPISVALRKTRGYSVGPPGDRKYSITHLLYMDDLKLYSADEDHLQAALNIVAEYTRDAGMSFGLDKCVVVHLARGKCSVTGDDVELVDGSVLRQLDAGELYRYLGMEEHRMHAVSEVQATLRSEYVRRLRKIWSSELFGKNKVSATNTLAVPVLLYSFGVLKWARKNLRDLDIRTRKTINMNRSMQPNSSVARLYLSRSIGGRGLQSLERLHDRLVLGLTHEVVNFTADEDDFLMQIVHKHENAHKGSFLYKAAIYAARTLGLGEINALMELRKEEFKSAIRNAEEKLLLGKLMDKSMHSVFFKHVRDHGLSTQLTFSFLKSAGLMSETEGFIFACQDGVINTLEYRSRVLQVQLPDTTCRACKQHPETLMHILSACPVLARGAYIQRYNAALRVLYYYFRHRYGIDVTPVLPYLPGDIPQVVENDSCKIYWNMPFATTRRIDHNKPDIVLFDKATRDIYVIEFSAPAEYNISAKGEHKRQIYQDLLFEIGKLYPGYRVKLVVPIVGVLGGMKQSFVSSLARVPACSSKAEFLAVRMQKAVILGSLRLL

SEQ ID NO: 9034 - protein, 1109 aa, Cotesia glomerata
MNDDDPGALRTFFKWTEELRVDLLVCYQRSEPGVSGYMARMHTLWSDMHPELEHFTPKHLRNYAAYLRRNRRSLVPDRRQSNRLSFPAQLHQERRRSSLDDNNPFIGRQVSISKKMTYSQQQLEAVNKDLRANILEDSTLLTVSQVVYGAAVSAFPRERHCLSIEARLRQRISQLGLKIDRSRKQVSRIQCVIEFETTQRAYTPRIRRIAAELRWRHHTLNKSTLLVIKEESLNKLRALVTAKKSLEKRLKRLVDNSLFRSSPSRFLTPKTDVTGNYPTPERVEALWTELYGDQPNVNANTPALHDFKAFCREHRRQNADEESPAVSVNEVRSALNGSKNWAAPGPDGINVFWWKKFTSTHLHLARIFTSYIRADEPIPDWLVEGRTVLIPKKGDLSDPKNYRPITCLNAVYKIFTKILNNRILHEIEPVWQQIYEQRGSKRGLSGFKENLIVDRCVTQDAIYYQRNLSMAWIDYRKAFDSTSHELILYLLKCLGVNPEIVECIRRTMQLWRTRFHIGSGNALHITGVVEYKRGVFQGDSLSPLLFCISLLPISVALRKTRGYSVGPPGDRKYSITHLLYMDDLKLYSADKDHLQAALNIVAEYTRDVGMSFGLDKCAVVHLARGKCSDTSDDVELVDGSILRQLDAGELYRYLGMEEHRMHAVSEVQATLRSEYVRRLRKIWSSELSGKNKVSATNTLAVPVLLYSFGVLKWARKDLRDLDIKTRKTINMNRSMHPNSSVARLYLSRSIGGRGLQSLERLHDRLVLGLTHEVVNFTADEDDFLMQIVHKHENAHKGSFLYKAAIYAARTLGLGEINALMELRKEEFKSVIRNAEEKLLLGELMDKSMHSVFFKPVRDHGLSTQLTFSFLKSAGLMSETEGFIFACQDGVINTLEYRSKVLQVQLLDTSCRMCKQHPETLMHLLSACPVLARGAYIQRHNAALRVLYYYLRHYYGIDMTLALPYLPGDIPQVVENDSCKIYWNMPFATTRRIDHNKPDIVLFDKATRDIYVIEFSAPAEYNISAKEEHKRQIYQDLLFEIGKLYPGYRVKLVVLIVGVLGGMKQSFVSSLARVPACSSKAEFLAVRMQKAVILGSLRLLRKMTLACCDH

SEQ ID NO: 9035 - protein, 640 aa, Cotesia typhae
MAWIDYRKAFDSTPHELILYLLKCLGVNPEIVECIRRTMQLWRTRFHIGSGNALHVTGVVEYKRGVFQGDSLSPLLFCISLLPISVALRKTHGYSVGPPGDRNYSITHLLYMDDLKLYSADKDHLQAALNIVAEYTRDVGMSFGLDKCAVVHLARGKCSDTGNDVELVDGSVLSQLDAGELYRYLGMEEHRMHAVSEVRTTLQSEYVRRLRKIWSSELSGKNKVSATNMLAVPVLLYSFGVLKWTRKDLRDLDIKTRKIINMNRSMHPNSSVARLYLSRSIGGRGLQSLERLHDRLVLGLTHEVVNFTADEDDFLMQIVHKHENAHKESFLYKAAIYAARTLGLGEINALMQLRKEEFKSVIRNAEEKLLLGELMDKSMHSVFFKHVRDHGLSIQLTFSFLKSAGLMSETEGFIFACQDGVINTLEYRSKVLQVQLPDTSCRRCRQHPETLMHLLSACPVLARGAYIQRHNAALRVLYYYLRHCYGIDVTPVLPYLPGDIPQVVENDRCKIYWNMPFATTRRIDHNKPDIVLFDKATRDIYVIEFSAPAEYNISAKEEHKRQIYQDLLFEIGKLYPGYRVKLVVLIVGVLGGMKQSFVSSLAKVPACSSKAEFLTVRMQKAVLLGSLRLLREMTLACCDH

SEQ ID NO: 9036 - protein, 1109 aa, Cotesia glomerata
MNDDDPGTLRTYFKWTEELRVDLLVCYQRSEPGVSGYMARMHTLWSDMHPELEHFTPKHLRNYAAYLRRNRRSLVPDRRQSNRLSFPAQLHQERRRSSLDDNNPFIGRQVSISKKITYFQQQLEAVNEDLRANILEDSTLLTVSQVVYGAAVSAFPRERHCLSIEARLRQRISQLGLKIERSRKQVSRIQCVIEFETTQRAYTPRIRRIAAELRWRHHTLNKSTLLVIKEESLNKLRALVTAKKSLEKRLKRMVDNSLFRSSPSRFLTPKTDVTGNYPTPERVEAFWTELYGDQPNVNANTPALDDFKAFCREHRRQNADEESPAVSVNEVRSALNGSKNWAAPGPDGINVFWWKKFTSTHLHLARIFTSYIRADEPIPDWLVEGRTVLIPKKGDLSDPKNYRPITCLNAVYKIFTKILNNRILQEIEPVWQQIYEQRGSKRGLSGCKENLIVDRCVTQDAIYYQRNLSMAWIDYRKAFDSTSHELILYLLKCLGVNPEIVECIRRTMQLWRTRFHIGSGNALHITGVVEYKRGVFQGDSLSPLLFCISLLPISVALRKTRGYSVGPPGDRKYSITHLLYMDDLKLYSADEDHLQVALNIVAEYTRDVGMSFGLDKCAVVHLARGKCSVTGDGVELVDGSVLRQLDAGELYRYLGMEEHRMHAVSEVQATLRSEYVRRLRKIWSSELSGKNKVSATNTLAVPVLLYSFGVLKWARKDLRDLDIRTRKTINMNRSMHPNSSVARLYLSRSIGGRGLQSLERLHDRLVLGLTHEVVNFTADEDDFLMQIVHKHENAHKGSFLYKAAIYAARTLGLGEINALMKLRKEEFKSVIRNAEEKLLLGKLMDKSMHSVFFKHVRDHGLSTQLTFSFLKSAGLMSETEGFIFACQDGVINTLEYRSKVLQVQLPDTTCRACKLHPETLMHILSACPVLARDAYIQRHNAALRVLYYYLRHRYGIDVTPVLPYLPGDIPQVVENDSCKIYWNMPFATTRRIDHNKPDIVLFNKATRDIYVIEFSAPAEHNISAKEEHKRKIYQDLLFEIGKLYPGYRVKLVVLIVGVLGGMKQSFVSSLAKVPACTSKSEFLAVRMQKAVILGSLRLLREMTLAYCDR

SEQ ID NO: 9037 - protein, 640 aa, Cotesia typhae
MAWIDYRKAFDSTPHELILYLLKCLGVNPEIVECIRRTMQLWRTRFHIGSGNALHVTGVVEYKRGVFQGDSLSPLLFCISLLPISVALRKTRGYSVGPPGDQKYSITHLLYMDDLKLYSADEDHLQAALNIVAEYTRDVGMSFGLDKCAVVHLARGKCSDTGDDVELVDGSVLRQLDAGELYRYLGMEEHRMHAVSEVRTTLQSEYVRRLRKIWSSELSGKNKVSATNMLAVPVLLYSFGVLKWTRNDLRDLDIKTRKIINMNRSMHPNSSVARLYLSRSIGGRGLQSLERLHDRLVLGLTHEVVNFTADENDFLMQIVHKHENAHKGSFLYKAAIYAARTLGLGEINALMELRKEEFKSVIRNAEEKLLLGELMDKSMHSVFFKLVRDHGLSIQLTFSFLKSAGLMSETEGFIFACQDGVINTLEYRSKVLQVQLPDTSCRRCRQHPETLMHLLSACPVLARGAYIQRHNAALRVLYYYLRHCYGIDVTPVLPYLPGDIPQVVENDSCKIYWNMPFATTRRIDHNKPDIVLFDKATRDIYVIEFSAPAEYNISAKEEHKRQIYQDLLFEIGKLYPGYRVKLVVLIVGVLGGMKQSFVSSLAKVPACSSKAEFLAVRMQKAVLLGSLRLLREMTLACCDH

SEQ ID NO: 9038 - protein, 1019 aa, Cotesia chilonis
MARMHTLWSDMHPELAHFTPKHLRNYAAHLRRNRRSLVPDRRQSNRLSFPAQLHQERRRSSLDNNNPFVGRQVSISKKITYSQQQLDAVNEDLRANILEDSTLLTVSQVVYGAAVSAFPRERHCLSIEARLRQRILQLGSKIDRSRKHVSRIQCVIEFETTQKAYTPRIRRIAAELRWRHHTLNKSTLLVIKEESLNKLRALVTAKKSLEKRLKRLVDNSLFRSSPSRFLTPKTDVTGTYPTPERVEAFWTELYGDQPNVNANTPALHDFKAFCREHRRQNADEESPAVSVDEVRSALNGSKNWAAPGPDGINVFWWKKFTSTHLHLARIFTSYIRADDPIPDWLVEGRTVLIPKKGDLSDPKNFRPITCLNAVYKIFTKILNNRILQQIEPVWQQIYEQRGSKRGLSGCKENLIVDRCVLQDAIYYQRNLSMAWIDYRKAFDSTPHELILYLLKCLGVNPEIVECIRRTMQLWRTRFHIGSGNALHVTGVVEYKRGVFQGDSLSPLLFCVSLLPISVALRKTRGYSVGPPGDRKYSITHLLYMDDLKLYSADKDHLQAALNIVAEYTRDVGMSFGLDKCAVVHLARGKCSDTGDDVELVDGSVLRQLDAGELYRYLGMEEHRMHAVSEVRATLQSEYVRRLRKIWSSELSGKNKVSATNMLAVPVLLYSFGVLKWARKDLRDLDIKTRKIINMNRSMHPNSSVARLYLSRSIGGRGLQSLERLHDRLVLGLTHEVVNFTADEDDFLMQIVHKHENAHKGSFLYKAAIYAARTLGLGEINALMELRKEEFKSVIRNAEEKLLLGELMDKSMHSVFFKHVRDHGLSTQLTFSFLKSAGLMSETEGFIFACQDGVINTLEYRSKVLQVQLPDTSCRRCRQHPETLMHLLSACPVLARGAYIQRHNAALRVLYYYLRHCYGIDVTPVLPYLPGDIPQVVENDSCKIYWNMPFATTRRIDHNKPDIVLFDKATRDIYVIEFSAPAEYNISAKEEHKRQIYQDLLFEIGKLHPEKLANHVRKRN

SEQ ID NO: 9039 - protein, 1108 aa, Cotesia glomerata
MNDDDPGALRTFFKWTEELRVDLLVCYQRSEPGVSGYMARMHTLWSDMHPELEHFTPKHLRNYAAYLRRNRRSLVPDRRQSNRLSFPAQLHQERRRSSLDDNNPFIGRQVSISKKITYSQQQLEVVNEDLRANILEDSTLLTVSQVVYGAAVSAFPRERHCLSIEARLRQRISQLGLKIDRSRKQVSRIQCVIEFETTQRAYTPRIRRIAAELRWRHHTLNKSTLLVIKEESLNKLRALVTGKKSLEKRLKRLVDNSLFRSSPSRFLTPKTDVTANYPTPERVEAFWTELYGDQPNVNANTPALHDFKAFCREHRRQNADEESPAVSVNEVRSALNGSKNWAAPGPDSINVFWWKKFTSTHLHLARIFTSYIRADEPIPDWLVEGRTVLPKKGDLSDPKNYRPITRLNAVYKILAKILNNRILHEIEPVWQQIYEQRGSKRGLSGCKENLIVDRCVTQDAIYYQRNLSMAWIDYRKAFDSTSHELILYLLKYLGVNPEIVECIRRTMQLWRTRFHIGSGNALHITGVVEYKRGVFQGDSLSPLLFCISLLPISVALRKTHGYSVGPPGDRKYSITHLLYMDDLKLYSADEDHLQAALNIVAEYTRDVGMSFGLDKCAVVHLARGKCSVTGDDVELVDGSVLRQLDAGELYRYLGMEEHRMHAVSEVQATLRSEYVRRLRKIWSSELSGKNKVSATNTLAVPVLLHSFGVLKWARKDLRDLDIRTRKTINMNRSMHPNSSVARLYLSRSIGGRGLQSLERLHDRLVLGLTHEVVNFTADEDDFLMQIVHKHENAHKGSFLYKAAIYAARTLGLGEINALMELRKEEFKIVIRNAEEKLLLGKLTDKSMHSVFFKHVRDHGLSTQLTFSFLKSAGLMSETEGFIFACQDGVINTLEYRSKVLQVQLLDTSCRMCKQHPETLMHLLSACPVLARGTYIQRHNAALRVLYYYLRHYYGIDMTPVLPYLPGDIPQVVENDSCKIYWNMRFATTRRIDHNKPDIVLFDKATRDIYVIEFSAPAEYNISAKEEHKRQIYQDLLFEIGKLYPGYRVKLVVLIVGVLGGMKQSFVSSLARVPACSSKAEFLAVRMQKAVILGSLRLLRKMTLACCDH

SEQ ID NO: 9040 - protein, 1062 aa, Cotesia glomerata
MHPELAHFTPKHLRNYAAHLRRNRRSLVPDRRQSNRLYFPAQLHQERRRSSLDDINPFIGRQVSISKKITYSQQQLEAVNEDLRANILEDSTLLTVSQVVYGAAVSAFPRERHCLSIEARLRQRISQLGLKIDRSRKQVSRIQCVIEFETTQRAYTPRVRRIAAELRWRHHTLNKSTLLVIKEESLNKLRALVTAKKSLEKRLKRLVDNSLFRSSPSRFLTPKTVVTGNYPAPERVEAFWTELYRDQPNVNANTPALHDFKAFCRKHRRQNADEESPAVSVNEVRLALDGSRNWAAPGPDGINVFWWKKFTSTHLHLARIFTSYIRADEPIPDWLVEGRTVLIPKKGDLSDPKNYRPITCLNAVYKIFKKILNNRILQEIGPIWQQIYEQRGNKRGLSGCKENLIVDRCVIQDAIYYQRNLSMAWIDYRKAFDSTPHELILYLLKCLGVNPETVECIRRTMQLWRTRFHIGNGNALHVTGVVEYKRGVFQGDSLSPLLFCISLLPISVALRKTHGYSVGPPGDRKYSITHLLYMDDLKLYSANEDHLQAALNIVAEYTRDVGMSFRLDKCAVIHLARGKCSDTGDDVELVDGSILRQLGAGELFRYLGMEEHRMHAVSEVRATLRSEYVRRLRNICSSELSGKNKVSATNMLAVPVLLYSFGVLKWARKDLRDLDIKTRKVINMDRSMHPNSSVARLYLSRSISGRGLQSLERLHDRLVLGLTFEVVNFIADEDDFLMQIVHKHENAHKGSFLYKAAIYAARTLGLGEINALMELRKEEFKSVIRNAEEKQLLGELMDKSMHSVYFKHVRDHGLSTQLTFSFLKSAGLMSETEGFIFACQDGVINTLEYRSKVLQVQLLDTSCRMCKQHPETLIHLLSACPVLARGAYIQRHNAALRVLYYYLRHYYGIDMTPVLPYLPGDIPQVVENDSCKIYWNMPFATTRRIDHNKPDIVLFDKATRDIYVIEFSAPAEHNISAKEEHKRKIYQDLLFEIGKLYPGYRVKLVVLIVGVLGGMKQSFVSSLAKVPACTSKSEFLAVRMQKAVILGSLRLLREMTLACCGR

SEQ ID NO: 9041 - protein, 782 aa, Cotesia typhae
MDEVCSALNGSINWAAPGPDGINVFWWKKFTSTHLHLARIFTSYIRADDPIPDWLVEGRIVLILKQGDLSDPKNFRPITCLNAVYKIFTKILNNRILQQIEPVWQQIYEQRGSKRGLSGCKENLIVDRCVLQDAIYYQRNLSMAWIDYRKVFDSTPHELILYLLKYLGVNPEIVECIRRTMQLWRTRFHIGSGNALHVTGVVKYKRGVFQGDSLSPLLFCISLLPISVALRKTHGYSVGSPGDRNYSITHLLYMDDLKLYSADKDHLQAALNIVAEYTRDVGMSFGLDKCAVVHLARGKCSDTGDDVELVDGSVLRQLDAGELYRYLGMEEHRMHAVSEVRATLQSEYVRRLRKIRSSELSGKNKVSATNMLAVPVLLYSFGVLKWARKNLRDLDIKTRKIINMNRSMHPNSSVARLYLSRSIGGRGLQSLERLHDRLVQGLTHEVVNFTADEDDFLMQIVHKHENAHKGSFLYKAAIYAARTLGLGEINALMELRKEKFKSVIRNAEEKLLLGELMDKSMHSVFFKHVRDHGLSTQLTFSFLKSAGLMSETEGFIFACQDGVINTLEYRSKVLQVQLPDTSCRRCRQHPETLMHLLSACSVLARGACIQRHNAALRVLYYYLRHCYGIDVTPLLPFLPGDIPQVVENDSCKIYWNMPFATTRRIDHNKPDIVLFDEATREIYVIEFSAPAEYNISAKEEHKRQIYQDLLFEIGKLYPGYRVKLVVLIVGVLGGMKQSFVSSLAKVPACSSKAEFLAVRMQKAVLLGSLRLLREMTLACCDH

SEQ ID NO: 9042 - protein, 1056 aa, Cotesia glomerata
MARMHTLWSDMHPELEHFTPKHLRNYAAYLRRNRRSLVPDRRQSNRLSFPAQLHQERRRSSLDDNNPFIGRQVSISKKITYSQQQLEAVNEDLRANILEDFTLLTVSQVVYGAAVSAFPRERHCLSIEARLRQRISQLGLKIDRSRKQVSRIQCVIEFETTQRAYTPRIRRIAAELRWRHHTLNKSTLLVIKERSLNKLRALVTAKKSLEKRLKRLVDNSLFRSSPSRFLTSKTDVTGNYPTPERVEAFWTELYGDQPNVNANNPALHDFKAFCREHRRQNADEESPAVSVNEVRSALNGSKNWAAPGPDGINVFWWKKFTSTHLHLARIFTSYIRADEPIPDWLVEGRTVLIPKAGDLSDAKKYRPITCLNALYKIFTKILNNLILHEIEPVWQQIYEQRGSKRGLSGCKENLIVDRCVTQDAIYYQRNLSMAWIDYRKAFDSTSHELILYLLKCLGVNPEIVECIRRTMQLWRTRFHIGSGNALHITGVVEYKRGVFQGDSLSPLLFCISLLPISVALRKTRGYSVGPPGDRKYSITHLLYMDDLKLYSADEDHLQAALNIVAEYTRDVGMSFGLDKCAVVHLARGKCSVTGDDVELVDGSVLRQLDAGELYRYLGMEEHRMHAVSEVQATLRSEYVRRLRKIWSSELSGKNKVSATNTLAVPVLLYSFGVLKWARKDLRDLDIRTRKTINMNRSMHPNSSVARLYLSRSIGGRGLQSLERLHDRLVLGLTHEVVNFTADEDDFLMQIVHKHENAHKGSFLYKAAIYPARTLGLGEINALMELRKEEFKSVIRNAEEKLLLGELMDKSMHSVFFKHVRDHGLSTQLTFSFLKSAGLMSETEGFIFACQDGVINTLEYRSKVLQVQLLDTSCRMCKQHPETLMHLLSACPVLARGAYIQRHNAALRVLYYYLRHYYGIDMTPVLPYLPGDIPQVVENDSCKIYWNMPFATTRRIDHNKPDIVLFDKATRDIYVIEFSAPAEYNISAKEEHKRQIYQDLLFEIGKLYPGYRVKLVVLIVGVLGGMKQSFVSSLARVAQLAHQKLNSWRSGCRRLSY

SEQ ID NO: 9043 - protein, 1109 aa, Cotesia typhae
MKDDDPGALRTYFKWTEELRVDLLVCYQRSEPGVSGYMARMHTLWSDMHPELAHFTPKHLRNYAAHLRRNRRLLVPDRRQSNRLSFPAQLHQERRRSSLDNNNPFVGRQVSISKKITYSQQQLDAVNDDLRATILEDSTLLTVSQVVYGAAVSAFPRERHCLSIEARVRQRILQLGSKIDRSRKHVSRIQCVIEFETTQKTYTPRIRRIVAELRWRHHTLNKSTLFVIKEESLNKLRALVTAKKSLEKRLKRLVDNSLFRSSPSRLLTAKTDVTGTYPTPERVEAFWTELYGDQPNMNANTPALHDFKVFCREHRRQNADEESPAVSVDEVRSALNGNKNWAAPRPDGINVFWWKKFISTHLHLARIFTSYIRADDPIPDWLVEGRTVLIPKKGDLSDPTNFRPITCLNAVYKIFTKILNNRILQQIEPAWQQIYEQRGSKRGLSGCKENLIVDRCVLQDAIYYQRNLSMAWIDYRKAFDSTPHELILYLLKCLGVNPKIVECIRHTMQLWRTRFHIGSGNALHVTGVVEYNRGVFQGNFLSPLLFCISLLPISVALRKTRGYSVGPPGDRKYLSTHLLYMDDLKLYGTDEDHLQAALNIVAEYTRDVGMSFGLDKCAVIHLARGKCSDTGDDVELVDGSVLRQLDAGELYRYLGMEEHRMHAVSEVRRTLQSEYVRRLRKIWSSELSGKNKVSATNMLAVPVLLYSFGVLKWARKDLRDLDIKTRKIINMNRSMHPNSSVARLYLSRSIGGRGLQSLERLHDRLVLGLTHEVVNFTADEDDFLMQIVHKHENAHKGSFLYKAAIYAARTLGLREINALMELRKEEFKSVIRNAEEKLLLGELMDKSMHSVFFKHVRDHGLSIQLTFSFLKSADLMSETEGFIFACQDGVINTLEYRSKVLQAQLPYTSCRTCKQHPETLMHLLSACPVLARDAYIQRHNAALRVLYYHLRYSYGIDETPVLPYLPGDIPQVVENDSSKIYWNIPFATTRRIDHNKPDIVLFDKATRDIYVIEFSAPAEYNISAKEEHKHQIYQYLLFEIGKLYPGYRVKLVVLVVGVLGGMKQSFVSSLAKIPACSSAAVSLSVRMQKAVILGSLRLLRQMNLACCTH

SEQ ID NO: 9044 - protein, 640 aa, Cotesia glomerata
MAWIDYRKAFDSTPHELILYLLKCLGVNPETVECIRRTMQLWRTRFHIGNGNALHVTGVVEYKRGVFQGDSLSPLLFCISLLPISVALRKTHGYSVGPPGDRKYSITHLLYMDDLKLYSANEDHLQAALNIVAEYTRDVGMSFGLDKCAVIHLARGKCSDTGDDVELVDGSILRQLGAGELYKYLGMEEHRMHAVSEVRETLRSEYVRRLRKIWSSELSGKNKVSATNMLAVPVLLYSFGVLKWARKDLRDLDIKTRKVINMNRSMHPNSSVARLYLSRSIGGRGLQSLERLHDRLVLGLTFEVVNFTADEDDFLMQIVHKHENAHKGSFLYKAAIYAARTLGLGEINALMELRKEEFKSVIRNAEEKQLLGELMDKSMHSVYFKHVRDHGLSTQLTFSFLKSAGLMSETEGFIFACQDGVINTLEYRSKVLQVQLLDTSCRMCKQHPETLMHLLSACPVLARGTYIQRHNAALRVLYYYLRHYYGIDMTPVLPYLPGDIPQVVENDSCKIYWNMPFATTRRIDHNKPDIVLFDKATRDIYVIEFSAPAEHNISAKEEHKRKIYQDLLFEIGKLYPGYRVKLVILIVGVLGGMKQSFVSSLAKVPACTSKSEFLAVRMQKAVILGSLRLLREMTLACCGR

SEQ ID NO: 9045 - protein, 640 aa, Cotesia typhae
MAWIDYRKVFDSTPHELVLYLLKCLGVNPETVECIRRTMQLWRTRFHIESGNALHVTGVVEYKRGVFQGDFLSPLMFCISLLPISVALRKTHGYSVGPPGDRNYSITHLLYMDDLKLYSADKDHLQAALNIVAEYTRDVGMSFGLDKCAVVHLARGKCSDTGDDVELVDGSVLRQLDAGELYRYLGMEEHRMHAVSEVRATLQSEYVRRLRKIWSSELSGKNKVSATNMLAVPVLLYSFGVLKWARKDLRDLDIKNRKIINMNRSMHPNSSVARLYFPRSIGGRGLRSLERLHDRLVLGLTNEVVNFTADEDDFLMQIVHKHENEHKGSFLYKAAIYAARTLGLGEINALMELRKEEFKSVIRNAEEKLLLGELLDKSMHSVFFKHVRDHGLSTQLTFSFLKPAGLMSETEGFIFACQDGVINTLEYRSKVLQVQLPDTSCRRCRQHSETLMHLLSACPVLARGAYIQRHNAALRVLYYYLRHCYGIDVTPVLPYLPGDIPQVVENHSCKIYWNMPFATTRRIDHNKPDIVLFDKATRDIYVIEFSAPAEYNISAKEEHKRQIYQDLLFEIGKLYPGYRVKLVFLIVGVLGGMKQSFVSSLAKVPACSSKAEFLAVRMQKAVILGSLRLLREMTLACCDH

SEQ ID NO: 9046 - protein, 938 aa, Cotesia typhae
MSHSKQQLDTVNEDLPTQLQEDSTLLTVNQVVYGAAASLLPIERRHSLSFEGKLKLRIAQLGHKIDISRKQVSRIQCVIEYVSTQRPYTPKVRRLAAELRRRHHTLNKSTLLVIKEDSLNRLRALVASKKSLEKRLKRLIDNSLFRSNPSRFLSPKTAVPENYPSSERVEAFWSELYGDQPNVNPDTPALHDFEAFCREHRRQVAEESPAVSVEEVRKVLNGSKNWAAPGPDGINIFWWKKFSSAHAHLARIFTSYIQGDELIPDWLVEGRTVLIPKKGDLSDPKNYRPITCLNAVYKIFTKILNNRILREIEPVWQQIYEQRGSKHGVSGCKINLLVDRFVIQDAIYYQRNLSMAWIDYRKAFDSTLHELILYLLKCLGINRQTVGCIQRTMQLWRTRFHIGSGNALHVTGTVQYKRGVFQGDSLSPLLFCISLLPISVALRQTRGYSAGPPSDRVYTITHQLFMDDLKIYSANKDHLQTALNIVAEYTRDVGMSFGLDKCALVHLAKGKCSETGGDVELVDGSVLRELDAGELYRYLGIEERQMHAVSEVRTTLRSEYVRRLRKIWSSELSGKNKVSATNMLAVQVLLYSFGTLKWPRNELKGLDIKTRKVINMNQSMHPNSSVARMYLSRNIGGRGLQSLERLHDRLVLGLTYEVANFTADEDDFLMQFVHSHENARKGSFLYKAAIYAANTLGLGEINALIKLPKKEFKSVVRIAEEKKLLGEHMDKSIHSVYFKHVRDHGLSTQLTFSFSKSAGLMSETEGFIFACQDGVINTLEYRSKVLQAQLPDTSCRTCKQHPETLMHLLSACPVLARGAYIQRHNAALRVLYYHLRYSYGIDETPVLPYLPGDIPQVVENDSSKIYWNIPFATTRRIDHNKPDIVLFDKATRDIYAIEFSAPAEYNISAKEEHKHQIYQDLLFEIGKLYPSYRVKLVV

SEQ ID NO: 9047 - protein, 1109 aa, Cotesia glomerata
MNDDDPGALRTFFKWTEELRVDLLVCYLRSEPGVSGYMARMHTLWSDMHPEREHFTPKHLRNYAAYLRRNRRSLVPDRRQSNRLSFPAQLHQERRRSSLDDNNPFIGRQVSISKKITYSQQQLEAVNEDLRATILEDSTLLTVSQVVYGAAVSAFPRERHCLSIEARLRQRISQLGLKIDRSRKQVSRIQCVIEFETTQRAYTPRIRRIAAELRWRHHTLNKSTLLVIKEESLNKLRALVTAKKSLEKRLKRLVDNSLFRSSPSRFLTPKTDVTGNYPTPERVEAFWTELYGDQPNVNANTPALHDFKAFCREHRRQNADEESPVVSVNEVRSALNGSKNWAAPGPDGINVFWWKKFTSTHLHLARIFTSYIRADEPIPDWLVEGRTVLIPKKGDLSDPKNYRPITCLNAVYKIFTKILNNRILQEIEPVWQQIYEQRGSKRGLSGCKENLIVDRCVTQDAIYYQRNLSMAWIDYRKAFDSTSHELILYLLKCLGVNPEIVECIRRTMQLWRTRFHIGSGNALHITGVVEYKRGVFQGDSLSPLLFCISLLPISVALRKTRGYSVGPPGDRKYSITHLLYMDDLKLYSADEDHLQAALNIVAEYTRDVGMSFGLDKCAVVHLARGKCSVTGDDVELVDGSVLRQLDAGELYRYLGMEEHRMHAVSEVQATLRSEYVRRLRKIWSSELSGKNKVSATNTLAVPVLLYSFGILKWARKDLRDLDIRTRKTINMNRSMHPNSSVARLYLSRSIGGRGLQSLERLHDRLVLGLTHEVVNFTADEDDFLMQIVHKHENAHEGSFLYKAAIYAARTLGLGEINALMELRKEEFKSAIRNAEEKLLLGKLMDKSMHSVFFKHVRDHGLSTQLTFSFLKSAGLMSETEGFIFACQDGVINTLEYRSKVLQVQLSDTTCRACKQHPETLMHILSACPVLARGAYIQRHNAALRVLYYYLRHRYGIDVTPVLPYLPGDIPQVVENDSCKIYWNMPFAATRWIDHNKPDIVLFDKATRDIYVIEFSAPAEYNISAKEEHKRQIYQDLLFEIGKLYPGYRVKLVVLIVGVLGGMKQSFVSSLARVPACSSKAEFLAVRMQKAVILGSLRLLRKMTLACCDH

SEQ ID NO: 9048 - protein, 958 aa, Cotesia glomerata
MVQQFRLFPRERHRLSIEARLRQRIAQLGDKIDRSRKHVSRIQCVIEFETTQRAYTPRVRRIAAELRWRHHTLNKSTLLVIKEESLNKLRALVTAKKSLEKRLKRLVDNSLFRSSPSRFLTPKTVVTGNYPAPERVEAFWTELYGDQPNVNANTPALHDFKAFCRKHRRQNADEESPAVSVNEVRLALDGSRNWAAPGPDGINVFWWKKFTSTHLHLARIFTSYIRADEPIPDWLVEGRTVLIPKKGDLSDPKNYRPITCLNAVYKIFTKILNNRILQEIEPVWQQIYEQRGNRRGLSGCKENLIVDRCVIQDAIYYQRNLSMAWIDYRKAFDSTPHELILYLLKCLGVNPETVECIRRTMQLWRTRFHIGNGNALHVTGVVEYKRGVFQGDSLSPLLFCISLLPISVALRKTHGYSVGPPGDRKYSITHLLYMDDLKLYSANEDHLQAALNIVAEYTRDVGMSFGLDKCAVIHLARGKCSDTGDDVELVDGSILRQLGAGELYRYLGMEEHRMHAVSEVRATLRSEYVRRLRKIWSSELSGKNKVSATNMLAVPVLLYSFGVLKWARKDLRDLDIKTRKVINMNRSMHPNSSVARLYLSRSIGGRGLQSLERLHDRLVLGLTFEAVNFTADEDDFLMQIVHKHENAHKGSFLYKAAIYAARTLGLGEINALMELRKEEFKSVIRNAEEKQLLGELMDKSMHSVYFKHVRNHGLSTQLTFSFLKSAGLMSETEGFIFACQDGVINTLEYRSKVLQVQLLDTSCRMCKQHKTLMHLLSACPVLARGTYIQRHNAALRVLYYYLRHYYGIDMTPVLPYLPGDIPQVVENDSCKIYWNMPFATTRRIDHNKPDIVLFDKATRNIYVIEFSAPAEHNISAKEEHKRKIYQDLLFEIGKLYPGYRVKLVVLIVGVLGGMKQSFVSSLAKVPACTSKSEFLAVRMQKAVILGSLRLLREMTLAC

SEQ ID NO: 9049 - protein, 1109 aa, Cotesia glomerata
MNDDDPGALRTFFKWTEKLRVDLLVCYQRSEPGVSGYMARMHILWSDMHPELEHFTPKHLRNYAAYLRRNRRSLVPDRRQSNRLSFPAQLHQERRRSSLDDNNPFIGRQVSISKKITYSQQQLEAVNVDLRANILEDSTLLTVSQVVYGAAVSAFPRERHCLSIEARLRQRISQLGLKIDRSRKQVSRIQCVIEFETTLRAYTPRIRRIAAELRWRHHTLNKSTLLVIKEESLNKLRALVTAKKSLEKRLKRLVDNSLFRSSPSRFLTPKTDVTGNYPTPERVEAFWTELYGDQPNVNANTPALDDFKAFCRKHRRQNADEESPAVSVNEVRSALNGSKNWAAPGPDGINVFWWKKFTSTHLHLARIFTSYIRADEPIPDWLVEGRTVLIPKKGDLSDPKNYRPITCLNAVYKIFTKILNNRILQEIEPVWQQIYEQRGSKRGLSGCKENLIVDRCVTQDAIYYQRNLSMAWIDYRKAFDSTSHELILYLLKCLGVNPEIVECIRRTMQLWRTRIYIGSGNALHITGVVEYKRGVFQGDSLSPLLFCISLLPISVALRKTRGYSVGPPGDRKYSITHLLYMDDLKLYSADEDHLQAALNIVAEYTRDVGMSFGLDKCAVVHLARGKCSVTGDDVELVDGSVLRQLEAGELYRYLGMEEHRMHAVSEVQATLRSEYVRRLRKIWSSELSGKNKVSATNTLAVPVLLYSFGVLKWARKDLRDLDIRTRKTINMNRSMHPNSSVARLYLSRSIGGRGLQSLEWLHDRLVLGLTHEVVNFTADEDDFLMQIVHKHENAHKGSFLYKAAIYAARTLGLGEINALMELRKEEFKSAIRNAEEKLLLGKLMDKSMHSVFFKHVRDHGLSTQLTFSFLKSAGLMSETEGFIFACQDGVINTLEYRSKVLQVQLPDTTCRACKQHPETLMHILSACPVLARGAYIQRHNAALRVLYYYLRHRYGIDVTPVLPYLPGDIPQVVENDSCKIYWNMPFATTRRIDHNKPDIVLFDKATRDIYVIEFSAPAEYNISAKEEHKRQIYQDLLFEIGKLYPGYRVKLVVLIVGVLGGMKQSFVSSLARVPACSSKAEFLAVRMQKAVILGSLHLLRKMTLACCDH

SEQ ID NO: 9050 - protein, 1109 aa, Cotesia glomerata
MNDDNPGALRTYFKWTEELRVDLLVCYQRSEPGVSGYMARMHTLWSDMHPELEHFTPKHLRNYAAYLRRNRRSLVPDRRQSNRLSFPAQLHQERRRSFLDDNNPFIGRQVSISKKITYSQQQLEAVNEDLRANILENSTLLTVSQVVYDAAVSAFPRERHCLSIEARLRQRISQLGLKIDRSRKQVSRIQCVIEFETTQRAYTPRIRRIAAELRWRHHTLNKSTLLVIKEESLNKLRALVTAKKSLEKRLKRLVDNSLFRSSPSRFLTPKTDVTGNYPTPERVEAFWTELYGDQPNVNANTPALHDFKAFCREHRRQNADEESPAVSVNEVRSALNGSKNWAAPGPDGINVFWWKKFTSTHLHLARIFTSYIRADEPIPDWLVEGRTVLIPKKGDLSDPKNYRPITCLNAVYKIFTKILNNRILQEIEPVWQQIYEQRGSKRGLSGCKENLIVDRCVTQDAIYYQRNLSMAWIDYRKAFDSTSHELILYLLKCLGVNPEIVECIRRTMQLWRTRFHIGSGNALHITGVVEYKRGVFQGDSLSPLLFCISLLPISVALRKTRGYSVGPPGDRKYSITHLLYMDDLKLYSADKDHLQAALNIVAEYTRDVGMSFGLDKCAVVHLARGKCSDTSDDVELVDGSILRQLDAGELYRYLGMEEHRMHAVSEVQATLRSEYVRRLRKIWSSELSGKNKVSATNTLAVPVLLYSFGVLKWARKDLRDLDIKTRKTINMNRSMHPNSSVARLYLSRSIGGRGLQSLERLHDRLVLGLTHEVVNFTADEDDFLMQIVHKHENAHKGSFLYKAAIYAARTLGLGEINALMELRKEEFKSVIRNAEEKLLLGELMDKSMHSVFFKHVRDHGLSTQLTFSFLKSAGLMSETEGFIFACQDGVINTLEYRSKVLQVQLLDTSCRMCKQHPETLMHLLSACPVLARGAYIQRHNAALRVLYYYLRHYYGIDMTPVLPYLPGDISQVVENDSCKIYWNMPFATTRRIDHNKPDIVLFDKATRDIYVIEFSAPAEYNISAKEEHKKQIYQDLLFEIGKLYPGYRVKLVVLIVGVLGGMKQSFVSSLARVPACSPKAEFLAVRMQKAVILGSLRLLRKMTLACCDH

SEQ ID NO: 9051 - protein, 1109 aa, Cotesia typhae
MNYDDPGAIRTNFKWTEELRVDLLVCYQRSEPGVSGYMARMHTIWSDMHPELAHFTHKHLRNYAAHLRCNRRSLVPDRRQSNRLYFPAQLHQERRRSSLDNNNPFAGRRVSISKKITYSQQQLDAVNEDLRANILEDSTLLTVSQVVYGAAVSAFPRERHCLSIEARLKQRISQLGLKIDISRKQVSRIQCVIEFDTTQRTYTPRIRRIAAELRWHHHTLNKSTLLVIKEEYLNKLRSLVAAKKSLEKRLKRLVDNSLFRSSPSRFLTPKTDVTGNYPTPERVEAFWTELYGDQPNVNANTPALHDFKVFCREHRRQNADEESPAISVDEVRSALNGSKNWAAPGPDGINVFWWKKFTSTHLHLARIFTSYIRADDPIPDWLVEGRTVMIPKKGDLSYPKNFRPITCLNAVYKIFTKILNNRILQQIEPVWQQIYEQRGSKRGLSGCKENLIVDRCVLQDAIYYQRNLSMAWIDYRKAFDSTPYELILYLLKCLRVNPEIVECIRRTMQLWRTRFHIGSGNALHVTGVVEYKRGVFQGDSLSPLLFCISLLPISVALRKTRGYSVGPPGDRNYSITHLLYMDDLKLYSADKDHLQAALNIVAEYTRDVGMSFGLDKCAVVHLARGKCSDTGDDVELVDGSVLRQLDAGELYRYLGMVEHRMHAVSEVRTTLQSEYVRRLRKIWSSELSGKNKVSATNMLAVPVFLYSFGVLKWARKDLRDLDIKTRKIINMNRSMHPNSSVARLYLSRSIGGRGLQSLERLHDRLVLGLTHEVVNFTADEDDFLVQIVHKHENAHKGSFLYKAAIYAARTLGLGEINALMELRKEEFKSVIRNAEEKLLLGELMDKSMHSVFFKHVRDHGLSIQLTFSFLKSAGLMSETDGFIFACQDGVINTLEYRSKVLQVQLPDTSCRRCRQHPETLMHLLSACPVLARGAYIQRHNAALRVLYYYLRHCYGIDVTPVLPYLPGDIPQVVENDSCKIYWNMPFATTRRIDHNKPDIVLFDKATRDIYVIEFSAPAEYNISAKEEHKRQIYQDLLFEIGKLYPGYRVKLLVLIVGVLGGMKQSFVSSLAKVPACSSKAEFLAVRMQKAVLLGSLRLLREMTLACCDH

SEQ ID NO: 9052 - protein, 962 aa, Cotesia glomerata
MVQQFRLFPRERHCLSIEARLRQRISQLGLKIDRSRKQVSRIQCVIEFETTQRAYTPRIRRIAAELRWRHHTLNKSTLLVIKKESLNKLRALVTAKKSLEKRLKRLVDNSLFRSSPSRFLTSKTDVTGNYPTPERVEAFWTELYGDQPNVNANTPALHDFKAFCREHRRQNADEESPAVSVNEVRSALNGSKNWAAPGPDGINVFWWKKFTSTHLHLARIFTSYIRADEPIPDWLVEGRTVLIPKKGDLSDPKNYRPITCLNAAYKIFTKILNNRILHEIEPVWQQIYEQRGSKRGLSGCKENLIVDRCVTQDAIYYQRNLSMAWIDYRKAFDSTSHELILYLLKCLGVNPEIVECIRRTMQLWRTRFHIGSGNALHITGVVEYKRGVFQGDSLSPLLFCISLLPISVALRKTRGYSVGPPGDRKYSITHLLYMDDLKLYSADEDHLQAALNIVAEYTRDAGMSFGLDKCAVVHLARGKCSVTGDDVELVDGSVLRQLDAGELYRYLGMEEHRMHAVSEVQATLRSEYVRRLRKIWSSELSGKNKVSATNTLAVPVLLYSFGVLKWARKDLRDLDIKTRKTINMNRSMHPNSSVARLYLSRSIGGRGLQSLERLHDRLVLGLTHEVVNFTADEDDFLMQIVHKHENAHKGSFLYKAAIYAARTLGLGEINALMELRKEEFKSVIRNAEEKLLLGELMDKSSHSVFFKHVRDHGLSTQLTFSFLKSAGLMSETEGFIFACQDGVINTLEYRSKVLQVQLLDTSCRMCKQHPETLMHLLSACPVLARGAYIQRHNAALRVLYYYLRHRYGIDVTPVLPYLPGDIPQVVENDSCKIYWNMPFATTRRIDHNKPDIVLFDKATRDIYVIEFSAPAEYNISAKEEHKKQIYQDLLFEIGKLYPGYRVKLVVLIVGVLGGMKQSFVSSLARVPACSSKAEFLAVRMQKAVILGSLRLLRKMTLACCDH

SEQ ID NO: 9053 - protein, 1076 aa, Cotesia glomerata
MIGYIARMHTLWSDMHPELAHFTPKHLRNYAAHLRRNRRSLVPDRRQSNRLSFPAQLHQERRRSSLDNNNPFIGRQVSISKKITYSQQQLETVNEDLLTQIQEDSTLLAVNQVVYGAAVSAFPRERHRLSIEARLRQRIAQLGDKIDRSRKHVSRIQCVIEFETTQRAYTPRVRRIAAELRWRHHTLNKSTLLVIKEESLSKLRALVTAKKSLEKRLKRLVDNSLFRSSPSRFLTPKTVVTGNYPAPEQVEAFWTELYGDQPNVNANTPALHDFKAFCRKHRRQNADEESPAVSVNEVRLALDGSRNWAAPGPDGINVFWWKKFTSTHLHLARIFTSYIRADEPIPDWLVEGRTVLIPKKGDLSDPKNYRPITCLNAVYKIFTKILNNRILQEIGPIWQQIYEQRSNKRGLSGCKENLIVDRCVIQDAIFYQRNLSMAWIDYRKAFDSTPHELILYLLKCLGVNPETVECIRRTMQLWRTRFHIGNGNALHVTGVVEYKRGVFQGDSLSPLLFCISLLPISVALRKTHGYSVGPPGDRKYSITHLLYIDDLKLYSANEDHLQAALNIVAEYTRDVGMSFGLDKCAVIHLARGKCSDTGDDVELVDGSILRQLGAGELYRYLGMEEHRMHAVSEVRATLRSEYVRRLRKIWSSKLSGKNKVSATNMLAVPVLLYSFGVLKWARKDLRDLDIKTRKVINMNRSMHPNSSVARLYLSRSIGGRGLQSLERLHDRLVLGLTFEVVNFTADEDDFLMQIVHKHENAHKGSFLYKAAIYAARTLGLGEINALMELRKEEFKSVIRNAEEKQLLGELMDKSMHSVYFKHVRDHGLSTQLTFSFLKSAGLMSETEGFIFACQDGVINTLEYRSKVLQVQLLDTSCRMCKQHPETLIHLLTACPVLARGAYIQRHNAALRVLYYYLRHYYGIDMTPVLPYLPGDIPQVVENDSCKIYWNMPFATTRRIDHNKPDIVLFDKATRDIYVIEFSAPAEHNISAKEEHKRKIYQDLLFEIGKLYPGYRVKLVVLIVGVLGGMKQSFVSSLAKVPACTSKSEFLAVRMQKAVILGSLRLLRKMTLACCGR

SEQ ID NO: 9054 - protein, 584 aa, Cotesia typhae
MAWIDYRKAFDSTSHELILYLLKCLGVNPEIVECIRRTMQLWRTRFRIRSGNALHVTGVVEYKRGVFQGDSLSPLLFCISLLPISVALRKTRGYSVGPPGDRKYSITHLLYMDDLKLYSADEDHLQAALNIVAEYTRDVGMSFGLDKCAVVHLARGKCSDTGDDVELVDGSVLRQLDAGELYRYLGMEEHRMHAVSEVRRTLQSEYVRRLRKIWSSELSGKNKVSATNMLAVPVLLYSFGVLKWTRKDLRDLDIKTRKIINMNRSMHPNSSVARLYLSRSIGGRGLQSLERLHDRLVLGLTHEVVNFTADEDDFLMQIVHKHENAHKGSFLYKEAIYAARTLGLGEINALMELRKEEFKSVIRKAEEKLLLGELMDKSMHSVFFKHVRDHGLSIQLTFSFLKSAGLTSETEGFIFACQDGVINTLEYRSKVLQVQLPDTSCRRCRQHPETLMHLLSACPVLARGAYIQRHNAALRVLYYYLRHCYGIDVTPVLPYLPGDIPKVVENDSCKIYWNMPFATTPPIDHNKPDIVLFDKATRDIYVIEFSAPAEYNISAIESTKAKYIRISCLKLANFTQVTVSSFSS

SEQ ID NO: 9055 - protein, 640 aa, Cotesia glomerata
MAWIDYRKAFDSTPHELILYLLECLGVNPETVECIRRTMQLWRTRFHIGNGNALHVTGVVEYKRGVFQGDSLSPLLFCISLLPISVALRKTHGYFVGPPGDRKYSITHLLYMDDLKLYSANEDHLQAALNIVAEYTRDVGMSFGLDKCAVIHLARGKCSDTGDDVELVDGSILRQLGAGELYRYLGMEEHRMHAVSEVRATLRSEYVRRLRKIWSSELSGKNKVSATNMLAVPVLLYSFGVLKWARKDLRDLDIKTRKVINMNRSMHPNSSVARLYLSRSIGGRGLQSLERLHDRLVLGLTFEVVNFTADEDDFLMQIVHKHENAHKGSFLYKAAIYAARTLGLGEINALMELRKEEFKSVIRNAEEKQLLGELMDKSMHSVYFKHVRDHGLSTQLTFSFLKSAGLMSETEGFIFACQDGVINTLEYRSKVLQVQLLNTSCRMCKQHPETLIHFLSACPVLARGAYIQRHNAALRVLYYYLRHYYRIDMTPVLPYLPGDIPQVVENDSCKIYWNMPFATTRRIDHNKPDIVLFDKATRDIHVIEFSAPAEHNISAKEEHKRKIYQDLLFEIGKLYPRYRVKLVVLIVGVLGGMKQSFVSSLAKVPACTSKSEFLAVRMQKAVILGSLRLLREMTLACCGR

SEQ ID NO: 9056 - protein, 1076 aa, Cotesia glomerata
MIGYIARMHTPWSDTHPELAHFTPKHLRNYAAHLRRNRRSLVPDRRQSNRLFFPAQLHQERHRYSLDNNNPFIGRQVSISKKITYSQQQLDTVNEDLLTQIQEDSTLLAVNQVVYGAAVSAFPRERHRLSIEARLRQRIAQLGDKIDRSRKHVSRIQCVIEFETTQRAYTPQVRRIAAELRWRHHTLNKSTLLVIKEESLNKLRALVTAKKSLEKRLKRLVDNSLFRSSPSRFLTPKTDVTGNYPAPERVEAFWTELYGDQPNVNANTPALHDFKAFCRKHRRQNADEESPAVSVNEVCLALDGSRNWAAPGPDGINVFWWKKFTSTHLHLARIFTSYIRADEPIPDWLVEGRTVLIPKKGDLSDPKNYRPITCLNAVYKIFTKILNNRILQEIGPIWQQTYEQRGNKRGLSGCKENLIVDRCVIQDAIYYQRNLSMAWIDYRKAFDSTPHELILYLLKCLGVNPEMVECIRRTMQLWRTRFHIGNGNALHVTGVVEYKRGVFQGDSLSPLLFCISLLPISVALRKTHGYSVGPPGDRKYSITHLLYMDDLKLYSANEDHLQAALNIVAEYTRDVGMSFGLDKCAVIHLARGKCSDTGDDVELVDGSFLRQLGAGELYRYLGMEEHHMHAVSEVRATLRSEYVRRLRKIWSSELSGKNKVSATNMLAVPVLLYSFGVLKWARKDLRDLDIKTRKVINMNRSMHPNSSVARLYLSRSIGGRGLQSLERLHDRLVLGLTFEVVNFTADENDFLMQIVHKHENAHKGSFLYKAAIYAARTLGLGEINALMELRKEEFKSVIRNAEEKQLLGELMDKSMHSVYFKHVRDHGLSTQLTFSFLKSAGLMSETEGFIFACQDGVINTLEYRSKVLQVQLLDTSCRICKQHPETLIHLLSACPVLARGAYIQRHNAALRVLYYYLRHYYGIDMTPALPYLPGDIPQVVENDSCKIYWNMPFATTRRIDHNKPDIVLFDKATRDIYVIEFSAPAEHNISAKEEHKRKIYQDLLFEIGKLYPGYRDKLVVLIVGVLGGIKQSFVSSLAKVPACTSKSEFLAVRMQKAVILGSLRLLREMTLACCGR

SEQ ID NO: 9057 - protein, 1109 aa, Cotesia typhae
MNDDDPGALRTYFKWTEELRVDLLVCYQRSEPGVSGYMARMHTLWRDMHPELAHFTPKHLRNYAAHLRRNRRSLVPDRRQSNRLSFPAQLHQERRRSSLDNNNPFVGRQVSISKKITYSQQQLDAVNEDLRANILEDSTLLTVSQVVYGAAVSAFPRERQCLSIEARLKQRISQLGLKIDMSRKQVSRIQCVIEYDTTQTPYTPRIRRIAAELRWRHHTLNKSTLHVIKEESLNKLRALVAAKKSLEKRLKRLVNNSLFRSSPSRFLTPKTDVTGNYPTPERVEAFWTELYGDQPNVNANTPALHDFKVFCREHRRQNADEESPAVSVDEVRSALNGSKNWAAPGPDGINVFWWKKFTSTHLHLARILTSYIRADDPIPDWLVEGRTVLIPKKGDLSDPKNFRPITCLNAVYKIFTKILNNRILQQIEPVWQQIYEQRGSKRGLSGCKENLIVDRCVLQDAIYYQRNLSMAWIDYRKAFDSTPHELILYLLKCLGVNPEIVECIRRTMQLWRTRFHIGSGNALHVTGVVEYKRGVFQGDSLSPLLFCISLLPISVALRKTHGYSVGPPGDRNYSITHLLYMDDLKLYSADKDHLQAALNIVAEYTRDVGMSFGLDKCAVVHLARGKCSDTGNDVELVDGSVLSQLDAGELYRYLGMEEHRMHAVSEVRTTLQSEYVRRLRKIWSSELSGKNKVSATNMLAVPLLLYSFGVLKWTRKDLRDLDIKTRKIINMNRSMHPNSSVAILYLSRSIGGRGLQSLERLHDRLVLGLTHEVVNFTADEDDFLMQIVHKHENAHKGSFLYKAAIYAARTLGLGEINALMELRKEEFKSVIRNAEEKLLLGELMDKSMHSVFFKHVRDHGLSIQLTFSFLKSAGLMSETEGFIFACQDGVINTLEYRSKVLQVQLPDTSCRRCRQHPETLMHLLSACPVLARGAYIQRHNAALRVLYYYLRHCYGIDVTPVLPYLPGDIPQVVENDSCKIYWNMPFATTRRIDHNKPDIVLFDKATHDIYVIEFSAPAEYNISAKEEHKRQIYQDLLFEIGKLYPGYRVKLVVLIVGVLGGMKQSFVSSLTKVPACSSKAEFLAVRMQKAVLLGSLRLLREMTLACCDH

SEQ ID NO: 9058 - protein, 1073 aa, Cotesia typhae
MNYDDPGAIRTNFKWTEELRVDLLVCYQRSEPGVSGYMARMHTLWSDMHPELAHFTHKHLRIYAAHLRRNRRSLVPDRRQSNRLSFPAQLHQERRRSSLDNNNPFAGRRVSISKKITYSQQQLDAVNEDLRANILEDSTLLTVSQVVYGAAVSAFPRERHCLSIEARLKQRISQLGLKIDISRKQVSRIQCVIEFDTTQRTYTPRIRRIAAELRWRHHTLNKSTLLVIKEECLNKLRSLVAAKKSLEKRLKRLVDNSLFRSSPSRFLTAKTDVTGNYPTPELVEAFWTELYGDQPNVNANTPALHDFKVFCREHRRQNADEESPAVSVDEVRSALSGSKNWAAPGPDGINVFWWKKFTSTHLHLARIFTSYIRADDSIPDWLVEGRTVLIPKKGDLSDPKNFRPITCLNAVYKIFTKILNNRILQQIEPAWQQIYEQRGSKRGLSGCKENLIVDRCVLQDTIYYQRNLSMAWIDYRKAFDSTPHELILYLLNCLGVNPEIVECIRRTMQLWRTRFHIGSGNALHVTGVVAYKRGVFQGDSLSPLLFCISLLPISVALRKTRGYSVGPPGDRKYSITHLLYMDDLKLYSADEDHLQAALNIVADYTRDVGMSFGLDKCAVVHLARGKCSDTGDDVELVDGSVLRQLDAGELYRYLGMEEHRMHAISEVRRTLQSEYVTRLRKIWSSELSGKNNVSATNMLAVPVLLYSFGVLKWARKDLRDLDIKTRKIINMNRSMHPNSPVARLYLSRSIGGRGLQSLERLHDRLVLGLTDEVVNFTADEDDFLMQIVHKHENAHKASFLYKAAIYAARTLGLDDINALMELRKEEFKSVIRNAEEKLLLGELMDKSMHSVFYKHVRDHGLSTQLTFSFLKSAGLMSETEGFLFACQDGVINTLEYRSKVLQVQLPDTSCRRCRQHSETLMHLLSACPVLARGAYIQRHNAALRVLYYYLRHCYGIDVTPVLPYLPEDIPQVVENDSCKIYWNMPFATTRRIDHNKPDIVLFDKATRDIYVIEFSAPAEYNISAKEEHKRQIYQDLLFEIGKLYPGYRVKLIVLIVGVLGGMKQSFVSSLPKV

SEQ ID NO: 9059 - protein, 1109 aa, Cotesia glomerata
MNDDDPGALRTFFKWTEELRVDLLVCYQRSEPGVSGYMARMHTLWSDMHPELEHFTPKHLRNYAAYLRRNRRSLVPDRRQSNRLSFPAQLHQERRRSSLDDNNPFIGRQVSISKKITYSQQQLEAVNEDLRANILEDSTLLTVSQVVYGAAVSAFPRERHCLSIEARLRQRISQLGLKIDRSRKQVSRIQCVIEFETTQRAYTPRIRRIAAELRWRHHTLNKSTLLVIKEESLNKLRALVTAKKSLEKRLKRLVDNSLFRSSPSRFLTPKTDVTGNYPTPERVEAFWTELYGDQPNVNANTPALHDFKTFCREHRRQNADEESPAVSVNEVRSALNGSKNWAAPGPDGINVFWWKKFTSTHLHLARIFTSYIRADEPIPDWLVEGRTVLIPKRGDLSDPKNYRPITCLNAVYKIFTKILNNRILHEIEPVWQQIYEQRGSKRGLSGCKENLIVDRCVTQDAIYYQRNLSMAWIDYRKAFDSTSHELILYLLKCLGVNPEIVECIRRTMQLWRTRFHIGSGNALHITGVVEYKRGVFQGDSLSPLLFCISLLPISVALRKTRGYSVGPPGDRKYSITHLLYMDDLKLYSADEDHLQAALNIVAEYTRDAGMSFGLDKCAVVHLARGKCSVTGDDVELVDGSVLRQLDAGELYRYLGMEEHRMHAVSEVQATLRSEYVRRLRKIWSSELSGKNKVSATNTLAVPVLLYSFGVLKWARKDLRDLDIRTRKTINMNRSMHPNSSVARLYLSRSIGGRGLQSLERLHDRLVLGLTHEVVNFTADEDDFLMQIVHKHENAHKGSFLYKAAIYAARTLGLGEINALMELRKEEFKSAIRNAEEKLLLGKLMDKSMHSVFFKHVRDHGLSTQLTFSFLKSAGLMSETEGFIFACQDGVINTLEYRSKVLQVQLPDTTCRACKQHPETLMHILSACPVLARGAYIQRHNAALRVLYYYLRHRYGIDVTPVLPYLPGDIPQVVENDSCKIYWNMPFATTRRIDHNKPDIVLFDKATRDIYVIEFSAPAEYNISAKEEHKRQIYQDLLFEIGKLYPGYRVKLVVLIVGVLGGMKQSFVSSLARVPACSSKAEFLAVRMQKAVILGSLRLLRKMTLACCDH

SEQ ID NO: 9060 - protein, 1076 aa, Cotesia glomerata
MIGYIARMHTLWSDMHPELAHFTPNYLRNYAAHLRRNRRSLVPDRRQSNRLSFPAQLHQERRRSSLDNNNIFIGRQVGISKKITYSQQQLDKVNEDLLTQIQEDSTLLAVNQVVYGAAVSAFPRERHRLSIEARLRQRIAQLGDKIDRSRKHVSRIQCVIEFETTQRAYTPRVRRIAAELRWRHHTLNKSTLLVIKEESLNKLRALVTAKKSLEKRLKRLVDNSLFRSSPSRFLTPKTVVTGNYPAPEQVEAFWTELYGDQPNVNANTPALHDFKAFCRKHRRQNADEESPAVSVNEVRLALDGSRNWAAPGPDGINVFWWKKFTSTHLHLARIFTSYIRADEPIPDWLVEGRTVLIPKKGDLSDPKNYRPITCLNAVYKIFTKILNNRILQEIGPIWQQIYEQRGNKRGLSGCKENLIVDRCVIQDAIYYQRNLSMAWIDYRKAFDSTPHELILYLLKCLGVNPETVECIRRTMQLWRTRFHIGNGNALHVTGVVEYKRGVFQGDSLSPLLFCISLLPISVALRKTHGYSVGPPGDRKYSITHLLYIDDLKLYSANEDHVQAALNIVAEYTRDVGMSFGLDKCAVIHLARGKCSDTGDDVELVDGSILRQLGAGELYRYLGMEEHRMHAVSEVRATFRSEYVRRLRKIWSSELSGKNKVSATNMLAVPVLLYSFGVLKWARKDLRDLDIKTRKVINMNRSMHPNSSVARLYLSRSIGGRGLQSLERLHDRLVLGLTFEVVNFTADEDDFLMQIVHKHGNAHKGSFLYKAAIYAARTLGLGEINALMELRKEEFKSVIRNAEEKQLLGELMDKSMHSVYFKHVRDHGLSTQLTFSFLKSAGLMSETEGFIFACQDGVINTLEYRSKVLQVQLLDTSCRMCKQHPETLIHLLSLCPVLARGAYIQRHNAALRVLYYYLRHYYGIDMTPVLPYLPGDIPQVVENDSCKIYWNMPFATTRRIDHNKPDIVLFDKATRHIYVIEFSAPAEHNISAKEEHKRKIYQDLLFEIGKLYPGYRVKLVVLIVGVLGGIKQSFVSSLAKVPACTSKSEFLAVRMQKAVILGSLRLLREVTLACCGR

SEQ ID NO: 9061 - protein, 1049 aa, Cotesia typhae
MARMHTLWSDMHPELAHFTLKHLCNYAAHLRRNRRSLVPDRRQSNRLSFPAQLHQERRRSSLDNNNPFVGRQVSISKKLTYSQQQLDAVNEDLRATILEDSTLLTVSQVVYGAAVSAFPRERHCLSIEARLRQRILQLGSKIDRSRKHVSRIQCVIEFETTQKAYTPRIRRIAAELRWRHHTLNKSTLLVIKEESLNKLRALVTAKKSLEKRLKRLVDNSLFRSSPSRFLTPKTDVTGTYPTPERVEAFWTELYGDQPNVNANTPALHDFKAFCREHRRQNADEESPAVSVDEVRSALNGSKNWAAPGPDGINVFWWKKFTSTHLHLARIFTSYIRADDPIPNWLVEGRTVLIPKKGDLSDPKNFRPITCLNAVYKIFTKILNNRILQQIEPVWQQIYEQRGSKRGLSGCKENLIVDRCVLQDAIYYQRNLSMAWIDYRKAFDSTPHELILYLLKCLGVNPEIVECIRRTMQLWRTRFHIGSGNALHVTGVVEYKRGVFQGDSLSPLLFCVSLLPISVALRKTRGYSVGPPGDRNYSITHLLYMDDLKLYSADKDHLQAALNIVAEYTRDVGMSFGLDKCAVVHLARGKCSDTGDDVELVDGSVLRQLDAGELYRYLGMEEHRMHAVSEVRATLHSEYVRRLRKIWSSELSGKNKVSATNMLAVPVLLYTFGVLKWARKDLRDLDIKTRKIINMNRSMHPNSSVARLYLSRSIGGRGLQSLERLHDRLVLGLTHEVVNFTADEDDFLMQIVHKHENEHKGSFLYKAAIYAARTLGLREINALMELRKEEFKSVIRNAEEKLLFGELMDKSMHSVFFKHVRDHGLSTQLTFSSLKSAGLMSETEGFIFACQDGVINTREYRSKVLQVQLPDTSCRRCKQHPETLMHLLSACPVLARGAYIQRHNAALRVLYYYLRHCYGIDVTPVVPYLPGDIPQVVENDSCKIYWNMPFATTRRIDHNKPDIVLFDKATRDIYVIELSAPAEYILAKEEHKRQIYQDLLYEIGKLYPGYRVKLVVLIVGVLGGMKQSFVSSLAKVPACSSKAEFLAVRM

SEQ ID NO: 9062 - protein, 1109 aa, Cotesia typhae
MKDDDPGALRTCFKWTEELRVDLLVCYQRSEPGVSGYMARMHTLWSDMHPGLAHFTPKHLRNYAAHLRRNRRSLVPDRRQSNRLSFPAQLHQERRRSSLDNNNPFVGRQVSISKKITYSQQQLDAVNEDLRATILEDSTLLTVSQVVYGAAVSAFPRERHCLSIEARLRQRILQLGSKIDRSRKHVSRIQCVIEFETTQKAYTPRIRRIVAELRWRHHTLNKSTLLVIKEESLNKLRALVTAKKSLEKRLKRLVDNSLFRSSPLRFLTAKTDVTGTYPTPERVEAFWTELYGDQPNVNANTPALHDFKAFCREHRRQNADEESPAVSVDEVRSALNGSKNWAAPGPDGINVFWWKKFTSTHLHLACIFTSYIRADDPIPNWLVEGRTVLIPKKGDLSDPKNFRPITCLNAVYKIFTKILNNRILQQIEPVWQQIYEQRGSKRGLSGCKENLIVDRCVLQDAIYYQRNLSMAWIDYRKAFDSTPHELILYLLKCLGVNPEIVECIRRTMQLWRTRFHIGSGNALHVTGVVEYKRGVFQGDSLSPLLFCISLLPISVALRKTRGYSVGPPGDRKYSITHLLYMDDLKLYSADEDHLQAALNIVAEYTRDVGMSFGLDKCAVVHLARGKCSDTGDDVELVDGSVLRQLDAGELYRYLGMEEHRMHAVSEVRTTLQSEYVRRLRKIWSSELSGKNKVSATNMLAVPVLLYSFGVLKWARKDLRDLDIKTRKIINMNRSMHPNSSVARLYLSRSIGGRGLQSLERLHDRLVLGLTHEVVNFTADEDDFLMQIVHKHENAHKGSFLYKAAIYAARILGLGEINALMELQKEEFKSVIRNAEEKLLLGELMDKSMHSVFFKYVRDHGLSIQLTFPFLKSAGLMSETEGFIFACQDGVINTLEYRSKVLQVQLPDTSCRRCRQHPETLMHLLSACPVLARGAYIQRHNAALRVLYYYLRHCYGIDVTPVLPYLPGDIPQVVENDSCKIYWNMPFATTRRIDHNKPDIVLFDKATRDIYVIEFSAPAEYNISAKEEHKRQIYQDLLFEIGKLYPGYRVKLVVLIVGVLRGMKQSFVSSLAKVPACSSKAEFLAVRMQKAVLLGSLRLLREMTLACCDH

SEQ ID NO: 9063 - protein, 1109 aa, Cotesia glomerata
MNDDDPGALRTFFKWTEELRVDLLVCYQRSEPGVSGYMARMHTLWSDMHPELEHFTPKHLRNYAAYLRRNRRSLVPDRRQSNRLSFPAQLHQERRRSSLDDNNPFIGRQVSISKKITYSQQQLEAVNEDLRANILEDSTLLTVSQVVYGAAVSAFPRERHCLSIEARLRQRISQLGLKIDRSRKQVSRIQCVIEFETTQRAYTPRIRRIAAELRWRHHTLNKSTLLVIKEESLNKLRALVTAKKSLEKRLKRLVDNSLFRSSPSRFLTPKTDVTGNYPTPEGVEAFWTELYGDQPNVNANTPALHDFKAFCREHRRQNADEESPAVSVNEVRSALNGSKNWAAPGPDCINVFWWKKFTSTHLHLARIFTSYIRADEPIPDWLVEGRTVLIPKKGDLSDPKNYRPITCLNAVYKIFTKILNNRILHEIEPVWQQIYEQRGSKRGLSGCKENLIVDRCVTQDAIYYQRNLSMAWIDYRKAFDSTSHELILYLLKCLGVNPEIVECIRRTMQLWRTRFHIGSGNALHITGVVEYKRGVFQGDSLSPLLFCISLLPISVALRKTRGYSVGPPGDRKYSITHLLYMDDLKLYSADEDHLQAALNIVAEYTRDVGMSFGLDKCAVVHLARGKCSVTGDDVELVDGSVLRQLDAGELYRYLGMEEHRMHAVSEVQATLRSEYVRRLRKIWSSELSGKNKVSATNTLAVPVLLYSFGVLKWARKDLRDLDIRTRKTINMNRSMHPNSSVARLYLSRSIGGRGLQSLERLHDRLVLGLTHEVVNFTADEDDFLMQIVHKHENAHKGSFLYKAAIYAARTLGLGEINALMELRKEEFKSVIRNAEEKLLLGKLMDKSMHSVFFKHVRDHGLSTQLTFSFLKSAGLMSETEGFIFACQDGVINTLEYRSKVLQVQLPDTTCRACKQHPETLMHILSACPVLARGAYIQRHNAALRVLYYYLRHRYGIDMTPVLPYLPGDIPQVVENDSCKIYWNMPFATTRRIDHNKPDIVLFDKATRDIYVIEFSAPAEYNISAKEEHKRQIYQDLLFEIGKLYPGYRVKLVVLIVGVLGGMKQSFVSSLARVPAYSSKAEFLAVRMQKAVILGSLRLLRKMTLACCDH

SEQ ID NO: 9064 - protein, 1109 aa, Cotesia glomerata
MNDDDPGALRTFFKWTEELRVDLLVCYQRSEPGVSGYMARMHTLWSDMHPELEHFTPKHLRNYAAYLRRNRRSLVLDRRQSNRLSFPAQLHQERRRSSLDDNNPFIGRQVSISKKITYSQQQLEAVNEDLRANILEDSTLLTLSQVVYGAAVSAFPRERHCLSIEARLRQRISQLGLKIDRSRKQVSRIQCVIEFETTQRAYTPRIRRIAAELRWRHHTLNKSTLLVIKEESLNKLRALVTAKKSLEKRLKRLVDNSLFRSSPSRFLTPKTDVTGNYPTPERVEAFWTELYGDQPNVNANTPALHDFKAFCREHRRQNADEESPAVSVNEVRSALNGSKNWAAPGPDGINVFWWKKFTSTHLHLARIFTSYIRADEPIPDWLVEGRTVLIPKKGDLSDPKNYRPITCLNAVYKIFTKILNNRILQEIEPVWQQIYEQRDSKRGLSGCKENLIVDRCVTQDAIYYQRNLSMAWIDYRKAFDSTSHELILYLLKCLGVNPEIVECIRRTMQLWRTRFHIGSGNALHITGVVEYKRGVFQGDSLSPLLFCISLLPISVALRKTRGYSVGPPGDRKYSITHLLYMDDLKLYSADEDHLQVALNIVAEYTRDAGMSFGLDKCAVVHLARGKCSVTGDDVELVDGSVLRQLDAGELYRYLGMEEHRMHAVSEVQATLRSEYVRRLRKIWSSELSGKNKVSATNTLAVPVLLYSIGVLKWARKDLRDLDIRTRKTINMNRSMHPNSSVARLYLSRSIGGRGLQSLERLHDRLVLGLTHEVVNFTADEDDFLMQIVHKHENAHKGSFLYKAAIYAARTLGLGEINALMELRKEEFKSVIRNAEEKLLLGKLMDKSMHSVFFKHVRDHGLSTQLTFSFLKSAGLMSETEGFIFACQDGVINTLEYRSKVLQVQLPDTTCRACKQHPETLMHILSACPVLARSAYIQRHNAALRVLYYYLRHRYGIDVTPVLPYLPGDIPQVVENDSCKIYWNMPFATTRRIDHNKPDIVLFDKATRDIYVIEFSAPAEYNISAKEEHKRQIYQDLLFEIGKLYPGYRVKLVVLIVGVLGGMKQSFVSSLARVPACSSKAEFLAVRMQKAVILGSLRLLRKMTLACCDH

SEQ ID NO: 9065 - protein, 1110 aa, Cotesia typhae
MTYDDPGAYRIKFKWTEELHADLLVCWQNSEPEVSGYMARMHTLWCGMHPEHRHFTPKHLRNYASYLRHNRRSLLPSRRLSNRPSFPAPLHQERRRSSEDNDNLFTGRQVSISKKMSHLKQQLDTVNEDLPTQLQEDSTLLTVNQVVYGAAASLLPIERRHSLSFEGKLKLRIAQLGHKIDISRKQVSRIQCVIEYVSTQRPYTPRVRRLAAELRRRHHTLNKRILLVIKEESLNRLRALVASKKSLEKRLKRLIDNSLFRSNPSRFLSPKTAVPENYPSSERVEAFWSELYGDQPNVNPDSPALHEFEAFCREHRRQDIAEESPAVSVEEVRKALNGSKNWAAPGPDGINIFWWKKFSSTHAHLARIFTSYIQGDEPIPDWLVEGRTVLIPKKGDLSDPKNYRPITCLNAVYKIFTKILNNRILREIEPVWQQIYEQRGSKQGVSGCKINLLVDRCVIQDAIYYQRNLSMAWIDYRKAFDSTSHELILYLLKCLGINRQTVGCIQRTMQLWRTRFPIGSGNALHVTGTVQYKRGVFQGDSLSPLLFCISLLPISVALRQTRGYSAGPPSDRVYTITHQLFMDDLKIYSANKDHLQTALNIVAEYTRDVGMSFGLDKCAVVHLAKGKCSDTGGDVELVDGSVLRELDAGELYRYLGIEERQMHAVSEVRTTLRSEYVRRLRKIWSSELSGKNKVSATNMLAVPVLLYSFETLKWPRNELKGLDIKTRKVINMNQSMHPNSSVARMYLSRNIGGRGLQSLERLHDRLVLGLTYEVANFTADEDDFLMQFVHSHENARKGSFLYKAAIYAANTLGLGEINALIELPKKEFKSVVRIAEEKKLLGEHMDKSMHSVYFKHVRDHGLSTQLTFSFLKSAGLMSETEGFIFACQDGVINTLEYRSKVLQAQLPDTSCRTCKQHPETLMHLLSACPVLARGAYIQRHNAALRVLYYHLRYSYGIDETPVLPYLPGDIPQVVENDSSKIYWNIPFATTRRIDHNKPDIVLFDKATRDIYVIEFSAPAEYNISAKEEHKHQIYQDLLFEIGKLYPSYRVKLVVLVVGVLGGMKQSFVSSLAKIPACSSAAVSLAVRMQRAVILGSLRLLRQMNLACYTH

SEQ ID NO: 9066 - protein, 1109 aa, Cotesia glomerata
MNDDDPGALRTYFKWTEELRVDLLVCYQRSEPGVSGYMARMHTLWSDMHPELEHFTPKHLRNYAAYLRRNRRSLVPDRRQSNRLSFPAQLHQERRRSSLDDNNPFIGRQVSISKKITYTQQQLEAVNEDLRANILEDSTLLTVSQVVYGAAVSAFPRERHCLSIEARLRQRISQLGLKIDRSRKQVSRIQCVIEFETTQRAYTPRIRRIAADLRWRHHTLNKSTLLVIKEESLNKLRALVTAKKSLEKRLKRLVDNSLFRSSPSRFLTPKTDVTGNYPTPERVEAFWTELYGDQPNVNANTPALHDFKAFCREHRRQNADEESPAVSVNEVRSALNGSKNWAAPGPDGINVFWWKKFTSTHLHLARIFTSYIRADEPIPDWLVEGRTVLIPVKGGLSDPKNYRPITCLNAVYKIFTKILNNRILQEIEPVWQQIYEQRGSKRGLSGCKENLIVDRCVTQDAIYYQRNLSMAWIDYRKAFDSTSHELILYLLKCLGVNPEIVECIRRTMQLWRTRFHIGSGNALHITGVVEYKRGVFQGDSLSPLLFCISLLPISVALRKTRGYSVGPPGDRKYSITHLLYMDDLKLYSADEDHLQAALNIVAEYTRDVGMSFGLDKCAVVHLARGKCSVTGDDVELVDGSVLRQLDAGELYRYLGMEEHRMHAVSEVQATLRSEYVRRLRKIWSSELSGKNKVSASNMLAVPVLLYTFGVLKWARKDLRDLDIKTRKTINMNRSMHPNSSVARLYLSRSIGGRGLQSLERLHDRLVLGLTHEVVNFTADEDDFLMQIVHKHENAHKGSFLYKAAIYAARTLGLGEINALMELRKEEFKSVIRNAEEKLLLGELMDKSMHSVFFKHVRDHGLSTQLTFSFLKSAGLMSETEGFIFACQDGVINTLEYRSKVLQVQLLDTSCRMCKQHPETLMHLLSACPVLARGAYIQRHNAALRVLYYYLRHYYGIDMTPVLPYLPGDIPQVVENDSCKIYWNMPFATTRRIDHNKPDIVLFDKATRDIYVIEFSAPAEYNISAKEEHKRQIYQDLLFEIGKLYPGYRVKLVVLIVGVLGGMKQSFVSSLARVPACSSKAEFLAVRMQKAVILGSLRLLRKMTLACCDH

SEQ ID NO: 9067 - protein, 1072 aa, Cotesia glomerata
MARMHTLWSDMHPELEHFTPKHLRNYAAHLRRNRRSLVPDRRQSTRLSFPAQLHQERRRSSLDDNNPFIGRQVSISKKITYSQQQLEAVNEDLRANILEDSTLLTVSQVVYGAAVSAFPRERNCLSIEARLIQRISQLGLKIDRSRKQVSRIQCVIEFETTQRAYTPRIRRIAAELRWRHHTLNKSTLLVIKEESLNKLRALVTAKKSLEKRLKRLVDNSLFRSSPPRFLTPKTDVTGNYPTPERVEAFWTELYGDQPNVNANTPALDDFKAFCREHRRQNADEESPAVSVNEVRSALNGSKNWAAPGPDGINVFWWKKFTFTHLHLARIFTSYIRADEPIPDWLVEGRTVLIPKKGDLSDPKNYRPITCLNAVYKIFTKILNSRILQEIEPVWQQIYEQRGSKRGLSGCKENLIVDRCVTQDAIYYQRNLSMAWIDYRKAFDSTSHELILYLLKCLGVNPEIVECIRRTMQLWRTRFHIGSGNALHITGVVEYKRGVFQGDSLSPLLFCISLLPISVALRKTRGYSVGPPGDRKYSITHLLYMDDLKLYSADEDHLQAALNIVAEYTRDVGMSFGLDKCAVVHLARGKCSVTGDDVELVDGSVLRQLDAGELYRYLGMEEHRMHAVSEVQATLRSEYVRRLRKIWSSELSGKNKVSATNTLAVPVLLYSFGVLKWARKDLRDLDIRTRKTINMNRSMHPNSSVARLYLSRLIGGRGLQSLERLHDRLVLGLTHEVVNFTADEDDFLMQIVHKHENAHKGSFLYKAAIYAARTLGLGEINALMELRKEEFKSAIRNAEEKLLLGKLMDKSMHSVFFKHVRDHGLSTQLTFSFLKSAGLMSETEGFIFAYHDGVINTLEYRSKVLQVQLPDTTCRACKLHPETLMHILSACPVLARGAYIQRHNAALRVLYYYLRHHYGIDVTPVLPYLPGDIPQVVENDSCKIYWNMPFATTRRIDHNKPVIVLFDKATRDIYVIEFSAPAEYNISAKEEHKRQIYQDLLFEIGKLYPGYRVKLVVLIVGVLGGMKQSFVSSLARVPACSSKAEFLAVRMQKAVILGSLRLLRKMTLPCCDH

SEQ ID NO: 9068 - protein, 903 aa, Cotesia typhae
MAKRRKAQIGRSTRRTKRQKIVGSQQFVDEAIDENIVIDNDINNEEIRENNINDNDDINDEDNNDIDNNDIDNNNNTNNNNNNNNNNNNNNKPDTPALHDFEAFCREHRRQDIAEESPAVSVQEVRKALNGSKNWAAPGPDGINIFWWKKFSSTHAHLARIFTSYIQGDEPIPDWLVEGRTVLIPKKGDLSDPKNYRPITCLNAVYKIFTKILNNRILREIEPVWQQIYEQRGSKQGVSGCKINLLVDKCVIQDAIYYQRNLSMAWIDYRKAFDSTSHELILYLLKCLGINRQTVRCIQRTMQLWRTRFHIGSGNALHVTGTVQYKRGVFQGDSLSPLLFCISLLPISVALRKTRGYSAGPPSDRVYMITHQLFMDDLKIYSANKDHLQTALNIVAEYTRDVGMSFGLDKCAVVHLAKGKCSDTGGDVELVDGSVLRELDAGELYRYLGIEERRMHAVSEVRTTLRSDYVRRLRKIWSSELSGTNKVSATNMLAVPVLLYSFGVLKWPRNELKDLDIKTRKVINMNQSMHPNLSVARMYLSRNIGGRGLQSLERLHDRLVLGLTYEVANFTADEDDFLMQFVHSHENARKGSFLYKAAIYAANTLGLGEINALIELPKKEFKSVVRIAEEKKLLGEHMDKSMHSVYFKHVRDHGLSTQLSFSFLKSAGLMSETEGFIFACQDGVINTLEYRSKVLQVQLPDTSCRRCRQHPETLMHLLSACPVLARGAYIQRHNAALRVLYYYLRHCYGIDVTPVLPYLPGDIPQVVENDSCKIYWNMPFATTRRIDHNKPDIVLFDKATRDIYVIEFSAPAEYNISAKEEHKRQIYQDLLFEIGKLYPGYRVKLVVLIVGVLGGMKQSFVSSLAKVPACSSKAEFLAVRMQKAVLLGSLRLLREMTLACCDH

SEQ ID NO: 9069 - protein, 1110 aa, Cotesia typhae
MTYDDPGAYRIKFKWTEELRADLLVCWQNSEPEVSGYMARMHTLWCGMHPEHRHFTPKHLRNYASYLRHNRRSLLPNRRQSNRPSFPAPLHQERHRFSEDNDNLFTGRQVSISKKMTHSKQQLDTVNEDLPTQLQEDSTLLTVNQVVYGAAASLLPIERRHSLSFEAKLKLRIAQLGHKIDISRKQVSRIQCVIEYVSTQRPYTPKVSRLAAELRRRHHTLNKSTLLVIKEESLNRLRALVASKKSLEKRLKRLIDNSLFRSNPSRFLSPKTAVPENYPSSERVEAFWSELYGDQPNVNPDTPALHDFEAFCREHRRQDIAKESPAVSVQEVRKALNGSKNWAAPGPDGINIFWWKKFSSTHAHLARIFTSYIQGDEPIPDWLVEGRTVLIPKKGDLSDPKNYRPITCLNAVYKIFTKILNNRILQEIEPVWQQIYEQRGSKQGVSGCKINLLVDRCVIQDAIYYQRNLSMAWIDYRKAFDSTSHELILYLLKCLGINRQTVGCIQRTMQLWRTRFHIGSGNALHVTGTVRYKRGVFQGNSLSPLLFCISLLPISVALRQTRGYSAGLPSDRVYSITHQLFMDDLKIYSANKDHLQTAINIVAEYTRDVGMSFGLDKCAVVHLAKGKCSDTGGDVELVDGSVLRELDAGELYRYLGIEERQMHAVSEVRTTLRSEYVRRLRKIWSSEISCKNKVSATNMLAVPVLLYSCGILKWPRNELKDLDIKTRKVINMNQSMHPNSSVARMYLSRNIGGRGLQSLERLHDRLVLSLTYEVANFTADEDDFLMQFVHSHENARKGSFLYKAAIYAANTLGLGEINALIELPKKEFKSVVRIAEEKKLLGEHMDKSMHSVYFKHVRDHGLSTQLTFSFLKSAGMMSETEGFIFPCQDGVINTLEYRSKVLQAQLPDTSCRTCKQHPETLMHLLSACPVLARGAYIQRHNAALRVLYYHLRYSCGIDETPVLPYLPGDIPQVVENDSSKIYWNIPFATTRRIDHNKPDIVLFDKATRDIYVIEFSAPAEYNISAKEEHKHQIYQDLLFEIGKLYPSYRVKLVVLVVGVLGGMKQSFVSLLAKIPACSSAAVSLAVRMQKAVILGSLRLLRQMNLACCTH

SEQ ID NO: 9070 - protein, 1109 aa, Cotesia glomerata
MNDDDPGALRTYFKWTEELRVDLLVCYQRSEPGVSGYMARMHTLWSDMHPELEHFTPKHLRNYAAYLRRNRRSLVPDRRQSNRLSFPAQLHQERRRSSLDDNNPFIGRQVSISKKITYSQQQLEAVNEDLRANILEDSTLLTVSQVVYGAAVSAFPRERHCLSIEARLRQRISQLGLKIDRSRKQVSRIQCVIEFETTQRAYTPRIRRIAAELRWRHHTLNKSTLLVIKEESLNKLRALVTAKKSLEKRLKRLVDNSLFRSSPSRFLTPKTDVTGNYPTPEQVEAFWTELYGDQPNVNANTPALQDFKAFCREHRRQNADEESPAVSVNEVRSALNGSKNWAAPGPDGINVFWWKKFTSTHLHLARIFTSYIRADEPIPDWLVEGRTVLIPKKGDLSDPKNYRPITCLNAVYKIFTKILNNRILQEIEPVWQQIYEQRGSKRGLSGCKENLIVDRCVTQDAIYYQRNLSMAWIDYRKAFDSTSHELILYLLKCLGVNPEIVECIRRTMQLWRTRFYIGSGNALHITGVVEYKRGVFQGDSLSPLLFCISLLPISVALRKTHGYSVGPPGDRKYSITHLLYMDDLKLYSADEDHLQAALNIVAEYTRDVGMSFGLDKCAVVHLARGKCSDTSDDVELVDGSILRQLDTGELYRYLGMEEHRMHAVSEVQATLRSEYVRRLRKIWSSELSGKNKVSATNMLAVPVLLYSFGVLKWARKDLRDLDIKTRKTINMNRSMHPNSSVARLYLSRSIGGRGLQSLERLHDRLVLGLTHEVVNFTADEDDFLMQIVHKHENAHKGSFLYKAAIYAARTLGLGEINALMELRKEEFKSVIRNAEEKLLLGELMDKSMHSVFFKHVRDHGLSTQLTFSFLKSAGLMSETEGFIFACQDGVINTLEYRSKVLQVQLPDTSCRMCKQHPETLMHLLSACPVLARGAYIQRHNAALRVLYYYLRHRYGIDMTPVLPYLPGDIPQVVENDSCKIYWNMPFATTRRIDHNKPDIVLFDKATRDIYVIEFSAPAEYNISAKEEHKRQIYQDLLFEIGKLYPGYRVKLVVLIVGVLGGMKQSFVSSLARVPACSSKAEFLAVRMQKAVILGSLRLLRKMTLACCDH

SEQ ID NO: 9071 - protein, 1067 aa, Cotesia glomerata
MARMHTLWSDMHPELEHFTPKHLRNYAAYLRRNRRSLVPDRRQSNRLSFPAQLHQERRRSSLDDNNPFIGRQVSISKKITYSQQQLEAVNEDLRANILEDSTLLTVSQVVYGAAVSAFPRERHCLSIEARLRQRISQLGLKIDRSRKQVSRIQCVIEFETTQRAYTPRIRRIAAELRWRHHTLNKSTLLVINKLRALVTAKKSLEKRLKRLVDNSLFRSSPSRFLTPKTDVTGNYPTPERVEAFWTELYGDQPNVNANTPALHDFKAFCREHRRQNADEESPAVSVNEVRSALNGSKNWAAPGPDGINVFWWKKFTSTHLHLARIFTSYIRADEPIPDWLVEGRTVLIPKKGDLSDPKNYRPITCLNAVYKIFTKILNNRILHEIEPVWQQIYEQRGSKRGLSGCKENLIVDRCVTQDAIYYQRNLSMAWIDYRKAFDSTSHELILYLLKCLGVNPEIVECIRRTMQLWRTRFHIGSGNALHITGVVEYKRGVFQGDSLSPLLFCISLLPISVALRKTRGYSVGPPGDRKYSITHLLYMDDLKLYSADEDHLQAALNIVAEYTRDVGMSFGLDKCAVVHLARGKCSVTGDDVELVDGSVLRQLDAGELYRYLGMEEHRMHAVSEVQATLRSEYVRRLRKIWSSELSGKNKVSATNTLAVPVLLYSFGILKWARKDLRDLDIRTRKTINMNRSMHPNSSVARLYLSRSIGGRGLQSLERLHDRLVLGLTHEVVNFTADEDDFLMQIVHKHENAHEGSFLYKAAIYAARTLGLGEINALMELRKEEFKSVIRNAEEKLLLGKLMDKSMHSVFFKHVRDHGLSAQLTFSFLKSAGLMSETEGFIFACQDGVINTLEYRSKVLQVQLPDTTCRACKQHPETLMHILSACPVLARGAYIQRHNAALRVLYYYLRHRYGIDVTPVLPYLPGDIPQVVENDSCKIYWNMPFATTRRIDHNKPDIVLFDKATRDIYVIEFSAPAEYNISAKEEHKKQIYQDLLFEIGKLYPGYRVKLVVLIVGVLGGMKQSFVSSLARVPACSSKAEFLAVRMQKAVILGSLRLLRKMTLACCDH

SEQ ID NO: 9072 - protein, 640 aa, Cotesia typhae
MAWIDYRKAFDSTPHELILYLLKCLGVNPEIVECIRRTMQLWRTRFHIGSGNALHVTGVVEYKRGVFQGDSLSPLLFCISLLPISVALRKTHGYSVGPPGDRNYSITHLLYMDDLKLYSADKDHLQAALNIVAEYTRDVGMSFGLDKCAVVHLARGKCSDTGDDVELVDGSVLSQLDAGELYRYLGMEEHRMHAVSEVRTTLQSEYVRRLRKIWSSELSGKNKVSATNMLAVPVLLYSFGVLKWTRKDLRDLDIKTRKIINMNRSMHPNSSVARLYLSRSIGGRGLQSLERLHDRLVLGLTHEVVNFTADEDDFLMQIVHKHENAHKGSFLYKAAIYAARTLGLGEINALMELRKEEFKSVIRNAEENLLLGELMDKSMHSVFFKHVRDHGLSIQLTFSFLKSAGLMSETEGFIFACQDGVINTLEYRSKVLQVQLPDTSCRRCRQHPETLMHLLSACPVLARGAYIQRHNAALRVLYYYLRHCYGIDVTPVLPYLPGDIPQVVENDSCKIYWNMPFATTRRIDHNKPDIVLFDKATRDIYVIEFSAPAEYNISAKEEHKRQIYQDLLFEIGKLYPGYRVKLVVLIVGVLGGMKQSFVSSLAKVPACSSKAEFLAVRMQKAVLLGSLRLLREMTLACCDH

SEQ ID NO: 9073 - protein, 638 aa, Cotesia typhae
MAWIDYRKAFDSTPHELILYLLKCLGVNPEIVECIRRTMQLWRTRFHIGSGNALHVTGVVEYKRGVFQGDSLSPLLFCVSLLPISVTLRKTRRYSVGSPGDRNYLITHLLYMDDLKLYSADKDHLQAALNIVAEYTRDVGMSFGLDKCAVVHLARGKCSDTGDDVELVDGSVLRQLDAGELYKYLGMEKHRMHAVSAVQTTLRSEYVRRLRKIWSSEFSGKNKVSATNMLAVPVLLYSFGVLKWARKDLRDLDIKTRKIINMNRSMHPNSSVARLYLSRSIGGRGLQSLERLHDRLVLGLTHEVVNFTADEDDFLMQIVHKHENEHKGSFLYKAAIYAARTLGLGEINALMELRKEEFKNVIRNAEEKLLLGELMDKSMHSVFFKHVRDHGLSTQLTFSFLKSAGLMSETEGFIFACQDGVINTLEYRSKVQLPDTSCRGCRQHPETLMHLLSVCPVLARGAYIQRHNATLRVLLSYYLRHCYGIDVTPVLPYLPGDIPQVVENNSCKIYWNMPFATTRRIDHNKPDIVLFDKATHDIYVIEFSAPAEYNISAKEEHKRPIYQDLLFEIGKLYPGYRVKLVVLIVGVLGGMKQSFVSSLAKVPACSSKAEFLAVRIQKAVILGSLRLLREMTLACCNY

SEQ ID NO: 9074 - protein, 1109 aa, Cotesia glomerata
MNDDDPGALRTFFKWTEELRVDLLVCYQRSEPGVSGYMARMHTLWSDMHPELEHFTPKHLRNYAAYLRRNRRSLVPDRRQSNRLSFPAQLHQERRRSSLDDNNPFIGRQVSISKKITYSQQQLEAVNEDLRANILEDSTLLTVSQVVYGAAVSAFPRERHCLSIEARLRQRISQLGLKIDRSRKQVSRIQCVIEFETTQRAYTPRIRRIAAELRWRHHTLNKSTLLVIKEESLNKLRALVTAKKSLEKRLKRLVDNSLFRSSPSRFLTPKTDVTGNYPTPERVEAFWTELYGDQPNVNANTPALHDFKAFCREHRRQNADEESPAVSVNEVRSALNGSKNWAAPGPDGINVFWWKKFTSTHLHLARIFTSYIRADEPIPDWLVEGRTVLIPKKGDLSDPKNYRPITCLNAVYKIFTKILNNRILHEIEPVWQQIYEQHGSKRGLSGCKENLIVDRCVTQDAIYYQRNLSMAWIDYRKAFDSTSHELILYLLKCLGVNPEIVECIRRTMQLWRTRFHIGSGNALHITGVVEYKRGVFQGDSLSPLLFCISLLPISVALRKTRGYSVGPPGDRKYSITHLLYMDDLKLYSADEDHLQAALNIVAEYTRDAGMSFGLDKCAVVHLARGKCSVTGDDVELVDGSVLRQLDAGELYRYLGMEEHRMHAVSEVQATLRSEYVRRLRKIWSSELSGKNKVSATNTLAVPVLLYSFGVLKWARKDLRDLDIRTRKTINMNRSMHPNSSVARLYLSRSIGGRGLQSLERLHDRLVLGLTHEVVNFTADEDDFLMQIVHKHENAHKGSFLYKAAIYAARTLGLGEINALMELRKEEFKSAIRNAEEKLLLGKLMDKSMHSVFFKHVRDHGLSTQLTFSFLKSAGLMSETEGFIFACQDGVINTLEYRSKVLQVQLPDTTCRACKQHPETLMHILSACPVLARGAYIQRHNAALRVLYYYFRHRYGIDVTPVLPYLPGDIPQVVENDSCKIYWNMPFATTRRIDHNKPDIVLFDKATRDIYVIEFSAPAEYNISAKEEHKRQIYQDLLFEIGKLYPGYRVKLVVLIVGVLGGMKQSFVSSLARVPACSSKAELLAVRMQKAVILGSLRLLRKMTLACCDH

SEQ ID NO: 9075 - protein, 1109 aa, Cotesia typhae
MKDDDPGNLRTYFKWTEELRVDLLVCYQRSEPGVSGYMARMHTLWSDMHPELAHFTPKHLRNYAAHLRRNRRSLVPDRRQPNRLSFPAQLHQERRRSSLDNNNPFVGRQVSISKKITYSQQQLDAVNEDLRAAILEDSTLLTVSQVVYGAAVSAFPRERHCLSIEARLRQRILQLGSKIDISRKHVSRIQCVIEFETTQKAYTPRIRRIVAELRWRHHTLNKSTLLVIKEESLNKLRALVTAKKSLEKRLKRLVDNSLFRSSPSRFLTAKTDVTGTYPTPERVEAFWTELYGDQPNVNANTPALHDFKTFCREHRRQNADEESPAVSVDEVRSALNGSKNWAAPGPDGINVFWWKKFTSTHLHLACIFTSYIRADDPIPNWLVEGRTVLIPKKGDLSDPKNFRPITCLNAVYKIFTKILNNRILQQIEPVWQQIYEQRGSKRGLSGCKENLIVDRCVLQDAIYYQCNLSMAWIDYRKAFDSTPHELILYLLKCLGVNPEIVECIRRTMQLWRTRFHIGSGNALHVTGVVEYKRGVFQGDSVSPLLFCISLLPISVALRKTRGYSVGPPGDRKYSITHLLYMDDLKLYSADEDHLQAALNIVAEYTRDVGMSFGLDKCAVVHLARGKCSDTGDDVELVDGSVLRQLDAGELYRYLGMEEHRMHAVSEVRTTLLSEYVRRLRKIWSSELSGKNKVSATNMLAVPVLLYSFGVLKWTRKDLRDLDIKTRKIINMNRSMHPNSSVARLYLSRSIGGRGLQSLERLHDRLVLGLTHEVVNFTADEDDFLMQIVHKHENAHKRTFLYKAAIYAARTFDLGEINALMELRKEEFKSVIRNAEEKLLLGELMDKSMHSVFFKHVRDHGLSIQLTFFFLKSAGLMSETEGFIFACQDGVINTLEYRSKVLQVQLPDTSCRRCRQHPETLMHLLSACPVLARGAYIQRHNAALRVLYYYLRHCYGIDVTPVLPYLPGDIPQVVENDSCKIYWNMPFATTRRIDHNKPDIVLFDKATRDIYVIEFSAPAEYNISAKEEHKRQIYQDLLFEIGKLYPGYRVKLVVLIVGVLGGMKQSFVSSLAKVPACSSKAEFLAVRMQKAVLLGSLRLLREMTLACCDH

SEQ ID NO: 9076 - protein, 1058 aa, Cotesia typhae
MTYDDPGAYRIKFKWTEELRADLLVCWQNSEPEVSGYMARMHTLWCGMHPEHRHFTPKHLRNYASYLRHNRRSLLPNRKLSNRSSFPAPLHQERRRSSEDNDNLFTGRQVSISKKMSHSKQQLDTVNEDLPTQLQEDSTLLTVNQVVYGAAASLLPIERRHSLSFEAKLKLRIAQLGHKIDISRKQVSRIQCVIEYVSAERPYTPKVRRLAAELRKRHHTLNKSTLIVIKEESLNWLRALVASKKSLEKRLKRLIDNSLFRSNPSRFLSPKTAVPENYPSSERVEAFWSELYGDQPNVNPDTPALHDFEAFCREHRRQDIAEESPAVSVEKVRKALNGSKNWAAPGPDGINIFWWKKFSSTHAHLARIFTSYIQSDEPIPDWLVEGRTVLIPKKGDLSDPKNYRPITCLNAVYKIFTKILNNRILEEIEPVWQQIYEQRGSKQGVSGCKINLLVDRCVIQDAIYYQRNLSMAWIDYRKAFDSTSHELILYLLKCLGINRQTVGCIQRTMQLWRTRFHIGSGNALHVTGAVQYKRGVFQGDSLSPLLFCISLLPISVALRQTRGYSAVPPSDRVYSITHQLFMDDLKIYSANKDHLQTALNIVAEYTRDVGMSFGLDKCAVVHLAKGKCSDTGGDVELVDGSVLRELDAGELYRYLGIEERRMHAVSEVRTTLRSEYVRRLRKIWSSELSGKNKVSATNMLAVPVLLYSFGVLKWPRNELKDLDIKTRKVINMNQSMHPNSSVARMYLSRNIGGRGLQSLERLHDRLVLGLTYEVANFTADEDDYLMQFVHSYENARKGSFLYKAAIYAANTLGLGEINALIELPKKEFKSVVRIAEEKKLLGEHMDKSMHSVYFKHVRDHGLSTQLTFSFLKSAGLMSETEGFIFACQDGVINTLEYRSKVLQVQLPNTSCRRCRQYPETLMHLLSACPVLARGAYIQRHNAALRVLYYYLRHCYGIDVTPVLPYLSGDIPQVVENDSCKIYWNMPFATTRRIDHNKPDIVLFEKATRDIYVIEFSAPAEYNISAKEEHKRQIYQDLQKLSSWQLGCRRLFYLVLSVS

SEQ ID NO: 9077 - protein, 1086 aa, Microplitis demolitor
MCYNNSEPERRGYMARMHALWSNMHPNYSHLSQQHLRDYASHLRRTRRSLLMNRRLSHRLSFPAQLHQERRRSSEDADNYFERRQVCISKKIHYPKQLLDTENRELSARIQEDSILLTINQAVYDAASSLLPPARRNISSPEAKMRGRIGQLSLKIDDLRKHVSRIQCVIEYVNARKAFTSKVRRIAAGLRYQHHTLNKENLLNIKEGSLNRLRALVTAKKSLEKKLKRLTDNSLFRLSPSRFLTPKTSVSGDSPSIEQVEAFWSELYGDQPNVNRDTPALNDFEAFCRQHRNDNADEESPEVSVEEVRSALNNGKNWAAPGPDGINLFWWKKLTSTHSHLARIFTAFIRGNEPIPCWLVEGRTVLIPKKGDLSDPKNYRPITCLNAVYKIFTKILNNRILQEIDPVWQQIYEQRGSKRGLSGCKENLLVDRCVIQDAICYQRNLSMAWIDYRKAFDSTSHELILFLLKSLVLNRDTVGCIRRTMQLWRTRFHISCGNDKRVTEAVQYKRGVFQGDSLSPLLFCISLLPISVALRRTRGYSVGPSNDRKYSITHLLYMDDLKVYASDEEHLQTALNIVGEYTRDVGMAFGLDKCAVVNLVKGKCSDVREDIELVDGSVIDHLDAGESYKYLGIDGSPMQDASKIKTTLCSEYVRRLRKIWSSELSGKNKVSATNMLAVPVLLYSFGVLKWARKELRDLDIKTRKVMNMNRSMHPKSSITRLYLSRHIGGRGLQSLECLHDRLVLGITYEVVNFTADENDFLMQIVHSHENRHRGAFLYKAAMYAAKSLGLGRVNPLIVLPKEEFKRVISNAEQQKLLSTHMDKSMHSVFFKHVREHGLSEQLTFSFLRSAGLMSETEGYIFACQDGVINTLEYRAKVLQMQLPDTLCRVCKQHPETLMHLLSACPVLARNAYVQRHNAALRVLYYHLRHTHGIDKTPVLPYLPGDIPQVVENDRCRIYWNVPFATTRKIDHNKPDIVLFDKTARDIYVIEFSAPAEYNITVKEEHKHEIYQDLLFEIGKLYPGYRVKLVVLIVGVLGGMKQTFVSALAKIPTCSPQVEFLASRMQKAVILGSLRLLRQRNLACCAY

SEQ ID NO: 9078 - protein, 1109 aa, Cotesia glomerata
MNDDDPGALRTYFKWTEELRVDLLVCYQRSKPGVSGYMARMHTLWSDMHPELEHFTPKHLRNYAAYLRRNRRSLVPDRRQSNRLSFPAQLHQERRRSSLDDNNPFIGRQVSISKKITYSQQQLEAVNEDLRANILEDSTLLTVSQVVYGAAVSAFPRERHCLSIEARLRQRISQLGLKIDRSRKQVSRIQCVVEFETTQRAYTPRIRHIAAELRWRHHTLNKSTLLVIKEESLNKLRALVTAKKSLEKRLKRLVDNSLFRSSPSRFLTPKTDVTGNYPTPERVEAFWTELYGDQPNVNANTPALHDFKAFCREHRRQNADEESPAVSVNEVRSALNGSKNWAAPGPDGINVFWWKKFTSTHLHLARIFTSYIRADEPIPDWLVEGRTVLIPKKGDLSDPKNYRPITYLNAVYKIFTKILNNRILQEIEPVWQQIYEQRGSKRGLSGCKENLIVDRCVTQDAIYYQRNLSMAWIDYRKAFDSTSHELILYLLKCLGVNPEIVECIRRTMQLWRTRFHIGSGNALHITGVVEYKRGVFQGDSLTPLLFCISLLPISVALRKTRGYSVGPPGDRKYSITHLLYMDDLKLYSADEDHLQAALNIVAEYTRDVGMSFGLDKCAVVHLARGKCSVTGDDVELVDGSVLRQLDAGELYRYLGMEEHRMHAVSEVQATLRSEYVRRFRKIWSSELSGKNKVSATNMLAVPVLLYSFGVLKWARKDLRDLDIKTRKTINMNRSMHPNSSVAKLYLSRSIGGRGLQSLERLHDRLVLGLTHEVVNFTADEDDFLMQIVHKHENAHKGSFLYKAAIYAARTLGLGEINALMELRKEEFKSAIRNAEEKLLLGKLMDKPMHSVFFKHVRDHGLSTQLTFSFLKSAGLMSETEGFIFACQDGVINTLEYRSRVLQVQLPDTTCRACKQHPETLMHILSACPVLARGAYIQRHNAALRVLYYYLRHRYGIDVTPVLPYLPGDIPQVVENDSCKIYWNMPFATTRRIDHNKPDIVLFDKATRDIYVIEFSAPAEYNISAKEEHKRQIYQDLLFEIGKLYPGYRVKLVVLIVGVLGGMKQSFVSSLARVPACSSKAEFLAVRMQKAVILGSLRLLRKMTLACCDH

SEQ ID NO: 9079 - protein, 1076 aa, Cotesia glomerata
MIGYIARMHTLWSDMHPELAHFTPKHLRNYAAHLRRNRRSLVPDRRQSNRLSFPAQLHQERRRSSLDNNNPFIGRQVSISKKITYSQQQLDTVNEDLLTQIQEDSTLVAVNQVVYGAAVSAFPRERHRLSIEARLRQRIAQLGDKIDRSRKHVSRIQCVIEFETTQRAYTPRVRRIAAELRWRHHTLNKSTLLVVKEESLNKLRALVTAKKSLEKRLKRLVDNSLFRSSPSRFLTPKIVVTGNYPAPERVEAFWTELYGDQPNVNANTPALHDFKAFCRKHRRQNADEESPAVSVNEVRLALDGSRNWAAPGPDGINVFWWKKFTSTHLHLARIFTSYIRADEPIPDWLVEGRTVLIPKKGDLSDPKNYRPITCLNAVYKIFTKILNNRILQEIGPIWQQIYEQRGNKRGLSGCNENLIVYRCVIQDAIYYQRNLSMAWIDYRKAFDSTPHELILYLLKCLGANPETVECIRRTMQLWRTRFHIGNGNALHVTGVVEYKRGVFQGDSLSPLLFCISLLPISVALRKTHGYSVGPPGDRKYSITHLLYIDDLKLYSANEDHLQAALNIVAEYTRDVGMSFGLDKCAVIHLAGGKCSDTGDDVELVDGSILRQLGAGELYRYLGMEEHRMHAVSEVRASLRSEYVRRLRKIWSSELSGKNKVSATNMLAVPVLLYSFGVLKWARKDLRDLDIKTRKVINMNRSMHPNSSVARLYLSRSIGGRGLQSLERLHDRLVLGLTFEVVNFTADEDDFLMQIVHKHENAHKGSFLYKAAIYAARTLGLGEINALMELRKEEFKSAIRNAEEKLLLGKLMDKSMHSVFFKHVRDHGLSTQLTFSFLKSAGLMSETEGFIFACQDGVINTLEYRSRVLQVQLPDTTCRACKQHPETLMHILSACPVLARGAYIQRHNAALRVLYYYLRHRYGIDVTPVLPYLPGDIPQVVENDSCKIYWNMPFATTRRIDHNKPDIVLFDKATRDIYVIEFSAPAEHNISAKEEHKRKIYQDLLFEIGKLYPGYRVKLVVLIVGVLGGMKQSFVSSLAKVPACTSKSEFLAVRMQKAVILGSLRLLREMTLACCGR

SEQ ID NO: 9080 - protein, 640 aa, Cotesia typhae
MAWIDYRKAFDSTSHELILYLLKCLGINRQTVGCIQRTMQLWRTRFHIGSGNALHVTGTVQYKRGVFQGDSLSPLLFCISLLPISVALRRTRGYSAGPPSDRVYTITHQLFMDDLKIYSANKDHLQTALNIVAEYTRDVGMSFGLDKCAVVHLAKGKCSDTGGDVELVDGSVLRELDAGELYRYLGIEERQMHAVSEVRTTLRSEYVRRLRKIWSSELSGKNKVSATNMLAVPVLLYSFGTLKWPRNELKGLDIKTRKVINMNQSMHPNSSVARMYLSRNIGGRGLQSLERLHDRLVLGLTYEVANFTADEDDFLMQFVHSHENARKGSFLYKAAIYAANTLGLGEINALIELPKKEFKSVVRIAEEKKLLGEHMDKSMHSVYFKHVRDHGLSTQLTFSFLKSAGLMSETEGFIFACQDGVINTLEYHSKVLQAQLPDTSCRTCKQHPETLMHLLSACPVLARGAYIQRHNAALRVLYYHLRYSYGIDETPVLPYLPGDIPQVVENDSSKIYWNIPFATTRRIDHNKPDIVLFDKATRDIYVIEFSAPAEYNISAKEEHKHQIYQDLLFEIGKLYPSYRVKLVVLVVGVLGGMKQSFVSSLAKIPACSSAAVSLAVWMQKAVILGSLRLLRQMNLACCTH

SEQ ID NO: 9081 - protein, 1086 aa, Microplitis demolitor
MCYNNSEPERRGYMARMHALWSNMHPNYSHLSQQHLRDYASHLRRTRRSLLMNRRLSHRLSFPAQLHQERRRSSEDADNDFERRQVCISKKIHYPKQLLDTVNQELSARIQEDSILLTINQAVYDAASSLLSPARRNISTPEAKMRGRIGQLSLKIDDLRKHVSRIQCVIEYVNARKAFTSKVRRIAAGLRYQHHTLNKENLLNIKEGSLNRLRALVTAKKSLEKKLKRLTDNSLFRLSPSRFLTPKTSVSGDSPSIEQVEAFWSELYGDQPNVNRDTPALNDFEAFCRQHRNDNADEESPEVSVEEVRSALNNGKNWAAPGPDGINLFWWKKLTSTHSHLARIFTAFIRGNEPIPCWLVEGRTVLIPKKGDLSDPKNYRPITCLNAVYKIFTKILNNRILQEIDPVWQQIYEQRGSKRGLSGCKENLLVDRCVIQDAICYQRNLSMAWIDYRKAFDSTSHELILFLLKCLGVNRDTVGCIRRTMQLWRTRFHISCGNDKRVTEAVQYKRGVFQGDSLSPLLFCISLLPISVALRRTRGYSVGPSNDRKYSITHLLYMDDLKVYASDEEHLQTALNIVGEYTRDVGMAFGLDKCAVVNLVKGKCSDVREDIELVDGSVIDHLDAGESYKYLGIDGSPMQDASKIKTTLCSEYVRRLRKIWSSELSGKNKVSATNMLAVPVLLYSFGVLKWARKELRDLDIKTRKVMNMNRSMHPKSSITRLYLSRHIGGRGLQSLECLHDRLVLGITYEVVNFTADENDFLMQIVHSHENRHKGTFLYKAAIYAAKSLGLGRVNPLIELPKEEFKRVISNAEQQKLLSTHMDKSMHSVFFKHVREHGLSEQLTFSFLRSAGLMSETEGYIFACQDGVINTLEYRAKVLQMQLPDTLCRVCKQHPETLMHLLSACPVLARNAYVQRHNAALRVLYYHLRHTHGIDKTPVLPYLPGDIPQVVENDRCRIYWNVPFATTRKIDHNKPDIVLFDKTARDIYVIEFSAPAEYNITVKEEHKHEIYQDLLFEIGKLYPGYRVKLVVLIVGVLGGMKQTFVSALAKIPTCFPQVEFLASRMQKAVILGSLHLLRQRNLACCLC

SEQ ID NO: 9082 - protein, 1109 aa, Cotesia glomerata
MHDDDPGALRTYFKWKEELRVDLLVCYQRSEPRVSGYMARMHTLWSDMHPELEHFTPKHLRNYAAYLRRNRRSLVPDRKQSNRLSFPAQLHQERRRSSLDDNNPFIGRQVSISKKITYSQQQLEAVNEDLRANILEDSTLLTVSQVVYGAAVSAFPRERHCLSIEARLRQRISQLGLKIDRSRKQVSRIQCVIEFETTQRAYTPRIRRIAAELRWRHHTLNKSTLLVIKEESLNKLRALVTAKKSLEKRLKRLVDNSLFRSSPSRFLTPKTDVTGNYPTPERVEAFWTELYGDQPNVNANTPALDDFKAFCQEHRRQNADEESPAVSVNEVRSALNGSKNWAAPGPDGINVFWWKKFTSTHLHLARIFISYIRADEPIPDWLVEGRTVLIPKKGDLSDPKNYRPITCLNAVYKIFTKILNNRILQEIEPVWQQIYEQRGSKRGLSGCKENLIVDRCVTQDAIYYQRNLSMAWIDYRKAFDSNSHELILYLLKCLGVNPEIVECIRRTMQLWRTRFHSGSGNALYITGVVEYKRGVFQGDSLSPLLFCISLLPISVALRKTRGYSVGPPGDRKYSITHLLYMDDLKLYSADEDHLQAALNIVAEYTRDVGMSFGLDKCAVVHLARGKCSVTGDDVELVDGSVLRQLDAGELYSYLGMEEHRMHAVSEVQATLRSEYVRRLRKIWSFELSGKNKVSATNTLAVPVLLYSFGVLKWARKDLRDLDIKTRKVINMNRSMHPNSSVARLYLSRSIGGRGLQSLERLHDRLVLGLTFEVVNFTADEDDFLMQIVHKHENAHKGSFLYKAAIYAARTLGLGEINALMELRKEEFKSVIRNAEEKQLLGELMDKSMHSVYFKHVRDHGLSDQLTFSFSKSAGLMSETEGFIFACQDGVINTLEYRSKVLQVQLLDTSCRMCKQHPETLIHLLSACPVLARCAYIQRHNAALRVLYYYLRHYYGIDMTPVLPYLPGDIPQVVENDSCKIYWNMPFATTRRIDHNKPDIVLFDKATRDICVIEFSAPAEHNISAKEEHKRKIYQDLLFEIGKLYPGYRVKLVVLIVGVLGGMKQSFVSSLAKVSACTSKSEFLAVRMQKAVILGSLRLLREMTLACCGR

SEQ ID NO: 9083 - protein, 1076 aa, Cotesia glomerata
MIGYIARMHTLWSDMHPELAHFTPKHLRNYAAHLRRNRRSLVPDRRQSNRLSFPAQLHQERRRSSLDNNNPFIGRQVSISKKITYSQQQLDKVNEDLLTQIQEDSTLLAVNQVVYGAAVSAFPRERHRLSIEARLRQRIAQLGDKIDRSRKHVSRIQCVIEFETTQRAYTPRVRRIAAELRWRHHTLNKSTLLVIKEESLNKLRALVTAKKSLEKRLKRLVDNSLFQSSPSRFLTPKTVVTGNYPAPERVEAFWTELYGDQPNVNANTPALHDFKAFCRKHRRQNADEESPAVSVNEVRLALDGSRNWAAPGPDGINVFWWKKFTSTHLHLARIFTSYIRADEPIPDWLVEGRTVLIPKKGDLSDPKNYRPITCLNAVYKIFTKILNNRILQEIGPIWQQIYEQRGNKRGLSGCKENLIVDRCVIQDAIYYQRNLSMAWIDYRKAFDSTPHELILYLLKCLGVNPETVECIRRTMQLWRTRFHIGNGNALHVTGVVEYKRGVFQGDSLSPLLFCISLLPISVALRKTHGYSVGPPGDRKYSITHLLYIDDLKLYSANEDHLQAALNIVAEYTRDVGMSFGLDKCAVIHLARGKCSDTSDDVELVDGSILRQLGAGELYRYLEMEEHRMHAVSEVRATLRSEYVRRLRKIWSSELSGKNKVSATNMLAVPVLLYSFGVLKWARKDLRYLDIKTRKVINMNRSMHPNSSVARLYLSRSIGGRGLQSLERLHDRLVLGLTFEVVNFTEDEDDFLMQIVHKHENAHKGSFLYKAAIYAARTLGLGEINALMELRKEEFKSVIRNAEEKQLLGELMDKSMHSVYFKHVRDHGLSTQLTFSFLKSAGLMSETEGFIFACQDGVINTLEYRSKVLQVQLLDTSCRMCKQHPETLIHLLSACPVLARGAYIQRHNAALRVLYYYLRHYYGIDMTPVLPYLPGDIPQVVKNDSCKTYWNMPFATTRRIDHNKPDIVLFDKATRDIYVIEFSAPAEHNISAKEEHKRKIYQDLLFEIGKLYPGYRVKLVVLIVGVLGGMKQSFVSSLAKVPACTSKSEFLAVRMQKAVILGSLRLLREMTLACCGR

SEQ ID NO: 9084 - protein, 640 aa, Cotesia typhae
MAWIDYRKAFDSTPHELILYLLKCLGVNPEIVECIRRTMQLWRTRFHIGSGNALHVTGVVEYKRGVFQGDSLSPLLFCISLLPISVALRKTHGYSVGPPGDRNYSITHLLYMDDLKLYSADKDHLQAALNIVAEYTRDVGMSFGLDKCAVVHLARGKCSDTGNDVELVDGSVLSQLDAGKLYRYLEMEEHRMHAVSEVRITLQSEYVRRLRKIWSSELSGKNKVSATNMLAVPVLLYSFGVLKWTRKDLRDLDIKTRKIINMNRSMHPNSSVARLYLSRSIGGRGLQSLERLHDRLVLGLTHEVINFTADEDDFLMQIVHKHENAHKGSFLYKAAIYAARTLGLGEINALMELRKEEFKSVIRNAEEKLLLGELMDKSMHSVFFKHVRDHGLSIQLTFSFLKSAGLMSETEGFIFACQDGVINTLEYRSKVLQVQLPDTSCRRCRQHPETLMHLLSACPVLARGAYIQRHNAALRVLYYYLRHCYGIDVTPVLPYLPGDIPQVVENDSCKIYWNMPFATTRRIDHNKPDIVLFDKATRDIYVIEFSAPAEYNISAKEEHKRQIYQDLLFEIGKLYPGYRVKLVVLIVGVLGGMKQSFVSSLAKVPACSSKAEFLAARIQKAVLLGSLRLLREMTLACCDH

SEQ ID NO: 9085 - protein, 1086 aa, Microplitis demolitor
MCYNNSEPERRGYMARMHALWSNMHPNYSHLSQQHLRDYASHLRRTRRSLLMNRRLSHRLSFPAQLHQERRRSSEDADNDFERRQVCISKKIHYPKQLLDTVNQELSARIQEDSILLTINQAVYDAASSLLPPARRNISSPEAKMRGRIGQLSLKIDDLRKHVSRIQCVIEYVNARKAFTSKVRRIAAGLRYQHHTLNKENLLNIKEGSLNRLRALVTAKKSLEKKLKRLTDNSLFRLSPSRFLTPKTSVSGDSPSIEQVEAFWSELYGDQPNVNRDTPALNDFEAFCRQHRNDNADEESPEVSVEEVRSALNNGKNWAAPGPDGINLFWWKKLTSTHSHLARIFTAFIRGNEPIPCWLVEGRTVLIPKKGDLSDPKNYRPITCLNAVYKIFTKILNNRILQEIDPVWQQIYEQRGSKRGLSGCKENLLVDRCVIQDAICYQRNLSMAWIDYRKAFDSTSHELILFLLKCLGVNRDTVGCIRRTMQLWRTRFHISCGNDKRVTEAVQYKRGVFQGDSLSPLLFCISLLPISVALRRTRGYSVGPSNDRKYSITHLLYMDDLKVYASDEEHLQTALNIVGEYTRDVGMAFGLDKCAVVNLVKGKCSDVREDIELVDGSVIDHLDAGESYKYLGIDGSPMQDASKIKTTLCSEYVRRLRKIWSSELSGKNKVSATNMLAVPVLLYSFGVLKWARKELRDLDIKTRKVMNMNRSMHPKSSITRLYLSRHIGGRGLQSLECLHDRLVLGITYEVVNFTADENDFLMQIVHSHENRHKGTFLYKAAIYAAKSLGLGRVNPLIELPKEEFKRVISNAEQQKLLSTHMDKSMHSVFFKHVREHGLSEQLTFSFLRSAGLMSETEGYIFACQDGVINTLEYRAKVLQMQLPDTLCRVCKQHPETLMHLLSACPVLARNAYVQRHNAALRVLYYHLRHTHGIDKTPVLPYLPGDIPQVVENDRCRIYWNVPFATTRKIDHNKPDIVLFDKTARDIYVIEFSAPAEYNITVKEEHKHEIYQDLLFEIGKLYPGYRVKLVVLIVGVLGGMKQTFVSALAKIPTCSPQVEFLASRMQKAVILGSLRLLRQRNLACCAC

SEQ ID NO: 9086 - protein, 1056 aa, Cotesia vestalis
MARMHTLWSEIHPELAHFTPKHLRNYAAHLRRNRRSLVPDRRQSNRLSFPAQLHQERRRSSLDNNNPFVGRQVSISKKITYSKQQLDAVNEDLRANILEDSTLLTVNQVVYGAAVSAFQKDRHCLSIEARLRQRISQLGFKIDRSRKQVSRIQCVIEFETTQRAYTPRIRRIAAELRWRHHTLNKSTLLVIKEESLNKLRALATAKKSLEKKLKRLVDNSLFRSTPSRFLTPKTNVTGNYPTPERMEAFWTNLYGDQPNVNANTPALHDFKAFCREHRRQNADEESPAVSVNEVRSALNGSKNWAAPGPDGINVFWWKKLTSTHLHLARIFTSYIKADEPIPYWLVEGRTVLIPKKGDLSDPKNYRPITCLNAVYKIFTKILNNRILQEIEPVWQQIYEQRDSKKGLSGCKENLIVDRCVLQDAIYYQRNLSMAWIDYRKAFDSTPHELILYLLKCLGVNPEIVECIRRTMQLWRTRFHIGSGNALHVTGVVEYKRGVFQGDSLSPLLFCVSLLPISVALRKTRGYSVGPPGNRKYSITHLLYMDDLKLCSADEDRLQAALNIIAEYTRDVGMSFGLDKCAVVHLARGKCSDTGDDVELVDGSVLRQLDTGELYRYLGMEEHRMHAVSEVRATLQSEYVRRLRKIWSSELSGKNKVSATNILAVPVLLYSFGVLKWARKDLRDLDIKTRKIINMNRSMHPNSSVARLYLSRSIGGRGLQSLERFHNRLVLGLTHEVVNFTADEDDFLMQIVHKHENAHRGSFLYKAAIYAARTLSLGEINALMELQKEEFKSVIRNAEEKLLLGELMDKSMHSVFFKHVRDHGLSTQLTFSFLKSAGLMSETEGFIFACQDGVINTLEYRSKVLQVQLPDTSCRRCKQHPETLMHLLSACPVLARGAYIHRHNAALRVLYYYLRHCYGIDVTPVLPYLPGDIPQVVENDSCKIYWNMPFATTRRIDHNKPDIVLFDKATRDIYVIKFSAPAEYNISAKEEHKREIYQDLLFEIGKLYPGYRVKLVVLIVGVLGGMKQSFVSSLAKVPACSSKAKFLAVRMQKAVIL

SEQ ID NO: 9087 - protein, 1109 aa, Cotesia glomerata
MNDDDPGALRTYFKWTEELRVDLLVCYQRSEPGVSGYMARMHTLWSDMHPELEHFTPKHLRNYAAYLRRNRRSLVPDRRQSNRLSFPAQLHQERRRSSLDDNNPFIGRQVSISKKITYSQQQLEAVNEDLRANILEDSTLLTVSQVVYGAAVSAFPRERHCLSIEARLRQRISQLGLKIDRSRKQVSRIQCVIEFETTQRAYTPRIRRIAAELRWRHHTLNKSTLLVIKEESLNKLRALVTAKKSLEKRLKRLVDNSLFRSSPSRFLTPKTDVTGNYPTPERVEAFWTELYGDQPNVNANTPALDDFKAFCREHRRQNADVESPAVSVNGVRSALNDSKNWAAPGPDGINVFWWKKFTSTYLHLARIFTSYIRADEPIPDWLVEGRTVLIPKKGDLSDPKNYRPITCLNSVYKIFTKILNNRILQEIEPVWQQIYEQRGSKRGLSGCKENLIVDRCVTQDAIYYQRNLSMAWIDYRKAFDSTSHELILYLLKCLGVNPEIVECIRRTMQLLRTRFHIGSGNALHITGVVEYKRGVFQGDFLSPLLFRISLLPISVALRKTRGYSVGPPGDQKYSITHLLYMDDLKLYSADEDHLQAALNIVAEYTRDVGMSFGLDKCAVVHLARGKCSVTGDDVELVDGSVLRQLDAGELYRYLGMEEHRMHAVSEVQATLRSEYVRRLRKIWSSELSGKNKVSATNTLAVPVLLYSFGILKWARKDLRDLDIRTRKTINMNRSMHPNSSVARLYLSRSIGGRGLQSLERLHDRLVLGLTHEVVNFTADEDDFLMQIVHKHENAHKGSFLYKAAIYAARTLGLGEINALMELRKEEFKSVIRNAEEKLLLGKLMDKSMHSVFFKHVRDHGLSTQLTFSFLKSAGLMSETEGFIFACQDGVINTLEYCSKVLQVQLPDTTCRACKLHPETLMHILSACPVLPRGAYIQRHNAALRVLYYYLRHCYGIDVTPVLPYLPGDIPQVVENDSCKIYWNMPFATTRRIDHNKPDIVLFDKATRDIYVIEFSAPAEYNISAKEEHKRQIYQDLLFEIGKLYPGYRVELVVLIVGVLGGMKQSFVSSLARVPACSSKAEFLAVRMQKAVILGSLRLLRKMTLACCDH

SEQ ID NO: 9088 - protein, 1076 aa, Cotesia glomerata
MIGYIARMHTLWSDMHPELAHFTPKHLRNYAAHLRRNRRSLVPDRRQSNRLSFPAQLHQERRRSSLDNNNPFIGRQVSISKKITYSQQQLDKVNEDLLTQIQEDSTLLAVNQVVYGAAVSAFPRERHRLSIEARLRQRITQLGDKIDRSRKHVFRIQCVIEFETTQRAYTPRVRRIAAELRWRHHTLNESTLPVIKEESLNKLRALVTAKKSLEKRLKRLVNNSLFRSSPSRFLTPKTVVTGNYPAPERVEAFWTELYGDQPNVNANTPALHDFKAFCRKHRRENADEESPAVSVNEVRLALDGSRNWAAPGPDGINVFWWKKFTSTHLHLARIFTSYIRADEPIPDWLVEGRTVLIPKKGDLSDPKNYRPITCLNAVYKIFTKILNNRILQEIGPIWQQIYEQRGNKKGLSGCKENLIVDRCVIQDAIYYQRNLSMAWIDYRKAFDSTPHELILYLLKCLGVNPETVECIRRTMQLWRTRFHIGNGNALHVTGVVEYKRGVFQGDSLSPLLFCISLLPISVALRKTHGYSVGPPGDRKYSITHLLYIDDLKLYSANEDHLQAALNIVAEYTRDVGMSFGLDKCAVIHLARGKCSDTGDDVELVDGSILRQLGAGELYRYLGMEEHRMHAVSEVRATLRSEYVRRLRKIWSSELSGKNKVSATNMLAVPVLLYSFGVLKWARKDLRDLDIKTRKVINMNRSMHPNSSVARLYLSRSIGGRGLQSLERLHDRLVLGLTFEVVNFTADEDDFLMQIVHKHENAHKGSFLYKAAIYAARTLGLGEINALMELRKEEFKSVIRNAEEKQLLGELMDKSMHSVYFKHVRDHGLSTQLTFSFLKSAGLMSETKGFIFACQDGVINTLEHRSKVLQVQLLDTSCRMCKQHPETLMHILSACPVLARGAYIQRHNAALRVLYYYLRHRYGIDVTPVLPYLPGDIPQVVENDSCKIYWNMPFATTRRIDHNKPDIVLFDKATRDIYVIEFSAPAEHNISAKEEHKRKIYQDLLFEIGKLYPGYRVKLVVLIVGVLGGMKQSFVSSLAKVPACTSKSEFLAVRMQKAVILGSLRLLREMTLACCGR

SEQ ID NO: 9089 - protein, 914 aa, Cotesia typhae
MLVLKDRTRQSRRLAAELRRRHHTLNKSTLFVIKEESLNRLRALVASKKSLEKRLKRLIDNSLFRSNPSRFLSPKTAVPENYPSSERVEAFWSELYGDQPNVNPDTPALHDFEAFCREHRRQDIAEESPAVSVQEVRKAQNGSKNWAAPGPDGINIFWWKKFSSTHAHLARIFTSYIQGDEPIPDWLVEGRTVLIPKKGDLSDPKNYRPITCLNAVYKIFTKILNNRILREIEPVWQQIYEQRGSKQGVSGCKINLLVDRCVIQDAIYYQRNLSMAWIDYRKAFDSTSHELILYLLKCLGINRQTVGCIQRTMQLWRTRFHIGSGNALHVTGTVQYKRGVFQGDSLSPLLFCISLLPISVALRQTRGYSAGPPSDRVYTITHQLFMDDLKIYSANKDHLQTALNIVAEYTRDVGMSFGLDKCAVVHLAKGKCSDTGGDVELVDGSVLRELDAGELYRYLGIEERQMHAVSEVRTTLRSEYVRRLRKIWSSELSGKNKVSATNMLAVPVLLYSFGTLKWPRNELKGLDIKTRKVINMNQSMHPNSSVARMYLSRNIGGRGLQSLERLHDRLVLGLIYEVANFTADEDDFLMQFVHSHENARKGSFLYNAAIYAANTLGLGEINALIELPKKEFKSVVRIAEEKKLLGEHMDKSMHGVYFKHVRDHGLSTQLTFSFLKSAGLMSETEGFIFACQDGVINTLEYRSKVLQAQLPDTSCRTCKQHPETLMHLLSACPVLARGAYIQRHNAALRVLYYHLRYSYGIDETPVLPYLPGDIPQVVENDSSKIYWNIPFATTRRIDHNKPDIVLFDKATRDIYVIEFSAPAEYNISAKKEHKHQIYQDLLFEIGKLYPSYRVKLVVLVVGVLGGMKQSFVSSLAKIPACSSAAVSLAVRMQKAVILGSLRLLRQMNLACCTH

SEQ ID NO: 9090 - protein, 1099 aa, Cotesia typhae
MTYDDPGAYRIKFKWTEELRADLLVCWQNSEPEVSGYMARMHTLWCGMHPEHRHFTPKHLRNYVSYLRHNRRSLLPNRRLSNRPSFPAPLHQERHRSSEDNDNLFTGRQVSISKKMSHSKQQLDTVNEDLPTQLQEDSTLLTVNQVVYGAAASLLPIERRHSLSFKAKLKLRIAQLGHKIDISRKQVSRIQCVIEYVSTQRPYTPKVRRLAAELRRRHHTLHKTTLLVIKEESLNRLRALVASKKSLEKRLKRLIDNSLFRSNPSRFLSPKTAVPENYPSSERVEAFWSELYGDQPNVNPDTPALHDFEAFCREHRRQDIAEESPAVSVEEVRKALNGSKNWAAPGPDGINIFWWKKFSSTHAHLARIFTSYIQGDEPIPDWLVEGRTVLIPKKGDLSDPKNYRPITCLNAVYKIFTKILNNRILQVIEPVWQQIYEQRGSKQGVSGCKINLLVDRCVIQDAIYYQRNLSMAWIDYRKAFDSTSHELILYLLRCLGINRQTVGCIQRTMQLWRTRFHIGSGNALHVTGAVQYKRGVFQGDSLSPRLFCISLLPISVALRQTRGYSAGPPSDRVYSISHQLFTDDLKIYSANKDHLQTALNIVTEYTRDVGMSFGLEKCAVVHLAKGKCSDTGGDVELVDGSVLRELDAGELYRYLGIEERRMHAVSEVRTTLRSEYVRRLRKIWPSELSGKNKVSATNMLAVPVLLYSFGVLKWARKDLRDLDIKTRKIINMNRSMHPNSSVARLYLSRSIGGRGLQSLERLHDRLVLGLTHEVVNFTADEDDFLMQIVHKHENAHKGSFLYKAAIYAARTLGLGEINALMELRKEEFKSVIRIAEEKLLLGELMDKSMHSVFFKHVRDHGLSIQLTFSFLKSAGLMSETEGFIFACQDGVINTHEYRSKVLQVQLPDTSCRRCRQHPETLMHLLSACPVLARGAYIQRHNAALRVLYYYLRHCYGIDVTPVLPYLPGDIPQVVENDSCKIYWNMPFARTRRIDHNKPDIVHFAKATRDIYVIEFSAPAEYNISAKEEHKRQIYQDLLFEIGKLYPGYRVKLVVLIVGVLGGMKQFLYPHLPKFQLAHQKLSSWQLGCRRLFYLVLSVS

SEQ ID NO: 9091 - protein, 640 aa, Cotesia glomerata
MAWIDYRKAFDSTSHELILYLLKCLGVNPEIVECIRRTMQLWRTRFHIGSGNALHITGVVEYKRGVFQGDSLSPLLFCISLLPISVALRKTRGYSVGPAGDRKYSITHLLCMDDLELYSADEDHLQAALNIVAEYTRDAGMSFGLDKCAVVHLARGKCSVTGDDVELVDGSVLRQLDTGELYRYLGMEEHRMHAVSEVQATLRSEYVRRLRKIWSSELSGKNKVSATNTLAVPVLLYSFGVLKWARKDLRDLDIRTRKTINMNRSMHPNSSVARLYLSRSIGGRGLQSLERLHDRLVLGLTHEVVNFTADEDDFLMQIVHKHENAHKGSFLYKAAIYAARTLGLGEINALMELRKEEFKSAIRNAEEKLLLGKLMDKSMHSVFFKHVRDHGLSTQLTFSFLKSAGLMSETEGFIFNCQDGVINTLEYRSKVLQVQLPDTTCRACKQHPETLMHILSACPVLARGAYIQRHNAALRVLYYYLRHRYGIDVTPVLPYLPGDIPQVVENDSCKIYWNMPFATTRRIDHNKPDIVLFDKATRDIYVIEFSAPAEYNISAKEEHKRQIYQDLLFEIGKLYPGYRVKLVVLIVGVLGGMKQSFVSSLARVPACSSKAEFLAVRMQKAIILGSLRLLRKMTLACCDH

SEQ ID NO: 9092 - protein, 640 aa, Cotesia glomerata
MAWIDYRKAFDSTPHELILYLLKCLGVNPETVECIRRTMQLWRTRFHIGNGNALHVTGVVEYKRGVFQGDSLSPLLFCISLLPISVALRKTHGYSVGPPGDRKYSITHLLYIDDLKLYSANEDHLQAALNIVAEYTRDVGMSFGLDKCAVIHLARGKCSDTGDDVELVDGSILRQLGAGELYRYLGMEEHRMHAVSEVRATLRSEYVRRLRKIWSSELSGKNKVSATNMLAVPVLLYSFGVLKWARKDLRDLDIKTRKVINMNRSMHPNSSVARLYLSRSIGGRGLQSLERLHDRLVLGLTFEVVNFTADEDDFLMQIVHKHENAHKGSFLYKAAIYAARTLGLGEINALMELRKEKFKSVIRNAEEKQLLGELMDKSMHSVYFKHVRDHGLSTQLTFSFLKSAGLMSETEGFIFACQDGVINTLEYRSKVLQGQLLDTSCRMCKQHPETLMHLLSACPVLARGTYIQRHNVALRVLYYYLRHYYGIDMTPVLPYLPGDIPQVVENDSCKIYWNMPFATTRRIDHNKPDIVLFDKATRDIYVIEFSAPAEHNISAKEEHKRKIYQDLLFEIGKLYPGYRVKLVVLIVGVLGGMKQSFVSSLAKVPACTSKSEFLAVRMQKAVILGSLRLLREMTLACCGR

SEQ ID NO: 9093 - protein, 1086 aa, Microplitis demolitor
MCYNNSEPERRGYMARMHALWSNMHPNYSHLSQQHLRDYASHLRRTRRSLLMNRRLSHRLSFPAQLHQERRRSSEDADNDFERRQVCISKKIHYPKQLLDTVNQELSARIQEDSILLTINQAVYDAASSLLPPARRNISSPEAKMRGRIGQLSLKIDDLRKHVSRIQCVIEYVNARKAFTSKVRRIAAGLRYQHHTLNKENLLNIKEGSLNRLRALVTAKKSLEKKLKRLTDNSLFRLSPSRFLTPKTSVSGDSPSIEQVEAFWSELYGDQPNVNRDTPALNDFEAFCRQHRNDNADEESPEVSVEEVRSALNNGKNWAAPGPDGINLFWWKKLTSTHSHLARIFTAFIRGNEPIPCWLVEGRTVLIPKKGDLSDPKNYRPITCLNAVYKIFTKILNNRILQEIDPVWQQIYEQRGSKRGLSGCKENLLVDRCVIQDAICYQRNLSMAWIDYRKAFDSTSHELILFLLKCLGVNRDTVGCIRRTMQLWRTRFHISCGNDKRVTEAVQYKRGVFQGDSLSPLLFCISLLPISVALRRTRGYSVGPSNDRKYSITHLLYMDDLKVYASDEEHLQTALNIVGEYTRDVGMAFGLDKCAVVNLVKGKCSDVREDIELVDGSVIDHLDAGESYKYLGIDGSPMQDASKIKTTLCSEYVRRLRKIWSSELSGKNKVSATNMLAVPVLLYSFGVLKWARKELRDLDIKTRKVMNMNRSMHPKSSITRLYLSRHIGGRGLQSLECLHDRLVLGITYEVVNFTADENDFLMQIVHSHENRHKGTFLYKAAIYAAKSLGLGRVNPLIELPKEEFKRVISNAEQQKLLSTHMDKSMHSVFFKHVREHGLSEQLTFSFLRSAGLMSETEGYIFACQDGVINTLEYRAKVLQMQLPDTLCRVCKQHPETLMHLLSACPVLARNAYVQRHNAALRVLYYHLRHTHGIDKTPVLPYLPGDIPQVVENDRCRIYWNVPFATTRKIDHNKPDIVLFDKTARDIYVIEFSAPAEYNITVKEEHKHEIYQDLLFEIGKLYPGYRVKLVVLIVGVLGGMKQTFVSALAKIPTCSPQVEFLASRMQKAVILGSLRLLRQRNLACCSC

SEQ ID NO: 9094 - protein, 632 aa, Cotesia vestalis
MAWIDYRKAFDSTPHELILYLLKCLGVHPEIVECIRRTMQLWRTRFHIGSGNALHVTGVVEYKRGVFQGDSLSPLLFCISLLPISVALRKTRGYSVGPPGDRKYSITHLLYMDDLKLYSAHEDHLQAALNIVAEYTRDVRMSFGLDKCAVVHLARGKCSDTGDDVELVDGSVLRQLDAGELYRYLGMEEHRMHAVSEVRATLQSEYVRRLRKIWSSELSGKNKVAATNMLAVPVLLYSFGVLKWARKDLRDLDIKTRKIININRSMHPNSSVDRLYLSRSIGGRGLQSLERLHDRLVLDLTHEAVNFTAEEDDFLMQIVHKHENAHKGSFLYKAAIYAARTLSLGEINALMELRKEEFKSVIRNAEEKLLLGELMDKSIHSVFFKHVRDHGLSTQLTFSFLKSAGLMSETEGFIFACKDGVINSLKYRSKVLQVQLPDTSCRRCKQHPETLMHLLSACPVLARGAYIHRHNAALRVLYYYLRHCYGIDVTPVLPYLPGDIPQVVENDSCKIYWNMPFATTRRIDHNKPDIVLFDKATRDIYVIEFSAPAEYNISANEEHKREIGKLYPGYRVKLVVLIVGILGGMKQSFVSSLAKVPVCSSKAEFLAVRMQKAVILGSLRLLREMTLAYCDH

SEQ ID NO: 9095 - protein, 1158 aa, Cotesia glomerata
MMIIIIIIIIIIIIIIIIIIIIIIIRSAPHNRSFSDEDHSSGGRSTPDPMNDDDPGALRTFFKWTEELRVDLLVCYQRSEPGVSGYMARMHTLWSDMHPELEHFTPKHLRNYAAYLRRNRRSLVPDRRQSNRLSFPAQLHQEQRRSSLDDNNPFIRRQVSISKKITYSQQQLEAVNEDLRANILEDSTLLTVSQVVYGAAVSAFPRERHCLSIEARLRQRISQLGLKIDRSRKQVSRIQCVIEFETTQRAYTPRIRRIAAELRWRHHTLNKSTLLVIKEESLNKLRALVTAKKSLEKRLKRLVDNSLFRSSPSRFLTPKTDVTGNYPTPERVEAFWTELYGDQPNVNANTPALHDFKAFCREHRRQNADEESPAVSVNEVRSALNGSKNWAAPGPDGINVFWWKKFTSTHLHLARIFTSYIRADEPIPDWLVEGRTVLIPKKGDLSDPKNYRPITCLNAVYKIFTKILNNRILHEIEPVWQQIYEQRGSKRGLSGCKENLIVDRCVTQDAIYYQRNLSMAWIDYRKAFDSTSHELILYLLKCLGVNPEIVECIRRTMQLWRTRFHIGSGNALHITGVVEYKRGVFQGDSLSPLLFCISLLPISVAHRKTRGYSVGPPGDRKYSITHLLYMDDLKLYSADEDHLQAALNIVAEYTRDVGMSFGLDKCAVVHLARGKCSVTDDDVELVDGSVLRQLDAGELYRYLGMEEHRMHAVSEVQATLRSEYVRRLRKIWSSELSGKNKVSATNTLAVPVLLYSFGVLKWARKDLRDLDIRTRKTINMNRSMHPNSSVARLYLSRSIGGRGLQSLERLHDRLVLGLTHEVVNFTADEDDFLMQIVHKHENAHKGSFLYKAAIYAARTLGLGEINALMELRKEEFKSAIRNAEEKLLLGELMDKSMHSVFFKHVRDHGLSTQLTFSFLKSAGLMSETEGFIFACQDGVINTLEYRSKVLQVQLLDTSCRMCKQHPETLMHLLSACPVLARGAYIQRHNAALRVLYYYLRHRYGIDVTPLLPYLPGDIPQVVENDSCKIYWNMPFATTRRIDHNKPDIVLVDKATCDIYVIEFSAPAEYNISAKEEHKRQIYQDLLFEIGKLYPGYRVKLVVLIVGVLGGMKQSFVSSLARVPACSSKAEFLAVRMQKAVILGSLRLLRKMTLACCDH

SEQ ID NO: 9096 - protein, 1076 aa, Cotesia glomerata
MIGYIARMHTLWSDMHPELAHFTPKHLRNYAAHLRRNRRSLVPDRRQSNRLSFPAQLHQERRRSSLDNNNPFIGRQVSISKKITYSQQQLDKVNEDLLTQIQEDSTLLAVNQVVYGAAVSAFPRERHRLSIEARLRQRIAQLGDKIDRSRKHVSRIQCVIEFETTQRAYTPRVRRIAAELRWRHHTLNKSTLLVIKEESLNKLRALVTAKKSLEKRLKRLVDNSLFRSSPSRFLTPKTVVTGNYPAPERVEAFWTELYGDQPNVNANTPALHDFKAFCRKHRRQNADEESPAVSENEVRLALDGSRNWAAPGPDGIKVFWWKKFTSTHLHLARIFTSYIRADEPIPDWLVEGRTVLIPKKGDLSDPKNYRPITCLNAVYKIFTKILNNRILQEIGPIWQQIYEQRGNRRGLSGCKENLIVDRCVIQDAIYYQRNLSMAWIDYRKAFDSTPHELILYLLKCLGVNPETVECIRRTMQLWRTRFHIGNGNALHVTGVVEYKRGVFQGDSLSPLLFCISLLPISVALRKTHGYSVGPPGDRKYSITHLLYIDDLKLYSANEDHLQAALNIVAEYTRDVGMSFGLDKCAVIHLARGKCSDTGDDVELVDGSILRQLGAGELYRYLGMEEHRMHAVSEVRATLRSEYVRRLRKIWSSELSGKNKVSATNMLAVPVLLYSFGVLKWARKNLRDLDIKTRKVINMNRSMHPNSSVARLYLSRSIGGRGLQSLERLHDRLVLGLTFEVVNFTADEDDFLMQIVHKHENAHKGSFLYKAAIYAARTLGLGEINALMELRKEEFKSVIRNAEEKQLLGELMDKSMHSVYFKHVRDHGLSTQLTFSFLKSAGLMSETEGFIFACQDGVINTLEYRSKVLQVQLLDTSCRMCKQHPETLMHLLSACPVLARGTYIQRHNAALRVLYYYLRHYFGIDMTPVLPYLPGDIPQVVENDSCKIYWNMPFATTRRIDHNKPDIVLFDKATRDIYVIEFSAPAEHNISAKEEHKRKIYQDLLFEIGKLYPGYRVKLVVLIVGVLGGMKQSFVSSLAKVPACTSKSEFLAVRIQKAVILGSLRLLREMTLACCGR

SEQ ID NO: 9097 - protein, 640 aa, Cotesia typhae
MAWIDYRKAFDSTSHELILYLLKCLGINRQTVGCIQRTMQLWRTRFHIGSGNALHVTGTVQYKRGVFQGDSLSPLLFCISLLPISVALRQTRGYSAGLPSDRVYSITHQLFMDDLKIYSANKDHLQTAINIVAEYTRDVGMSFGLDKCAVVHLAKGKCSDTGGDVELVDGSVLRELDAGELYRYLGIEERQMHAVSEVRTTLRSEYVRRLRKIWSSELSGKNKVSATNMLAVPVLLYSFGILKWPRNELKDLDNKTRKVINMNQSMHPNSSVARMYLSRNIGGRGLQSLERLHDRLVLGLTYEVANFTADEDDFLMQFVHSHENARKGSFLYKAAIYAANTLGLGEINALIELPKKEFKSVVRIAEEKKLLGEHMDKSMHSVYFKHIRDHGLSIQLTFSFLKSAGLMSETEGFIFACQDGVINTLEYRSKVLQVQLPDTSCRRCRQHPETLMHLLSACPVLARGAYIQRHNAALRVLYYYLRHCYGIDVTPVLPYLPGDIPQVVENDSCKIYWNMPFATTRRIDHNKPDIVLFDKATRDIYVIEFSTPAEYNISAKEEHKRQIYQDLLFEIGKLYPGYRVKLVVLIVGVLGGMKQSFVSSLAKVPACSSKAEFLAVRMQKAVLLGSLRLLREMTLACCDH

SEQ ID NO: 9098 - protein, 655 aa, Cotesia typhae
MAWIDYRKAFDSTSHELILYLLKCLGINRQTVGCIQRTMQLWRTRFHIGSGNALHVTGTVQYKRGVFQGDSLSPLLFCISLLPISVALRQTRGYSAGLPSDRVYSITHQLFMDDLKIYSANKDHLQTAINIVAEYTRDVGMSFGLDKCAVVHLAKGKCSDTGGDVELVDGSVLRELDAGELYRYLGIEERQMHAVSEVRTTLRSEYVRRLRKIWSSELSGKNKVSATNMLAVPVLLYSFGILKWPRNELKDLDIKTRKVINMNQSMHPNSSVARMYLSRNIGGRGLQSLERLHDRLVLGLTYEVANFTADEDDFLMQFVHSHENARKGSFLYKAAIYAANTLGLGEINALIELPKKEFKSVVRIAEEKKLLGEHMDKSMHSVYFKHVRYHGLSTQLTFSFLKSAGLMSETEGFIFACQDGVINTLEYRSKVLEAQLPDTSCRTCKQHPETLMHLLSACPVLARGAYIQRHNAALRVLYYHLRYSCGIDETPVLPYLPEDIPQVVENDSSKIYWNIPFATTRRIDHNKPDIVLFDKATRDIYVIEFSAPAEYNISAKEEHKHQIYQDLLFEIGKLYPGYRVKLVVLVVGVLGGMKQSFVSSLAKIPACSSATVSLAVRMQKAVILGSLRLNNIIIIIIIIIIIIIIIIFIIIIGIT

SEQ ID NO: 9099 - protein, 918 aa, Cotesia glomerata
MIEFETTQRAYTPRVRRIAAELRWRHHTLNKSTLLVIKEESLNKLRALVTAKKSLEKRLKRQVDNSLFRSSPSRFLTPKTVVTGNYPAPERVEAFWTELYGDQPNVNANTPALHDFKAFCRKHRRQNADEESPAVSVNEVRLALDGSRNWAAPGPDGINVFWWKKFTSTHLHLARIFTSYIRADEPIPDWLVEGRTVLIPKKGDLSDPKNYRPITCLNAVYKIFTKILNNRILQEIGPIWQQIYEQRGNKRGLSGCKENLIVDRCVIQDAIYYQRNLSMAWIDYRKAFDSTPHELILYLLKCLGVNPETVECIRRTMQLWRTRFHIGNGNALHVTGVVEYKRGVFQGDSLSPLLFCISLLPISVALRKTHGYSVGPPGDRKYSITHLLYIDDLKLYSANEDHLQAALNIVAEYTRDVGMSFGLDKCAVIHLARGKCSDTGDDVELVDGSILRQLGAGELYRYLGMEEHRMHAVSEVRATLRSEYVRRLRKIWSSELSGKNKVSATNMLAVPVLLYSFGVLKWTRKDLRDLDIKTRKVINMNRSMHPNSSVARLYLSRSIGGRGLQSLERLHDRLVLGLTFEVVNFTADEDDFLMQIVHKHENAHKGSFLYKAAIYAARTLGLGEINALMELRKEEFKSVIRNAEEKQLLGELMDKSMHSVYFKHVRDHGLSTQLTFSFLKSAGLMSETEGFIFACQDGVINTLEYRSKVLQVQLLDTSCRMCKQHPETLMHLLSACPVLARGTYIQRHNAALRVLYYYLRHYYGIDMTPMLPYLPGDIPQVVENDSCKIYWNMPFATTRRIDHNKPDIVLFDKATRDIYVIEFSAPAEHIISAKEEHKRKIYQDLLFEIGKLYPGYRVKLVVLIVGVLGGMKQSFVSSLAKVPACTSKSEFLAVRMQKAVILGSLRLLREMTLACCGR

SEQ ID NO: 9100 - protein, 1109 aa, Cotesia glomerata
MNDDDPGALRTYFKWTEELRVDLLVCYQRSEPGVSGYMARMHTLWSDMHPELEHFTPKHLRNYAAYLRRNRRSLVPDRRQSNRLSFPAQLHQERRRSSLDDNNPFIGRQVSISKKITYSQQQLEAVNEDLRANILEDSTLLTVSQVVYGAAVSAFPRERHCLSIEARLRQRISQLGLKIDRSRKQVSRIQCVIEFETTQRAYTPRIRRIAAELRWRHHTLNKSTLLVIKEESLNKLRALVTAKKSLEKRLKRLVDNSLFRSSPSRFLTSKTDVTGNYPTPERVEAFWTELYGDQPNVNANNPALHDFKAFCREHRRQNADEESPAVSVNEVRSALNGSKNWAAPGPDGINVFWWKKFTSTHLHLARIFTSYIRADEPIPDWLVEGRTVLIPKKGDLSDPKNYRPITCLNAVYKIFTKILNNRILQEIEPVWQQIYEQRGSKRGLSGCKENLIVDRCVIQDAIYYQRNLSMAWIDYRKAFDSTPHELILYLLKCLGVNPEIVECIRRTMQLWRTRFHIGSGNALHITGVVEYKRGVFQGDSLSPLLFCISLLPISVALRKTRGYSVGPPGDRKYSITHLLYMDDLKLYSADEDHLQAALNIVAEYTRDVGMSFGLDKCAVVHLARGKCSVTGDDVELVDGSVLRQLDAGELYRYLGMEEHRMHAVSEVQATLRSEYVRRLRKIWSSELSGKNKVSATNTLAVPVLLYSFGVLKWARKDLRDLDIKTRKTINMNRSMHPNSSVARLYLSRSIGGRGLQSLERLHDRLVLGLTHEVVNFTADEDDFLMQIVHKHENAHKGSFLYKAAIYAARTLGLGEINALMELRKEEFKSVIRNAEEKLLLGELMDKSMHSVFFKHVRDHGLSTQLTFSFLKSAGLMSETEGFIFACQDGVINTLEYRSKVLQVQLLDTSCRMCKQHPETLMHLLSACPVLARGAYIQRHNAALRVLYYYLRHYYGIDMTPVLPYLPGDIPQVVENDSCKIYWNMPFATTRRIDHNKPDIVLFDKATRDIYVIEFSAPAEYNISAKEEHKRQIYQDLLFEIGKLYPGYRVKLVVLIVGVLGGMKQSFVSSLARVPACSSKAEFLAVRMQKAVILGSLRLLRKMTLACCDH

SEQ ID NO: 9101 - protein, 1109 aa, Cotesia typhae
MNDDDPGALRTYFKWTEELRVDLLVCYQRSEPGVSGYMARMPTLWSDMHPELAHFTPKHLRNYAVHLRRNRRSLVPDRRQSNRLSFPAQLHQERRRSSLDNNNPFVERQVSISKKITYSLQQLDAVNEDLRAAILEDSTLLTVRQVVYGAAVSAFPRERHCLSIEARLRQRILQLGSKIDRSRKHVSRIQCVIEFETTQKAYTPRIRRIVAELRWRHHTLNKSTLLVIKEESLNKLRALVTAKKSLEKRLKRLVDNSLFRSSPSRFLTAKTDVTGTYPTPERVEAFWTELYGDQPNVNANTPALHDFKVFCREHRRQNADEESPAVSVDEVRSALNGSKNWAAPGPDGINVFWWKKFTSTHLHLACIFTSYIRADDPIPNWLVEGRTVLIPKKGDLSDPKNFRPITCLNAVYKIFTKILNNRILQQIEPVWQQIYEQRGSKRGLSVCKENLIVDRCVLQDAIYYQRNLSMAWIDYRKAFDSTPYELILYLLKCLGVNPEIVECIRRTMQLWRTRFHIGSGNALHVTGVVEYKRGVFQGDSLSPLLFCISLLPISVALRKTRGYSVGPPGDRKYSITHLLYIDDLKLYSADEDHLQAAFNIVAEYTRDVGMSFGLDKCAVVHLARGKCSDTGDDVELVDGSVLRQLDAGELYRYLGMEEHRMHAVSEVRTTLQSEYVRRLRKVWSSELSGKNKVSATNMLAVPVLLYSFGVLKWTRKDLRDLDIKTRKIINMNRSMHPNSSVARLYLSRSIGGRGLQSLERLHDRLVLGLTHEVVNFTADEDDFLMQIVHKHENAHKGSFLYKAAIYAARTLGLGEINALMELRKEEFKSVIRNAEENLLLGELMDKSMHSVFFKHVRDHGLSIQLTFSFLKSAGLMSETEGFIFACQDGVINTLEYRSKVLQVQLPDTSCRRCRQHPETLMHLLSACPMLARGAYIQRHNAALRVLYYYLRHCYGIDVTPVLPYLPGDIPQVVENDSCKIYWNMPFATTRRIDHNKPDIVLFDKATRDIYVIEFSAPAEYNISAKEEHKRQIYQDLLFEIGKLYPGYRVKLVVLIVGVLGGMKQSFVSSLAKVPACSSKAEFLTVRMQKAVLLGSLRLLREMTLACCDH

SEQ ID NO: 9102 - protein, 640 aa, Cotesia glomerata
MAWIDYRKAFDLTPHELILYLLKCLGVNPETVECIRRTMQLWQTRFHIGNGNALHVTGVVEYKRGVFQGDSLSPLLFCISLLPISVALRKTHGYSVGPPGDRKYSITHLLYMDDLKLYSANEDHLQAALNIVAEYTRDVGMSFGLDKCAVIHLARGKCSVTGDDVELVDGSVLRQLDAGELYRYLGMEEHRMHAVSEVQATLRSEYVRRLRKIWSSELSGKNKVSATNTLAVPVLLYSFGVLKWARKDLRDLDIRTRKTINMNRSMHPNSSVARLYLSRSMGGRGLLSLERLHDRLVLGLTHEVVNFTADEDDFLMQIVHKHENAHKGSFLYKAAIYAARTLGLGEINALMELRKEEFKSAIRNAEEKLLLGKLMDKSMHSVFFKHVRDHGLSTQLTFSFLKSAGLMSETEGFIFACQDGVINTLEYRSKVLQVQLLDTSCRMCKQHPETLMHLLSACPVLARGAYIQRHNAALRVLYYYLRHYYGIDMTPVLPYLPGDIPQVVENDSCKIYWNMPFATTRRIDHNKPDIVLFDKATRDIYVIEFSAPAEYNISAKEEHKRQIYQDLLFEIGKLYPGYRVKLVVLIVGVLGGMKQSFVSSLARVPACSSKAEFLAVRMQKAVILGSLRLLRKMTLACCDH

SEQ ID NO: 9103 - protein, 1109 aa, Cotesia glomerata
MNDDDPGALRTYFKWTEELRVDLLVCYQRSEPGVSGYMARMHTLWSDMHPELEHFTPKHLRNYAAYLRRNRRSLVPDRRQSNRLSFPAQLHQERRRSSLDDNNPFIGRQVSISKKITYSQQQLEAVNEDLRANILEDSTLLTVSQVVYGAAVSAFPRERHCLSIEARLRQRISQLGLKIDRSRKQVSRIQCVIEFETTQRAYTPRIRRIAAELRWRHHTLNKSTLLVIKEESLNKLRALVTAKKSLEKRLKRLVDNSLFRSSPSRFLTPKTDVTGNYPTPERVEAFWTELYGDQPNVNANTPALHDFKAFCREHRRQNADEESPAVSVNEVRSALNGSKNWAAPGPDGINVFWWKKFTSTHLHLARIFTSYIRADEPIPDWLVEGRTVLIPKKGDLSDPKNYRPITCLNAVYKIFTKILNNRILQEIEPVWQQIYEQRGSKRGLSGCKENLMVDRCVTQDAIYYQRNLSMAWIDYRKAFDSTSHELILYLLKCLGVNPEIVECIRRTMQLWRTRFHIGSGNALHITGVVEYKRGVFQGDSLSPLLFCISLLPISVALRKTRGYSVGPPGDRKYSITHLLYMDDLKLYSADEDHLQAALNIVAEYTRDVGMSFELDKCAVVHLARGKCSVTGDDVELVDGSVLRQLDAGELYRYLGMEEHRMHAVSEVQATLRSEYVRRLRKIWSSELSGKNKVSASNMLAVPVLLYSFGVLKWARKDLRDLDIKTRKVINMNRSMHPNSSVARLYLSRSIGGRGLQSLERLHDRLVLGLTHEVVNFTADEDDFLMQIVHKHENAHKGSFLYKAAIYAARTLGLGEINALMELRKEEFKSVIRNAEEKLLLGELMDKSMHSVFFKHVRDHGLSIQLTFSFLKSAGLMSETEGFIFACQDGVINTLEYRSKVLQVQLLDTSCRMCKQHPETLMHLLSACPVLARGAYIQRHNAALRVLYYYLRHYYGIDMTPVLPYLPGDIPQVVENDSCKIYWNMPFATTRRIDHNKPDIVLFDKATRDIYVIEFSAPAEYNISAKEEHKRQIYQDLLFEIGKLYPGYRVKLVVLIVGVLGGMKQSFVSSLARVPACSSKAEFLAVRMQKAVILGSLRLLRKMTLACCDH

SEQ ID NO: 9104 - protein, 1061 aa, Cotesia typhae
MTYDDPGAYRIKFKWTEELRADLLVCWQNSEPEVSGYMARMHTLWCGMHPEHRHFTPKHLRNYASYLRHNRRSLLPNRRLSNRPSFPAPLHQERHRYSEYNDNLFTGRQVSISKKLSHSKQQLDTVNEDLPTQLQEDSTLLTVNQVVYGAAASLLPIERRHSLSFETKLKLRIAQLGHKIDISRKQVSRIQCVIEYVSTQRPYTPKVRRLAAELRRRHHTLNKSTLLVIKEDSLNRLRALVASKKSLEKRLKRLIDNSLFRSNPSRFLSPKTAVPENYPSSERVEAFWSELYGDQPNVNPDTPALHDFEAFCREHRRQDIAEESPAVSVQEVRKALNGSKNWAAPGPDGINIFWWKKFSSTHAHLARIFTSYIQGDEPIPDWLVEGRTVLIPKKGDLSDPKNYRPITCLNAVYKIFTKILNNRILREIEPVWQQIYEQRGSKQGVSGCKINLLVDRCVIQDAIYYQRNLSMAWIDYRKAFDSTSHELILYLLKCLGINRQTVGCIQRTMQLWRTRLHIGSGNALHVTGTVQYKRGVFQGDSLSPLLFCISLLPISVALRQTRGYSAGPPSDRVYTITHQLFMDDLKIYNANKDHLQTALNIVAEYTRDVGMSFGLDKCAVVHLAKGKCSDTGGNVELVDGSVLRELDAGELYRYLGIEERQMHAVSEVRTTLRSEYVRRLRKIWSSELSGKNKVSATNMLAVPVLLYSFGTLKWPRNELKGLDIKTRKVINMNQSMHPNSSVARMYLSRNIGGRELQSLERLHDRLVLGLTYEVANFTADEDDFLMQFVHSHENARKGSFLYKAAIYAANTLGLGEINALIELPKKEFKSVVRIAEEKKLLGEHMDKSMHSVYFKHVRDHGLSTQLTFSFLKSAGLMSETKGFIFACQDGVINTLEYRSKVLQAQLPDTSCRTCKQHPETLMHLLSACPVLARGAYIQRHNAALRVLYYHLRYSYGIDETPVLPYLPGDIPQVVENDSSKIYWNMPFATTRGIDHNKPDIVLFDKATRDIYVIEFSAPAEYNISAKEEHKRQIYQDLLFEIGKLYPSADAKGCHFGIPAST

SEQ ID NO: 9105 - protein, 1109 aa, Cotesia glomerata
MNDDDPGALRTYFKWTEELRVDLLVCYQRSEPGVSGYMARMHTLWSDMHPELAHFTPKHLRNYAAYLRRNRRSLVPDRRQSNRLSFPAQLHQERRRSSLDDNNPLIGRQVSISKKITYSQQQLEAVNENLRANILEDSTLLTVSQVVYGAAVSAFPRERHCLSIEARLRQRISQLGLKIDRSRKQVSRIQCVIEFETTQRAYTPRIRRIAAELRWRHHTLNKSTLLVIKEESLNKLRALVTAKKSLEKRLKRLVDNSLFRSSPSRFLTPKTDVTGNYPTPERVEAFWTELYGDQPNVNANTPALHDFKAFCREHRRQNADEESPVVSVNEVRSALNGSKNWAAPGPDGINVFWWKKFTSTHLHLARIFTSYIRADEPIPDWLVEGRTVLIPKKGDLSDPKNYRPITCLNAVYKIFTKILNNRILQDIGPVWQQIYEQRGSKRGLSGCKENLIVDRCVTQDAIYYQRNLSMAWIDYRKAFDSTSHELILYLLKCLGVNPEIVECIRRTMQLWRTRFHIGSGNALHITGVVEYKRGVFQGDSLSPLLFCISLLPISVALRKTRGYSVGPPGDRKYSITHLLYMDDLKLYSADEDHLQAALNIVAEYTRDVGMSFGLDKCAVVHLARGKCSVTGDDVELVDGSVLRQLGAGELYRYLGMEEHRMHAVSEVQATLRSEYVRRLRKIWSSELSGKNKVSATNTLAVPVLLYSFGILKWARKDLRDLDIRTRKTINMNRSMHPNSSVARLYLSRSIGGRGLQSLERLHDRLVLGLTHEVVNFTADEDDFLMQIVHKHENAHKGSFLYKAAIYAARTLGLGEINALMELRKEEFKSAIRNAEEKLLLGKLMDKSMHSVFFKHVRDHGLSTQLTFSFLKSAGLMSETEGFIFACQDGVINTLEYRSKVLQVQLPDTTCRACKQHPETLMHILSACPVLARGAYIQRHNAALRVLYYYLRHYYGIDMTPVLPYLPGDIPQVVENDSCKIYWNMPFATTRRIDHNKPDIMLFDKATRDIYVIEFSAPAEYNISAKEEHKRQIYQDLLFEIGKLYPGYRVKLVVLIVGVLGAMKQSFVSSLARVPACSSKAEFLAVRMQKAVILGSLRLLRKMTLACCDH

SEQ ID NO: 9106 - protein, 1109 aa, Cotesia glomerata
MNDDDPGALRTFFKWTEKLRVDLLVCYQRSEPGVSGYMARMHILWSDMHPELEHFTPKHLRNYAAYLRRNRRSLVPDRRQSNRLSFPAQLHQERRRSSLDDNNPFIGRQVSISKKITYSQQQLEAVNEDLRASILEDSTLLTVSQVVYGAAVSAFPRERHCLSIEARLRQRISQLGLKIDRSRKQVSRIQCVIEFETTQRAYTPRIRRIAAELRWRHHTLNKSTLLVIKEESLNKLRALVTAKKSLEKRLKRLVDNSLFRSSPSRFLTPKTDVTGNYPTPERVEACWTELYGDQPNVNANTPALDDFKAFCREHRRQNADEESPAVSVNEVRSALNGSKNWAAPGPDGINVFWWKKFTSTHLHLARIFTSYIRADEPIPDWLVEGRTVLIPKKGDLSDPKNYRPITCLNAVYKIFTKILNNRILHEIEPVWQQIYEQRGSKRGLSGCKENLIVDRCVTQDAIYYQRNLSMAWIDYRKAFDSTSHELILYLLKCLGVNPEIVECIRRTMQLWRTRIYIGSGNALHITGVVEYKRGVFQGDSLSPLLFCISLLPISVALRKTRGYSVGPPGDRKYSITHLLYMDDLNLYSADEDHLQAALNIVAEYTRDVGMSFGLDKCAVVHLARGKCSVTGDDVELVDGSVLRQLDAGELYRYLGMEEHRMHAVSEVQATLRSEYVRRLRKIWSSELSGKNKFSATNTLAVPVLLYSFGVLKWARKDLRDLDIRTRKTINMNRSMHPNSSVARLYLSRSIGGRGLQSLERLHDRLVLGLTHEVVNFTADEDDFLMQIVHKHENAHKGSFLYKAAIYAARTLGLGEINDLMELRKEEFKSAIRNAEEKLLLGKLMDKSMHSVFFKHVRDHGLSTQLTFSFLKSAGLMSETEGFIFACQDGVINTLEYRSRVLHVQLPDTICRACKQHPETLMHILSACPVLARGAYIQRHNAALRVLYYYLRHRYGIDVTPVLPYLPGDIPQVVENDSCKIYWNMPFATTRRIDHNKPDIVLFDKATRDIYVIEFSAPAEYNISAKEEHKRQIYQDLLFEIGKLYPGYRVKLVVLIVGVIGGMKQSFVSSLARVPACSSKAEFLAVRMQKAVILGSLRLLRKMTLACCDH

SEQ ID NO: 9107 - protein, 640 aa, Cotesia typhae
MAWIDYRKAFDSTSHELILYLLKCLGINRQTVGCIQRTMQLWRTRFHIGSGNALHVTGTVQYKRGVFQGDSLSPLLFCISLLPISVALRQTRGYSAGLPSDRVYSITHQLFMDDLKIYSANKDHLQTAINIVAEYTRDVGMSFGLDKCAVVHLAKGKCSDTGGDVELVDGSVLRELDAGELYRYLGIEERQMHAVSEVRTTLRSEYVRRLRKIWSSELSGKNKVSATNMLAVPVLLYSFGTLKWPRNELKGLDIKTRKVINMNQSMHSNSSVARMYLSRNIGGRGLQSLERLHDLLVLGLTYEVANFTADEDDFLMQFVHSHENARKGSFLYKAAIYAANTLGLGEINALIELPTKEFKSVVRIAEEKKLLGEHMDKSMHSVYFKHVRDHGLSTQLTFSFLKSAGLMSETEGFIFACQDGVINTLEYRSKVLQAQLPDTSCRTCKQHPETLMHLLSACPVLARGAYIQRHNAALRVLYYHLRYSCGIDETPVLPYLPGDIPQVVENDSSKIYWNIPFATTRRIDHNKPDIVLFDKATRDIYVIEFSAPAEYNISAKEEHKHQIYQDLLFEIGKLYPGYRVKLVVLVVGVLGGMKQSFVSSVAKIPACSSAAVSLAVRMQKAVILGSLRLLRQMNLACCTH

SEQ ID NO: 9108 - protein, 942 aa, Microplitis demolitor
MRGRIGQLSLKIDDLRKHVSRIQCVIEYVNARKAFTSKVRRIAAGLRYQHHTVNKENLLNIKEGSLNRLRALVTAKKSLEKKLKRLTDNSLFRLSPSRFLTPKTSVSGDSPSIEQVEAFWSELYGDQPNVNRDTPAPNDFEAFCRQHRNDNADEESPEVSVEEVRSALNNGKNWAAPGPDGINLFWWKKLTSTHSHLARIFTAFIRGNEPIPCWLVEGRTVLIPKKGDLSDPKNYRPITCLNAVYKIFTKILNNRILQEIDPVWQQIYEQRGSKRGLSGCKENLLVDRCVIQDAICYQRNLSMAWIDYRKAFDSTSHELILFLLKCLGVNRDTVGCIRRTMQLWRTRFHISCGNDKRVTEAVQYKRGVFQGDSLSPLLFCISLLPISVALRRTRGYSVGPSNDRKYSITHLLYMDDLKVYASDEEHLQTALNIVGEYTRDVGMAFGLDKCAVVNLVKGKCSDVREDIELVDGSVIDHLDAGESYKYLGIDGSPMQDASKIKTTLCSEYVRRLRKIWSSELSGKNKVSATNMLAVPVLLYSFGVLKWARKELRDLDIKTRKVMNMNRSMHPKSSITRLYLSRHIGGRGLQSLECLHDRLVLGITYEVVNFTADENDFLMQIVHSHENRHKGTFLYKAAIYAAKSLGLGRVNPLIELPKEEFKRVISNAEQQKLLSTHMDKSMHSVFFKHVREHGLSEQLTFSFLRSAGLMSETEGYIFACQDGVINTLEYRAKVLQMQLPDTLCRVCKQHPETLMHLLSACPVLARNAYVQRHNAALRVLYYHLRHTHGIDKTPVLPYLPGDIPQVVENDRCRIYWNVPFATTRKIDHNKPDIVLFDKTARDIYVIEFSAPAEYNITVKEEHKHEIYQDLLFEIGKLYPGYRVKLVVLIVGVLGGMKQTFVSALAKIPTCSPQVEFLASRMQKAVILGSLRLLRQRNLACCSC

SEQ ID NO: 9109 - protein, 1076 aa, Cotesia glomerata
MIGYIARMHTLWSDMHPELAHFTPKHLRNYAAHLRRNRRSLVPDRRQSNRLSFPAQLHQERRRSSLDNNNPFIGRQVSISKKITYSQQQLDKVNEDLLTQIQEDSTLLAVNQVVYGAAVSAFPRERHRLSIEARLRQRIAQLGDKIDRSRKHVSRIQCVIEFETTQRAYTPRVRRIAAELRWRHHTLNKSTLLVIKEESLNKLRALVTAKKSLEKRLKRLVDNSLFRSSPSRFLTPKTVVTGNYPAPERVEAFWTELYGDQPNVNANTPALHDFKAFCRKHRRENADEESPAVSVNEVRLALDGSRNWAAPGPDGINVFWWKKFTSTHLHLARIFTSYIRADEPIPDWLVEGRTVLIPKKGDLSDPKNNRPITCLNAVYKIFTKILNNRILQEIGPIWQQIYEQRGNKRGLSGCKENLIVDRCVIQDAIYYQRNLSMAWIDYRKAFDSTPHELILYLLKCLGVNPETVECIRRTMQLWRTRFHIGNGNALHVTGVVEYKRGVFQGDSLSPLLFCISLLPISVALRKTHGYSVGPPGDRKYSITHLLYIDDLKLYSANEDHLQAALNIVAEYTRDVGMSFGLDKCAVIHLARGKCSDTGDDVELVDGSILRQLGAGELCRYLGMGEHRMHAVSEVRETLRSEYVRRLRKIWSSELSGKNKVSATNMLAVPVLLYSFGVLKWARKDLRDLDIKTRKVINMNRSMHPNSSVARLYLSRSIGGRGLQSLERLHDRLVLGLTFEVVNFTADEDDFLMQIVHKHENAHKGSFLYKAAIYAARTLGLGEINALIELRKEEFKSVIRNAEEKQLLGELMDKSMHSVYFKHVRDHGLSTQLTFSFLKSAGLMSETEGFIFACQDGVINTLEYRSKVLQVQLLDTSCRMCKQHPETLMHLLSACPVLARGAYIQRHNAALRVLYYYLRHYYGIDMTPVLPYLPGDIPQVVENDSCKIYWNMPFATTRRIDHNKPDIVLFDKATRDIYVIEFSAPAEHNISAKEEHKRKIYQDLLFEIGKLHPGYRVKLVVLIVGILGGMKQSFVSSLAKVPACTSKSEFLAVRMQKAVILGSLRLLREMTLACCGR

SEQ ID NO: 9110 - protein, 1109 aa, Cotesia glomerata
MNDDDPGALRTYFKWTEELRVDLLVCYQRSEPGVSGYMARMHTLWSDMHPELEHFTPKHLRNYAAYLRRNRRSLVPDRRQSNRLSFPAQLHQERRRSFLDDNNPFIGRQVSISKKITYSQQQLEAVNEDLRANILENSTLLTVSQVVYDAAVSAFPRERHCLSIEARLRQRISQLGLKIDRSRKQVSRIQCVIEFETTQRAYTPRIRRIAAELRWRHHTLNKSTLLVIKEESLNKLRALVTAKKSLEKRLKRLVDNSLFRSSPSRFLTPKTDVTGNYPTPERVEAFWTELYGDQPNVNANTPALHDFKAFCREHRRQNADEESPAVSVNEVRSALNGSKNWAAPGPDGINVFWWKKFTSTHLHLARIFTSYIRADEPIPDWLVEGRTVLIPKKGDLSDPKNYRPITCLNAVYKIFTKILNNRILQEIEPVWQQIYEQRGSKRGLSGCKENLIVDRCVTQDAIYYQRNLSMAWIDYRKAFDSTSHELILYLLKCLGVNPEIVECIRRTMQLWRTRFHIGSGNALHITGVVEYKRGVFQGDSLSPLLFCISLLPISVALRKTRGYSVGPPGDRKYSITHLLYMDDLKLYSADEDHLQAALNIVAEYTRDVGMSFGLDKCAVVHLARGKCSVTGDDVELVDGSVLRQLDAGELYRYLGMEEHRMHAVSEVQATLRSEYVRRLRKIWSSELSGKNKVSASNMLAVPVLLYSFGVLKWARKDLRDLDIKTRKTINMNRSMHPNSSVARLYLSRSIGGRGLQSLERLHDRLVLGLTHEVVNFTADEDDFLMQIVHKHENAHKGSFLYKAAIYAARTLGLGEINALMELRKEEFKSFIRSAEEKLLLGELMDKSMHSVFFKHVRDHGLSTQLTFSFLKSAGLMSKTEGFIFACQDGVINTLEYRSKVLQVQLLDTSCRMCKQHPETLMHLLSACPVLARGAYIQRHNAALRVLYYYLRHYYGIDMTPVLLYLPGDIPQVVENDSCKIYWNMPFATTRRIDHNKPDIVLFDKATRDIHVIEFSAPAEYNISAKEEHKRQIYQDLLFEIGKLYPGYRVKLVVLIVGVLGGMKQSFVSSLARVPACSPKAEFLAVRMQKAVILGSLRLLRKMTLACCDH

SEQ ID NO: 9111 - protein, 640 aa, Cotesia typhae
MAWIDYRKAFDSIPHELILYLLKCLGVNPEIVECIRRTMQLWRTRFHIGSGNALHVTGVVEYKRGVFQGDSLSPLLFCISLLPITVALRKTRGYYVGPPGDRKYSITHLLYMDDLKLYSADEDHLQAALNIVAEYSRDVGMSFGLDKCAVVHLARGKCSDTGDDVELVDGSVLRQLDAGELYRYLGMEEHRMHAVSEVRTTLQSEYVRRLRKIWSSELSGKNKVSATNMLAVPVLLYSFGVLKWARKDLRDLDIKTRKIINMNQSMHPNSSVARLYLSRSIGGRGLQSLERLHDRLVLGLTYEVANFTADEDDFLMQFVHSHENARKGSFLYKAAIYAANTLGLGEINALIELPKKEFKRVVRIAEEKKLLGEHMDKSMHSVFFKHVRDHGLSTRLTFSFLKSAGLMSETEGFIFACQDGVINTLEYRSKVLQVQLPDTSCRRCRQHPETLMHLLSACPVLARGAYIQRHNAALRVLYYYLRHCYGIDVTPVLPYLPGDIPQVVENDSCKIYWNMPFATTRQIDHNKPDIVLFDKATRDIYVIEFSAPAEYNISAKEEHKRQIYQDLLFEIAKLYPGYRVKLVVLIVGILGGMKQSFVSSLAKVPACSSKAEFLAVRMQNVVLLGSLRLLREMTLACCDH

SEQ ID NO: 9112 - protein, 1109 aa, Cotesia glomerata
MNDDDPGALRTYFKWTEELRVDLLVCYQRSEPGVSGYMARMHTLWSDMHPELEHFTPKHLRNYAAYLRRNRRSLVPDRRQSNRLSFPAQLHQERRRSSLDDNNPFIGRQVSISKKITYTQQQLEAVNEDLRANILEDSTLLTVSQVVYGAAVSAFPRERHCLSIEARLRQRISQLGLKIDRSRKQVSRIQCVIEFETTQRAYTPRIRSIAAELRWRHHTLNKSTLPVIKEESLNKLRALVTAKNSLEKRLKRLVDNSLFRSSPSRFLTPKTDVTGNYPTPERVEAFWTELYGDQPNVNANTPALHDFKAFCREHRRQNADEESPAVSVNEVRSALNGSKNWAAPGPDGINVFWWKKFTSTHLHLARIFTSYIRADEPIPDWLVEGRTVLIPKKGDLSDPKNYRPITCLNAVYKIFTKILNNRILQEIEPVWQQIYEQRGSKRGLSGCKENLIVDRCVTQDAIYYQRNLSMAWIDYRKAFDSTSHELILYLLKCLGVNPEIVECIRRTMQLWRTRFHIESGNALHITGVVEYKRGVFQGDSLSPLLFCILLLPISVALRKTRGYSVGPPGDRKYSITHLLYMDDLKLYSADEDHLQAALNIVAEYTRDVGMSFGLDKCAVVHLARGKCSVTGDDVELVDGSVLRQLDAGELYRYLGMEEHRMHAVSEVQATLRSEYVRRLRKIWSSEHSGKNKVSAINTLTVPVLLYSFGVLKWARKDLRDLDIRTRKTINMNRSMHPNSSVARLYLSRSIGGRGLQSLERLHDRLVLGLTHEVVNFTADEDDFLMQIVHKHENAHKGTFLYKAAIYAAKTLGLGEINALMELRKEEFKSVIRNAEEKLLLGKLMDKSMHSVFLKHVRDHGLSTQLTFSFLKSAGLMSETEGFIFACQDGVINTLKYRSKVLQVQLPDTTCRACKQHPETLMHILSACPVLARGAYIQRHNAALRVLYYSLRHHYGIDVTPVLPYLPGDIPQVVENDSCKIYWNMPFATTRRIDHNKPDIVLFNKATRDIYVIEFSAPAEYNISAKEEHKRQIYQDLLFEIGKLYPGYRVKLVVLIVGVLGGMKQSFVSSLARVPACSSKAEFLAVRMQKAVILGSLRLLRKMTLACCDH

SEQ ID NO: 9113 - protein, 961 aa, Cotesia glomerata
MGDNNNNNNNNNNNNNNNIGRQVSISKKITYSQQQLDTVNEDLRANILEDSTLLTVSQVVYGAAVSAFPRERHCLSIEARLRQRIAQLGDKIDRSRKQVSRIQCVIEFETTQRAYTPRVRRITAELRWRHHTLNKRLLVVKEESLNKLRALVTAKKSLEKRLKRLVDNSLFRSSPSRFLTPKTVVTGNYPVPERVEAFWTELYGDQPNVNANIPALHDFKAFCRKHRRQNADEESPAVSVNEVRSALNGSRNWAAPGPDGINVFWWKKFTSTHLHLARIFTSYIRADEPIPDWLVEGRTVLIPKKGDLSDPKNYRPITCLNAVYKIFTKILNNRILQEIEPVWQQIYEQRGSKRGLSGCKENLIVDRCVTQDAIYYQRNLSMAWIDYRKAFDSTSHELILYLLKCLGVNPEIVECIRRTMQLWRTRFHIGSGNALHITGVVEYKRGVFQGDFLSPLLFCISLLPISVALRKTRGYSVGPPGDRKYSITHLLYMDDLKLYSADEDHLQAALNIVAEYTRDAGMSFGLDKCAVVHLARGKCSVTGDDVELVDGSVLRQLDAGELYRYLGMEEHRMHAVSEVQATLRSEYVRRLRKIWSSELSGKNKVSATNTLAVPVLLYSFGVLKWARKDLRDLDIRTRKTINMNQSMHPNSSVARLYLSRSIGGRGLQSLERLHDRLVLGLTHEVVNFTADEDDFLMQIVHKHENAHKRSFLYKAAIYAARTLGLGEINALMELRKEEFKSAIRNAEEKLLLGKLMDKSMHSVFFKHVRDHGLSTQLTFSFLKSAGLMSETEGFIFACQDGVINTLEYRSKVLQVQLPDTTCRACKQHPETLMHILSACPVLARGAYIQRHNAALRVLYYYLRHRYGIDVTPVLPYLPGDIPQVVQNDSCKIYWNMPFATTRRIDHNKPDIVLFDKATRDIYVIEFSAPAEYNISAKEEHKRQIYQDLLFEIGKLYPGYRV

SEQ ID NO: 9114 - protein, 640 aa, Cotesia typhae
MPWIDYRKAFDSTSHELILYLLKCLGINRQTVGCIQRTMQLWRTRFHIGSGNALHVTGTVQYKRGVFQGDSLSPLLFCISLLPISVALRQTGGYSAGLPSDRVYSITHQLFMDDLKIYSANKDHLQTAINIVAEYTRDVGMSFVLDKCAVVHLAKGKCSDTGGDVELVDGSVLRELDAGELYRYLGMVEHRMHAVSEVRTTLQSEYVRRLWKIWSSELSGKNKVSATNMLAVPVLLYSFGVLKWARKDLRDVDIKTRKIINMNRSMHPNSSVARLYLSRSIGGRGLQSLERLHDRLVLGLTHEVVNFTADEDDFLMQIVHKHENAHKGSFLYKAAIYAARTLGLGEINALMELRKEQFKSVIRNAEEKLLLGELMDKSMHSVFFKQVRDHGLSIQLTFSFLRSAGLMSETEGFIFACQDGVINTLEYRSKVLQVQLPDTSCRRCRQHPETLMHLLSACPVLARGAYIQRHNAALRVLYYYLRHCYGIDVTPVLPYLPGDIPQVVENDSCKIYWNMPFATTRRIDHNKPDIVLFDKATRDIYVIEFLAPAEYNISAKEEHKRQIYQDLLFGIGKLYPGYRVKLLVLIVGVLGGMKQSFVSSLAKVPAYSSKAEFLAVRMQKAVLLGSLRLLREMTLACCDH

SEQ ID NO: 9115 - protein, 1076 aa, Cotesia glomerata
MIGYIARMHTLWSDMHPELAHFTPKHLRNYAAHLRRNRRSLVPDRRQSNRLSFPAQLHQERRRSSLDNNNIFIGRQVSISKKITYSQQQLDKVNEDLLPQIQEDSTLLAVNQVVYGAAVSAFPRERHRLSIEARLRQRIAQLGDKIDRSRKHVSCIQCVIEFETTQRAYTPRVRRIAAELRWRHHTLNKSNLLVIKEESLNKLRALVTAKKSLEKRLKRLVDNSLFRSSPSRFLTPKTVVTGNYPAPERVEAFWTELYGDQPNVNANTPALHDFKAFCRKHRRQNADEESPAVSVNKVRLALDGSRNWAAPGPDGINVFWWKKFTSTHLHLARIFTSYIRPDEPIPDWLVEGRTVLIPKKGDLSDPKNYRPITCLNAVYKIFTKILNNRILQEIGPIWQQIYKQRGNKRGLSGCKENLIVDRCVIQDAIYYQRNLSMAWIDYRKAFDSTPHELILYLLKCLGVNPETVECIRRTMQLWRTRFHIGNGNALHVTGVVEYKRGVFQGDSLSPLLFCISLLPISVALRKTHGYSVGPPGDRKYSITHLLYIDDLKLYSAHEDHLQAALNIVAEYTRDVGMSFGLDKCAVIHLARGKCFDTGDDVELVDGSILRQLGAGELYGYLGMEEHRMHVVSEVRATLRSEYVRRLRKIWSSELSGKNKVSATNMLAVPVLLYSFGVLKWARKYLRDLVIKTRKVINMNRSMHPNSSVARLYLSRSIGGRGLQSLERLHDRLVLGLTFEVFNFTADEDDFLMQIVHKHENAHKGSFLYKAAIYAARTLGLGEINALMELRKEEFKSVIRNAEEKQLLGELMDKSMHSVCFKHVRDHGLSTQLTFSFLKSAGLMSETEGFIFACQDGVINTLEYRSKVLQVQLLDTSRRMCKQHPETLMHLLSACPVLAGGAYIQRHNAALRVLYYYLRHYYGIDMTPVLPYLPGDIPQVVENDSCKIYWNMPFATTRLIDHNKPDIVLFDKATRDIYVIEFSAPAEHNISAKEEHKRKIYQDLLFEIGKLYPGYRVKLVVLIVGVLGGMKQSFVSSLAKVPACTSKSEFLAVRMQKAVILGSLRLLRKMTLACCDH

SEQ ID NO: 9116 - protein, 1109 aa, Cotesia glomerata
MNDDDPGALRTYFKWTEELRVDLLVCYQRSEPGVSGYMARIHTLWSDMHPELEHFTPKHLRNYAAYLRRNRRSLVPDRRQSNRLSFPAQLHQERRRSSLDDNNRFIGRQVSISKKITYSQQQLEAVNEDLRANILEDSTLLTVSQVVYGAAVSAFPRERHCLSIEARLRQRISQLGLKIDRSRKQVSRIQCVIEFETTQRAYTPRIRRIAAELRWRHHTLNKSTLLVIKEESLNKLRALVTAKKSLEKRLKRLVDNSLFRSSPSRFLTPKTDVTKNYPTPERVEAFWTELYGDQPNVNANTPALDDFKAFCREHRRQNADEESPAVSVNEVRSALNGSKNWAAPGPDGINVFWWKKFTSTHLHLARIFTSYIRADEPIPDWLVEGRTVLIPKKGDLSDPKNYRPITCLNAVYKIFTKILNNRILQEIEPVWQQIYEQRGSKRGLSGCKENLIVDRCVTQDAIYYQRNLSMAWIDYRKAFDSTSHELILYLLKCLGVNPEIVECIRRTMQLWRTRFHIGSGNALHITGVVEYKRGVFQGDSLSPLLFCISLLPISVALRKTRGYSVGPPGDRKYSITHLLYMDDLKLYSADEDHLQAALNIVAEYTRDVGMSFGLDKCAVVHLARGKCSVTGDDVELVDGSVLRQLDAGELYRYLGMEEHRMHAVSEVQATLRSEYVRRLRKIWSSELSGKNKVSATNTLAVPVLLYSFGVLKWARKDLRDLDIRTRKTINMNRSMHPNSSVARLYLSRSIGGRGLQSLERLHDRLVLGLTHEVVNFTADEDDFLMQIVHKHENAHKGSFLYKAAIYAARTLGLGEINALMELRKEEFKSVIRNAEEKLLLGKLMDKSMHSVFFKHVRDHGLSTQLTFSFLKSAGLMSETEGFIFACQDGVINTLEYRSKVLQVQLPDTTCRACKLHPETLMHILSACPVLARGAYIQRHNAALRVLYYYLRHRYGIDVTPVLPYLPGDIPQVVENDSCKIYWNMPFATTRRIDHNKPDIVLFDKATRDIYVIEFSAPAEYNISAKEEHKRQIYQDLLFEIGKLYPGYRVKLVVLIVGVLGGMKQSFVSSLARVPACSSKAEFLAVRMQKAVILGSLRLLRKMTLACCDH

SEQ ID NO: 9117 - protein, 1072 aa, Cotesia typhae
MARMHTLWSDMRPELAHFTPKHLRNYAAHLRRNRRSLVPDRRQSNRLSFPAQLHQERRRSSLDNNNPFVGRLVSITKKITYSQQQLDAVNDDLRAAILEDSTLLTVSQVVYGAAVSAFPRERHCLSIEARLRQRILELGSKIDRSRKHVSRIQCVIEFETTQKAYTPRIRRIVAELRWRHHILNKSTLLVIKEQSLNKLRALVTAKKSLEKRLKRLVDNSLFRSSPSRFLTAKTDVTGTYPTPERVEAFWTELYGDQPNVNANTPALHDFKAFCPEHRRQNADEESPAVSVDEVRSALNGSKNWAAPGPDGINVFWWKKFTSTHLHLARIFTSYIRADDPIPDWLVEGRTVLIPKKGDLSDPKNFRPITCLNAVYKIFTKISNNRILQHIEPVWQQIYEQCGSKRGLSGCKEHLIVDRCVLQDAIYYQRNLSMAWIDYRKAFDSTPHELILYLLKCLGVNPEIVECIRRTMQLWRTRFHIGSGNALHVTGVVEYKRGVFQGDSLSPLLFCISVLPISVTLRKTRGYSVGPPGDRVYSITHQLFMDDLKIYSANKDHLQTAINIVAEYTRGVGMSFGLDKCAVVYLARGKCSDTGDDVELVDGSVLRQLDAGDLYRYLGIEERQMHAVSEVRTTLRSEYVRRLRKIWSSELSGKNKVSATNMLAVPVLLYSFGILKWPRNELKDLDIKTRKVINMNQSVHPNSSVARMYLSRNIGGRGLQSLERLHDRLVLGLTHEVVNFTADEDDFLMQIVHKHENAHKGSFLYKAAIYAANTLGLGEINALIELPKKEFKSVVRIAEEKKLLGEHMDKSMHSVYFKHVRDYGLSTQLTFSFLKSAGLMSETEGFIFACQDGVINTLEYRSKVLQAQLPDTSCRTCKQHPETLMHLLSACPVLARGAYIQRHNAALRVLYYHLRYSCGIDETPVLPYLPGDIPQVVENDSCKIYWNMPFARTRRIDHNKPDIVLFDTATSDIYVIEFSAPAEYNISAKEEHKRQIYQDLRFEIGKLYPGYRVKLVVLIVGVLGGMKQSFVSSLAKVPACSSKAEFLAVRMQKAVLLGSLRLLREMTLACCDH

SEQ ID NO: 9118 - protein, 640 aa, Cotesia glomerata
MAWIDYRKAFDSTSHELILYLLKCLGVNPEIVECIRRTMQLWRTRFHIGSGNALHITGVVEYKRGVFQGDSLSPLLFCISLLPISVALRKTRGYSVEPPGDRKYSITHLLYMDDLKLYSADEDHLQAALNIVAEYTRDAGMSFGLDKCAVVHLARGKCSVTGDDVELVDGSVLRQLDAGELYRYLGMEEHRMHAVSEVQATLRSEYVRRLRKIWSSELSGKNKVSATNTLAVPVLLYSFGVLKWARKDLRDLDIRTRKTINMNRSMHPNSSVARLYLSRSIGGRGLQSLERLHDRLVLGLTHEVVNFTADEDDFLMQIVHKHENAHKGSFLYKAAIYAARTLGLGEINALMELRKEEFKSAIRNAEEKLLLGKLMDKSMHSVFFKHVRDHGLSTQLTFSFLKSAGLMSETEGFIFACQDGVINTLEYRSKVLQVQLPDTTCRACKQHPETLMHILSACPVLARGAYIQRHNAALRVLYYYLRHYYGIDMTPVLPYLPGDIPQVVENDSCKIYWNMPFATTRRIDHNKPDIVLFDKATRDIYVIEFSAPAEYNISAKEEHKRQIYQDLLFEIGKLYPGYRVKLVVLIVGVLGGMKQSFVSSLARVPACSSKAEFLAVRMQKAVILGSLRLLRKMTLACCDH

SEQ ID NO: 9119 - protein, 1064 aa, Cotesia typhae
MNDDDPGALRTYFKWTEELRVDLLVCYQRSEPGVSGYMARMHTLWSDMHPELAHFTPKHLRNYAAHLRRNRRSLVPDRRQSNRPSFPAQLHQERRRSSLDNNNPFVGRQVSISKKITYSQQQLDAVNEDLRANILEDSTLLTVSQVVYGAAVSAFPRERQCLSIEARLKQRISQLGLKIDMSRKQVSRIQCVIEYDTTQTPYTPRIRRIAAELRWRHHTLNKSTLHVIKEESLNKLRALVAAKKSLEKRLKRLVDNSLFRSSPSRFLTPKTDVTGNYPTPERVEAFWTELYGDQPNVNANTPALHDFKVFCREHRRQNADEESPAVSVDEVRSALNGSKNWAAPGPDGINVFWWKKFTSTHLHLARIFTSYIRADDPIPDWLVEGRTVLIPKKGDLSDPKNFRPITCLNAVYKIFTKILNNRILQQIEPVWQQIYEQRGSKRGLSGCKENLIVDRCVLQDAIYYQRNLSMAWIDYRKAFDSTPHELILYLLKCLGVNPEIVECIRRTMQLWRTRFHIGSGNALHVTGVVEYKRGVFQGDSLSPLLFCISLLPISVALRKTRGYSVGPPGDRKYSITHLLYMDDLKLYSADEDHLQAALNIVAEYTRDVGMSFGLDKCAVVHLARGKCSDTGDDVELVDGSVLSQLDAGELYRYLGMEEHRMHAVSEVRTTLQSEYVRRLRKIWSSELSGKNKVSATNMLAVPVLLYSFGVLKWTRKDLRDLDIKTRKIINMNRSMHPNSSVARLYLSRSISGRGLQSLERLHDRLVLGLTHEVVNFTADEDDFLMQIVHKHENAHKGSFLYKAAIYAARTLGLGEINALMELRKEEFKSVIRNAEEKLLLGELMDKSMHSVFFKHVRDHGLSIQLTFSFLKSAGLMSETEGFIFACQDGVINTLEYRSKVLQVQLPDTSCRRCRQHPETLMHLLSACPVLARGAYIQRHNAALRVLYYYLRHCYGIDVTPVLPYLPGDIPQVVENDSCKIYWNKRQIYQDLPFEIGKLYPGYRVKLVVLIVGVFGGMKRSFVSSLAKVPACSSKAEFLAVRMQKAVILGSLRLLREMTLACCDH

SEQ ID NO: 9120 - protein, 1109 aa, Cotesia glomerata
MNDDDPGALRTFFKWTEELRVDLLVCYQRSEPGVSGYMARMHTLWSDMHPELEHFTPKHLRNYAAHLRRNRRSLVPDRRQSNRLSFPAQLHQERRRSSLDNNNPFIGRQVSISKKITYSQQQLDKVNEDLLTQIQEDSTLLAVNQVVYGAAVSAFPRERHRLSIEARLRQRIAQLGDKIDRSRKHVSRIQCVIEFETTQRAYTPRVRRIAAELRWRHHTLNKSTLLVIKEELLNKLRALVTAKKSLEKRLKRLVDNSLFRSSPSRFLTPKNVVTGNYPAPERVEAFWTELYGDKPNVNANTPALHDFKAFCRKHRRQNADEESPAVSVNEVRLSLDGSRNWAAPGPDGINVFWWKKFTSTHLHLARIFTSYTRADEPIPDWLVEGRTVLIPKKGDLSDPKNYRPITCLNAIYKIFTKILNNRILQEIGPIWQQIYEQRGNKRGLSGCKENLIVDRCVIQDAIYYQRNLSMAWIDYRKAFDSTPHELILYLLKCLGVNPETVECIRRTMQLWRTRFHIGNGNALHVTGVVEYKRGVFQGDSLSPLLFCISLLPISVALRKTHGYSVGPPGDRKYSITHLLYIDDLKLYSANEDHLQAALNIVAEYTRDVGMSFGLDKCAVIHLARGKCSDTGDDVELVDGSILRQLGAGELYRYLGMEEHRMHAVSEVRATLRSEYVRRLRKIWSSELSGKNKVSATNMLAVPVLLYSFGVLKWARKDLRDLDIKTRKVINMNRSMHPNSSVARLYLSRSISGRGLQSLERLHDRLVLGLTFEVVNFTADEDDFLMQIVHKHENAHKGSFLYKAAIYAARTLGLGEINALMELRKEEFKSVIRNAEEKQLLGELMDKSMHSVYFKHVRDHGLSTQLTFSFLKSAGLMSETEGFIFACQDGVINTLEYRSKVLQVQLPDTTCRACKQHPETLMHILSACPVLARGAYIQRHNAALRVLYYYLRHRYGIDVTPVLPYLPGDIPQVVENDSCKIYWNMPFATTRRIDHNKPDIVLFDKATRDIYVIEFSAPAEYNISAKEEHKRQIYQDLLFEIGKLYPGYRVKLVVLIVGVLGGMKQSFVSSLARVPACSSKSEFLAVRMQKAVILGSLRLLRKMTLACCDH

SEQ ID NO: 9121 - protein, 999 aa, Cotesia typhae
MHPELAHFTPKHLRNYAAHLRRNRRSLVPDRRQSNRLSFPVQLHQERCRSSLDNNNPFVGRQVSISKKITYSQQQLDAVNEDLRANILEDSTLLTVSQAVYGAAVSAFPRERQCLSIDARLKQRISQLGLKIDMSRKQVSRIQCVIEYDTTQTPYTPRIRRIAAELRWRYHTLNKSTLHVIKEESLNKLRALVAAKKSLEKRLKRLVDNSLFRSSPSRFLTPKTDVTGNYPTPERVEAFWTELYGDQPNVNANTPALHDFKVFCREHRRQNADEESPAVSVDEVRSALNGSKNWAAPGPDGINVFWWKKFTSTHLHLARIFTSYIRADDPIPDWLVEGRTVLIPKKGYLSDPKNFRPITCLNAVYKIFTKILNNRILQQIEPVWQQIYEQRGSKRGLSGCKENLIVDRCVLQDAIYYQRNLSMAWIDYRKAFDSTPHELILYLLRCLGVNPEIVECIRRTMQLWRTRFHIGSGNALHVTGVVEYKRGVFQGDSLSPLLFCISLLPISVALRKTHGYSVGPPGDRNYSITHLLYMDDLKLYSADKDHLQAALNIVAEYTRDVGMSFGLDKCAVVHLARGKCSDTGDDVELVDGSVLSQLDAGELYRYLGVEEHRMHAVSEVRTTLQSEYVRRLRKIWSSELSGKNKVSATNMLAVPVLLYSFGVLKWARKDLRDLDIKTRKIINMNRSMHPNSSVARLYLSRSIGGRGLQSLERLHDRLVLGLTHEVVNFTADEDDFLMQIVHKHENAHKGSFLYKAAIYAARTLGLGEINALMELRKEEFKSVIRNAEEKLLLGELMDKSMHSVFFKHVRDHGLSIQLTFSFLKSAGLMSETEGFIFACQDGVINTLEYRSKVLQVQLPDTSCRRCRQHPETLMHLLSACPVLARGAYIQRHNAALRVLYYYLRHCYGIDVTPVLPYLPGDIPQVVENDSCKIYWNMPFATTRRIDHNKPDIVLFDKATRDIYVIEFSAPAEYNISAKEEHKRQIYQDLPFEIGKLYPG

SEQ ID NO: 9122 - protein, 1074 aa, Cotesia glomerata
MIGYIARMHTLWSDMHPELAHFTPKHLRNYAAHLRRNRRSLVPDRRQSNRLSFPAQLHQERRRPSLDNNNIFIGRQVSISKKITYSQQQLDKVNEDLLTQIQEDSTLLAVNQVVYGAAVSAFPRERHRLSIEARLRQRIAQLGDKIDRSRKHVSRIQCVIEFETTQRAYTPRVRRITAELRWRHHTLNKSTLLIIKEESLNKLRALVTAKKSLEKRLKRLVDNSLFRSSPSRFLTPKTVVTGNYPAPEQVEAFWTELYGDQPNVNANTPALHDFKAFCRKHRRQNADEESPAVSVNEVRLALDGSRNWAAPGPDGINVFWWKKFTHLHLARIFTSYIRADEPIPDWLVEGRTVLIPKKGDLSDPKNYRPITCLNAVYKIFTKILNNRILQEIGPIWQQIYEQRGNKRGLSGCKENLIVDRCVIQDAIYYQRNLSMAWIDYRKAFDSTPHELILYLLKCLGVNPETVECIRRTMQLWRTHFHIGNGNALHVTGVVEYKRGVFQGDSLSPLLFCISLLPISVALRKTHGYSVGPPGDRKYSITHLLYIDDLKLYSANEDHLQAALNIVAEYTRDVGMSFGLDKCAVIHLARGKCSDTGDDVELVDGSILRQLGAGELYRYLGMEEHRMHAVSEVRATLRSEYVRRLRKIWSSELSGKNKVSATNMLAVPVLLYSFGVLKWARKDLRDLDIKTRKVINMNRSMHPNSSVARLYLSRSIGGRGLQSLERLHDRLVLSLTFEVVNFTADEDDFLMQIVHKHDNAHKGSFLYKAAIYAARTLGLGEINALMELRKEEFKSVIRNAEEKQLLGELMDKSMHSVYFKHVRDHGLSTQLTFSFLKSAGLMSETEGFIFACQDGVINTLEYRSKVLQVQLLDTSCRMCKQHPETLIHLLSACPVLARGAYIQRHNAALRVLYYYLRHYYGIDMTPVLPYLPGDIPQVVENDSCKIYWNMPFATTRRIDHNKPDIVLFDKATRDIYVIEFSAPAEHNISAKEEHKRKIYQDLLFEIGKLYPGYRVKLVVLIVGVLGGIKQSFVSSLAKVPACTSKSEFLAVRMQKAVILGSLRLLREMTLACCGR

SEQ ID NO: 9123 - protein, 1092 aa, Cotesia glomerata
MNDDDPGALRTFFKWTEELRVDLLVCYQRSEPGVSGYMARMHTLWSDMHPELEHFTPKHLRNYAAYLRRNRRSLVPDRRQSNRLSFPAQLQQERRRSSLDDNNPFIGRQVSISKKITYSQQQLEAVNEDLRANILEDSTLLTLSQVVYGAAVSAFPRERHCLSIEARLRQRISQLGLKIDRSRKQVSRIQCVIEFETTQRAYMPRIRRIAAELRWRHHTLNKSTLLVIKEESLNKLRALVTAKKSLEKRLKRLVDNSLFRSSPSRFLTSKTDVTGNYPTPERVEAFWTELYGDQPNVNANTPALHDFKAFCREHRRQNADEESPAVSVNEVRSALNGSKNWAAPGPDGINVFWWKKFTSTHLHLARIFTSYIRADEPIPDWLVEGRTVLIPKKGDLSDPKNYRPITCLNAVYKIFTKILNNRILHEIEPVWQQIYEQRGSKRGLSGCKENLIVDRCVTQDAIYYQRNLSMAWIDYRKAFDSTSHELILYLLKCLGVNPEIVECIRRTMQLWRTRFHIGSGNALHITGVVEYKRGVFQGDSLSPLLFCISLLPISVALRKTRGYSVGPPGDRKYSITHLLYMDDLKLYSADEDHLQAAFNIVAEYTRDVGMSFGLDKCAVVHLARGKCSVTGDDVELVDGSVLRQLDAGELYRYLGMEEHRMHAVSEVQATLRSEYVRRLRKIWSSELSGKNKVSATNTLAVPVLLYSFGVLKWARKDLRDLDIRTRKTINMNRSMHPSSSVARLYLSRSIGGRGLQSLERLHDRLVLGLTHEVVNFTADEDDFLMQIVHKHENAHKGSFLYKAAIYAARTLGLGEINAFMELRKEEFKSVIRNAEEKLLLGELMDKSMHSVFFKHVRDHGLSTQLTFSFLKSAGLMSETEGFIFACQDGVINTLEYRSKVLQVQLLDTSCRMCKQHPETLMHLLSACPVLARGAYIQRHNAALRVLYYYLRHYYGIDMTPVLPYLPGDIPQVVENDSCKIYWNMPFATTRRIDHNKPGIVLFDKATRDIYVIEFSAPAEFNISAKEEHKRQIYQDLLFEIGKLYPGYRVKLVVLIVGVLGGMKQSFVSSLPEFQLAHQKLNSWRSGCRRLSY

SEQ ID NO: 9124 - protein, 534 aa, Cotesia typhae
MAWIDYRKAFDSTPHELILYLLKCLGVNPEIVECIRRTMQLWRTRFHIGSGNALHVTGVVEYKRGVFQGDSLSPLLFCISLLPISVVLRKTHGYSVGPPGDRNYSITHLLYMDDLKLYSADKDHLQAALNIVAEYTRDVGMSFGLDKCAVVHLARGKCSDTGDDVELVDGSVLSQLDAGELYRYLGMEEHRMHAVSEVRTTLQSEYVRRLRKIWSSELSGKNKVSATNMLAVPVLLYSFGVLKWTRKDLRDLDIKTRKIINMNRSMHPNSSVARLYLSRSIGGRGLQSLERLHDRLVLGLTHEVVNFTADEDDFLMQIVHKHENAHKGSFLYKAAIYAARTLGLGEINALMELRKEEFKSVIRNAEEKLLLGELMDKSMHSVFFKHVRDHGLSIQLTFSFLKSAGLMSETEGFIFACQDGVINTLEYRSKVLQVQLPDTSCRRCRQHPETLMHLLSACPVLARGAYIQRHNAALRVLYYYLRHCYGIDVTPVLPYLPGDIPQVVENDSCKIYWNMPFATTRRIDHNKPDIVLFD

SEQ ID NO: 9125 - protein, 901 aa, Cotesia typhae
MAAELRWLHHTLNKSTLLVIKEESLNKLRALVAAKKSLEKRLKRLVDNSLFRSSPSRFLTPKTDVTGTYPTPERVEAFWTELYGDQPNVNANTPALHDFKAFCRERRRQNADEESPAVSVDEVRSALNGSKNWAAPGPDGINVFWWKKFTSTHLHLARIFTSYIRADDPIPDWLVEGRTVLIPKKGDLSDPKNFRPITCLNAVYKIFTKILNNRILQQIEPVWQQIYEQRGSKRGLSGCKENLIVDRCVLQDAIYYQRNLSMAWIDYRKAFDSTPHELILYLLKCLGVNPEIVECIRRSMQLWRTRFHIGSGNALHVTGVVEYKRGVFQGDSLIPLLFCISLLPISVALRKTRGYSVGPPGDRKYSITHLLYMDDLKLYSADEDHLQAARNIVAEYTRDVGMSFGLDKCAVVHLARGKCSDSGDDVELVDGSVLRQLDAGELYRYLGMEEHCMHAVSEVRATLQSEYVRRLRKIWSSELSGKNKVSATNMLAVPVLLYTFGVLKWGRKDLRDLDIKTRKIINMNRSMHPNSSVARLYLSRSIGGRGLQSLERLHVRLVLGLTHEVVNFTADEDDFLMQIVHKHENEHKGSFLYKAAIYAARTLGLEEINALMELRKEEFKSVIRNAEEKLLLGELMDKSMHSVFFKHVRDHGLSTQLTFSFLKSAGLMSETEGFLFACQDGVINTLEYRSKVLQVQLPDTSCRRCKQHPETLMHLLSACPVLARGAYIQRHNAALRVLYYYLRHCYGIDVTPVLPYLPGDIPQVVENDSCKIYWNMPFATTRRIDHNKPDIVLFDKATRDIYVIEFSAPAEYNISAKEEHKRQIYQDLLFEIGKLYPGHSVKLVVLIVGVLGGMKQPFVSSLAKVPACSSKAEFLAVRMQKAVILGSLRLLRETILACCDH

SEQ ID NO: 9126 - protein, 1110 aa, Cotesia typhae
MTYDDPGAYRIKFKWTEELRADLLVCWQNSEPEVSGYMARMHTLWCGMHPEHRHFTPKHLRNYASYLRHNRRSLLPNRRLSNRPSFPAPLHQERHRFSEDNDNLFTGRQVSISKKMSHSKQQLDTVNEDLPTQLQEDSTLLTVNQVVYGAAASLLPIERRHSLSFEAKLKLRIVQLGHKIDISRKQVSRIQCVIEYVSTQKPYTPKVRRLAAELRRRHHTLNKSTLLVIKEDSRNRLRALVASKKSLEKRLKRLIDNSLFRSNPSRFLSPKTAVPENYPSSERVEAFWSELYGDQPNVIPDTRALHDFEAFCRKHRRQDIAEESPAVSVQEVRKALNGSKNWAAPGPDGINIFWWKKFSSTHAHLARIFTSYIQGDEPIPDWLVEGRTVLIPKKGDLSDPKNYRPITCLNAVYKIFTKILNNRILREIEPVWQQIYEQRGSKQGVSGCKINLLVDRCVIQDAIYYQRNLSMAWIDYRKAFDSTSHELILYLLKCLGINRQTVRCIQRTMQLWRTRFHIGSGNALHVIRAVQYKRGVFQGDSLSPLSFCISLLPISVALRQTRGYSAGPPSDRVYSITHQLFMDDLKKYCANKDHLQTALNIVAEYTRDVGMSFGLDKCAVVHLAKGKCSDTGGDVELVDGSVLRELDAGEFYRYLGIEERRMHAVSEVRTTLRSEYVRRLRKIWSSELSGKNKVSATNMLAVPVLLYSFGVLKWPRNELKDLDIKTRKVINMNQNMHPNSSVARMYLSRNIGGRGLQSLERLHDRLVLGLTYEVANFTADEDDFLMQFVHSLENARKGSFLYKAAIYAANTLGLGEINALIELAKKEFKSVVRIAEEKKLLGEHMDKSMHSVYFKHVRDHGLSTQLTFSFLKSAGLMSETEGFIFACQDGVINTLEYRSKVLQAQLPDTSCRTCKQHPETLMHLLSVCLVLARGAYIQRHNAALRVLYYYLRHCYGIDVTPVLPYLPGDIPQVVENDSSKIYWNIPFATTRRIDHNKPDIVLFDKATRDIYVIEFSAPAEYNISVKEEHKRQIYQDLLFEIGKLYPVYRVKLVVLTVGVLGGMKQSFVSLLAKVSACSSKAEFLAVRMQKAVILGSLRLLREMTLACCDH

SEQ ID NO: 9127 - protein, 948 aa, Cotesia typhae
MSLDRGKVETAHLTTGLKIDMSRKQVSRIQCVIEYDTTQTPYTPRIRRIAAELRWRHHTLNKSTLHVIKEESLNKLRALVAAKNSLEKRLKRLVDNSLFQSSPSRFLTPKTDVTGNYPTPERVEAFWTELYGDQPNLNANTPALHDFKVFCREHRRQNADEESPAVSVDEVRSALNGSKKAAPGPDGINVFWWKKFTSIHLHLARIFTSYIRADDPIPDWLVEGRTVLIPKKGDLSDPKNFRPITCLNAVYKIFTKILNNRILQQIEPVWQQIYEQRGSKRGLSGCKENLIVDRCVLQDAIYYQRNLSMAWIDYRKAFDSTPHELILYLLKCLGVNPEIVECIRRTMQLWRTRFHIGSGNALHVTGVVEYKRGVFQGDSLSPLLFCISLLPISVALRKTHGYSVGPPGDRNYSITHLLYMDDLKLYSADKDHLQAALNIVAEYTRDVGMSFGLDKCAVVHLARGKCSDTGDDVELVDGSVLSQLDAGELYRYLGMEEHRMHAVSEVRTTLQSEYVRRLRKIWSSELSGKNKVSATNMLAVPVLLYSFGVLKWTPKDLRDLDIKTRKIINMNRSMHPNSSVVRLYLSRSIGGRGLQSLERLHDRLVLGLTHEVVNFTADVDDFLMQIVHKHENAHKGSFLYKAAIYAARTLGLGEINALMELRKEEFKSVIRNAEENLLLGELMDKSMHSVFFKHVRDHGLSIQLTFSFLKSAGLMSETEGFIFACQDGVINTLEYRSKVLQVQLPDTSCRRCRQHPETLMHLLSACPVLARGAYIQRHNAALRVLYYYLRHCYGIDVTPVLPYLPGDIPQVVENDSCKIYWNMPFATTRRIDHNKPDIVLFDKATRDIYVIEFSAPAEYNISAKEEHKRQIYQDLLFEIGKLYPGYRVKLVVLIVGVLGGMKQSFVSSLAKVPACSSKAEFLAVRMQKAVLLGSLRLLRELTLACCDH

SEQ ID NO: 9128 - protein, 1110 aa, Cotesia typhae
MNDDDPGALRTYFKWTEELRVDLLVCYQRSEPGVSGYMARMHTLWSDMHPELAHFTPKHLRNYAAHLRRNRRSLVPDRRQSNRLSFPAQLHQERRRSSLDNNNPFVGRQVSISKKITYSQQQLDAVNEDLRANILEDSTLLTVSQVVYGAAVSAFPRERQCLSIEARLKQRISQLGLKIDMSRKQVSRIQCVIEYDTTQTPYTPRIRRIAAELRWRHHTLNKSTLHVIKEESLNKLRALVAAKKSLEKRLKRLVDNSLFRSSPSRFLTPKTDVTGNYPTPERVEAFWTELYGDQPNVNANTPALHDFKVFCREHRRQNADEESPAVSVDEVRSALNGSKNWAAPGPDGINVFWWKKFTSTHLHLARIFTSYIRADDPIPDWLVEGRTVLIPKKGDLSDPKNFSPITCLNAVYKIFTKILNNRILQQIEPVWQQIYEQRGSKRGLSGCKENLIVDRCVLQDAIYYQRNLSMAWIDYRKAFDSTPHELILYLLKCLGVNPEIVECIRRTMQLWRTRFHIGSGNALHVTGVVEYKRGVFQGDSLSPLLFCISLLPISVALRKTHGYSVGPPGDRNYSITHLLYMDDLKLYSADKDHLQAALNIVAEYTRDVGMSFGLDKCAVVHLARGKCSDTGDDVELVDGSVLSQLDAGELYRYLGMEQHRMHAVSEVRTTLQSECVRRLRKMWSSELSGKNKVSATNMLAVPVLLYSFGVLKWTRKDLRDLDIKTRKIINMNRSMHPNSSVARLYLSRSIGGRGLQSLERLHDRLVLGLTHEVVNFTADEDDFLMQIVHKHENAHKGSFLYKAAIYAARTLGLGEINALMELRKEEFKSVIRNAAEENLLLGELMDKSMHSVFFKHVRDHGLSIQLTFSFLKSAGLMSETEGFIFACQDGVINTLEYRSKVLQVQLPDTSCRRCRQHPETLMHLLSACAVLARGAYIQRHNAALRVLYYYLRHCYGIDVTPVLPYLPGDIPQVVENDSCKIYWKMPFATTRRIDHNKPDIVLFDKATRDIYVIEFSAPAEYNISAKEEHKRQIYQDLLFEIGKLYPGYRVKLVVLIVGVLGGMKQSFVSSLAKVPACSSKAEFLAVRMQKAVLLGSLRLLREMTLACCDH

SEQ ID NO: 9129 - protein, 987 aa, Cotesia glomerata
MNDDDPGALRTFFKWTEELRVDLLVCYQRSEPGVSGYMARMHTLWSDMHPELEHFTPKHLRNYAAYLRRNRRSLVPDRRQSNRLSFPAQLHQERRRSSLDDNNPFIGRQVSISKKITYSQQQLEAVNEDLRANILEDSTLLTVSQVVYGAAISAFPRERHCLSIEARLRQRISQLGLKIDRSRKQVSRIQCVIEFETTQRAYTPRIRRIAAELRWRHHTLNKSTLLVIKEESLNKLRALVTAKKSLEKRLKRLVDNSLFRSSPSRFLTPKTDVTGNYPTPERVEAFWTELYGDQPNVNANTPALHDFKAFCREHRRQNADEESPAVSVNEVRSALNGSKNWAAPGPDGINVFWWKKLTSTHLHLARIFTSYIRADEPIPDWLVEGRTVLIPKEGDLSDPKNYRPITCLNAVYKIFTKILNNRILHEIEPVWQQIYEQRGSKRGLSGCKENLIVDRCVTQDAIYYQRNLSMAWIDYRKAFDSTSHELILYLLKCLGVNPEIVECIRRTMQLWRTRFHIGSGNALHITGVVEYKRGVFQGDSLSPLLFCISLLPISVALRKTRGYSVGPPGDRKYSITHLLYMDDLKLYSADEDHLQAALNIVAEYTRDAGMSFGLDKCAVVHLARGKCSVTGDDVEMVDGSVLRQLDAGELYRYLGMEEHRMHAVSKVQATLRSEYVRRLRKIWSSELSGKNKVSATNTLAVPVLLYSFGVLKWARKDLRDLDIRTRKTINMNRSMHPNSSVARLYLSRSIGGRGLQSLERLHDRLVLGLTHEVVNFTADEDDFLMQIVHKHENAHKGSFLYKAAIYAARTLGLGEINALMELRKEEFKSAIRNAEEKLLLGKLMDKSMHSVFFKHVRDHGLSTQLTFSFLKSAGLMSETEGFIFACQDGVINTLEYRSKVLQVQLPDTTCRACKQHPETLMHILSACPVLARGAYIQRHNAALRVLYYYLCHRYGIDVTPVLPYLPGDIPQVVENDSCKIYCRRLSY

SEQ ID NO: 9130 - protein, 640 aa, Cotesia glomerata
MAWIDYRKAFDSTSHELILYLLKCLGVNPEIVECIRRTIQLWRTRFHIGSGNALHITGVVEYKRGVFQGDSLSPLLFCISLLPISVALRKTRGYSVGPPGDRKYSITHLLYMDDLKLYSADEDHLQAALNIVAEYTRDAGMSFGLDKCTVVHLARGKCSVTGDDVELVDGSVLRQLDAGQLYRYLGMEEHRMHAVSEVQATLRSEYVRRLRKIWSSELSGKNKVSATNTLAVPVLLYSFGVLKWARKDLRDLDIRTRKTINMNRSMHPNSSVARLYLSRSIGGRGLQSLERLHDRLVLGLTHEVVNFTADEDDFLMQIVHKHENVHKGSFLYKAAIYAARTLGLGEINALMELRKEEFKSAIRNAEEKLLLGKLMDKSMHSVFFKHVRDHGLSTQLTFSFLKSAGLMSETEGFIFACQDGVINTLEYRSKVLQVQLPDTTCRACKQHPETLMHILSACPVLARGAYIQRHNAALRVLYYYLRHRYGIDVTPVLPYLPGDIPQVVENDSCKIYWNMPFATTRRIDHNKPDIVLFDKATRDIYVIEFSAPAEYNISAKEEHKRQIYQDLLFEIGKLYPGYRVKLVVLIVGVLGGMKQSFVSSLARVPACSSKAEFLAVRMQKAVILGSLRLLRKMTLACCDH

SEQ ID NO: 9131 - protein, 640 aa, Cotesia glomerata
MAWIDYRKAFDSTSHELILYLLKCLGVNPEIVECIRRTMQLWRTRFHIGSGNALHITGVVEYKRGVFQGDSLSPLLFCISLLPISVALRKTRGYSVGPPGDRKYSITHLLYMDDLKLYSADEDHLQAALNIVAEYTRDVGMSFGLDKCAIVHLARGKCSVTGDDVELVDGSVLRQLDAGELYRYLGMEEHRMHAVSEVQATLRSEYVRRLRKIWSSELSGKNKVSATNTLAVPVLLYSFGVLKWARKDLRDLDIRTRKTINMNRSMHPNSSVARLYLSRSIGGRGLQSLERLHDRLVLGLTHEVVNFTADEDDFLMQIVHKHENAHKGSFLYKAAIYAARTLGLGEINALMELRKEEFKSVIRNAEEKQLLGELMDKSVHSVFFKHVRDHGLSTQLTFSFLKSAGLMSETEGFIFACQDGVINTLEYRSKVLQVQLLDTSCRMCKQHPETLIHLLSACPVLARGAYIQRHNAALRVLYYYLRHYYGIDMTPVLPYLPGDIPQVVENDSCKIYWNMPFATTRRIDHNKPDIVLFDKATRDIYVIEFSAPAEYNISAKEEHKRQIYQDLLFEIGKLYPGYRVKLVVLIVGVLGGMKQSFVSSLARVPACLSKAEFLAVRMQKAVILGSLRLLRKMTLACCDH

SEQ ID NO: 9132 - protein, 1109 aa, Cotesia glomerata
MNDDDPGALRTFFKWTEELRVDLLVCYQRSEPGVIGYIARMHTLWSDMHLELEHFTPKHLRYYAAYLRRNRRSLVPDRRQSNRLSVLAQLHQKRRRSSLDDNNSFIGRQVSISKKITYSQQQLEAVNEDLRANILEDSTLLTVSQVVYGAAVSAFPRERHCLSIEARLRQRISQLGLKIDRSRKQVSRIQCVIEFETTQRAYTPRIRRIAAELRWRHHTLNKSTLLVIKEESLNKLRALVTAKKSLEKRLKRLVDNSLFRSSPSRFLTPKTDVTGNYPTPERVEAFWTELYGDQPNVNANTPALHDFKAFCREHRRQNADEESPAVSVNEVRSALNGSKNWAAPGPDGINVFWWKKFTSTHLHLARIFTSYIRADEPIPDWLVEGRTVLIPKKGDLSDPKNYRPITCLNAVYKIFTKILNNRILHEIEPVWQQIYEQRGSKRALQGCKKNLIGYRCVTQDAIYYQRNLSMAWIDYRKAFDSTSHELILYLLKCLGVNPEIVECIRRTMQLWRTRFHIGSGNALHITGVVEYKRGVFQGDSLSPLLFCISLLPISVALRKTRGYSVGPPGDRKYSITHLLYMDDLKLYSVDEDHLQAALNIVAEYTRDVGMSFGLDKYAVVHLARAKCSVTGDDVELVDGSVLRQLDAGELYRYLGMEEHRMHAVFEVLATLRSEYVRRLRKIWSSELSGKNKVSATNTLAVPVLLYSFGVLKWARKDLRDLDIRTRKTINMNRSMHPISSVARLYLSRSIGGRGLQSLERLHDRLVLGLTHEVVNFTADEDDFLMQIVHKHENAHKGSFLYKAAIYAARTFGLGEINALMELRKEEFKSVIRNAEEKLLLGKLMDKSMHSVFFKHVRDHGLSTQLTFSFLKSAGLMSETEGFIFACQDGVINTLEYRSKVLPVQLLDTSCRMCKQHPETLIHLLTACPVLARGAYIQRHNAALRVLYYYLRHYYGIDMTPVLPYLPGDIPQVVENDSCKIYWNMPFATTRRIDHNKPDIVLFDKATRDIYVIEFSAPAEHNISAKEEHKRKIYQDLLFEIGKLYPGYRVKLVVLIVGVLGGMKQSFVSSLAKVPACTSKSEFLAVRMQKAVILGSLRLLREMTLACCGR

SEQ ID NO: 9133 - protein, 538 aa, Cotesia glomerata
MAWIDYRKAFDSTPHEMILYLLKCLGVNPETVECIRRTMQLWRTRFYIGNGNALHVTGVVEYKRGVFQGDSLSPLLFCISLLPISVALRKTHGYSVGPPGDRKYSITHLLYMDDLKLYSANEDHLQAALNIVAEYTRDVGMSFGLDKCAVIHLARGKCSDTGDDVELVDGSILRQLGAGELYRYLGMEEHRMHAVSEVRATLRSEYVRRLRKIWSSELSGKNKVSATNMLAVPVLLYSFGVLKWARKDLRDLDIKTRKVINMNRSMHPNSSVARLYLSRSIGGRGLQSLERLHDRLVLGLIFEVVNFTADEDDFLMQIVHKHENAHKGSFLYKAAIYAARTLGLGEINALMELRKEEFKSVIRNAEEKQLLGELMDKSMHSVYFKHLRDHGLSTQLTFSFLKSAGLMSETEGFIFACQDGVINTLEYRSKVLQVQLLDTSCRMCKQHPETLIHLLSACPVLARGAYIQRHNAALRVLYYYLRHYYGIDMTPVLPYLPGDIPQVVENDSCKIYWNMPFATTRRIDHNKPDIARLIARSA

SEQ ID NO: 9134 - protein, 1076 aa, Cotesia glomerata
MIDYIAQMHTLWSDMHPELTHFTPKHLRNYAAHLRRNRRSHVPDRRQSNRLSFPAQLHQERRRSSLGNNNTFIGRQVSISKKITYSQQQLDTVNEDLLTQIQEDSTLLAVNQVVYGAAVLAFPKERHRLSIEARLRQRIAQLGDKIDRSRKHVSRIQCMIEFETTQRAYTPRVRRIAAELRWRHHTLNKSTLLVIKEESLNKLRALVTAKKSLEKRLKRLVDNSLFRYSPSRFLTPKTVVTGNYPAPERVEAFWTELYGDQPNVNANTPALHDFKAFCRKHRRQNADEESPGVSVNEIRLALDGSRNRAAPGPDGINVFWWKKFTSTHLHLVRIFTSYIRADEPIPDWLVEGRTVLIPKKSDLSDPKNYRPITCLNAVYKIFTKILNNRILQEIGPIWQQIYEQRGNKRGLSGCKENLIVDRCVIQDAIYYQRNLSMAWIDYRKAFDSTPHELILYLLKCLGVNPETVECIRRTMQLWRTRFHIGNGNALHVTGVVEYKRGVFQGDSLSPLLFCISLLPISVALRKTHGYSVGPPGDRKYSITHLLYMDDLKLYSANEDHLQAALNIVAEYTRDFGMSFGLDKCAVIHLARGKCSETGDDVELVDGSILRQLGAGELYRYLGMEEHRMHAVSEVRATLRSEYVRRLRKIWSSELSGKNKVSATNMLAVPVLLYSFGVLKWARKDLRDLDIKTRKVINMNRSMHPNSSVARLYLSRSIGGRGLQSLERLHDRLVLGLTFEVVNFTADEDDFLMQIVHKHENAHKGSFLYKAAIYAATTLGLGEINALMELRKEEFKSVIRNAEEKQLLGELMDKSMHSVYFKHVRDHGLSTQLTFSFLKSAGLMSETEGFIFACQDGVINTLEYRSKVLQVQLLDTSCRMCKQHPETLIHLLSACPALAKGAYIQRHNAALRVLYYYLRHYYGIDMTPVLPYLPGDIPQVVENDSCKIYWNMPFATTRRIDHNKPDIVLFDKATRDIYVIEFSAPAEHNISAKEEHKRKIYQDLLFEIGKLYPGYCVKLVVLIVGILGGMKQSFVSSLAKVPACTSKSEFLAVRMQKAVILGSLRLLREMTLACCGR

SEQ ID NO: 9135 - protein, 953 aa, Cotesia typhae
MKDDDPGALRTYFKWTEELRVDLLVCYQRSEPGVSGYMARMHTLWSDMHPELAHFTPKHLRNYAAHLRRNRRSLVPDRRQSNRLSFPAQLHQERRRSSLDNNNPFVGRQVSISKKITYSQQQLDAVNEDLRATILEDSTLLTVSQVVYGAAVSAFPRERHCLSIEARLRQRILQLGSKIDRSRKHVSRIQCVIEFETTQKAYTPRIRRIVAELRWRHHTLNKSTLLVIKEESLNKLRALVTAKKSLEKRLKRLVDNSLFRSSPSRFLTAKTDVTGTYPTPERVEVFWTELYGDQPNVNANTPALHDFKAFCREHRRQNADEESPAVSVDEVRSALNGSKNWAAPGPDGINVFWWKKFTSTHLHLACIFTSYIRADDPIPNWLVEGRTILIPTKGDLSDPKNFRPITCLNAVYKIFTKILNNRILQQIEPVWQQIYEQRGSKRGLSGCKENLIVDRCVLQDAIYYQRNLSMAWIDYRKAFDSTPHELILYLLKCLGVNPEIVECIRRTMQLWRTRFHIGSGNALHVTGVVEYKRGVFQGDSLSPLLFCVSLMPISVALHKTRGYSVGPPGDRKYSITHLLYMDDLKLYTTDEDHLQAALNIVAEYTRDIGMSFGLDKCAVVHLARGKCSDTGDDVELVDGSVLRQLDAGELYRYLGMEEHRMHAVSEVRTTLQSEYVRRLRKIWSSKLSGKIKVSATNMLAVPVLLYSFGVLKWARKDLRDLDIKTRKIINMNRRMHPNSSVARLYLSRSIGGRGLQSLERLHDRLVLGLTHEVVNFTADEDDFLMQIVHKHENAHKGSFLYKAAIYAARTLGLGEINALMELRKEEFKSVIRNAKEKLLLGELMDKSMHSVFFKHVRDHGLSIQLTFSFLKSAGLMSETEGFICACQDGVINTLEYRSKVLQVQLPDTSCRRCRQHPETLMHLLSACPVLARGAYIQRHNAALRVLYYYLRHC

SEQ ID NO: 9136 - protein, 1478 aa, Ephydatia muelleri
MHIREQHMEQASSQRAREAANKEAQRGTTTAGTKWGEREIERFKEALARLGPSDNAKLAEAVGTRDKAQVSAFKCRFLKKHPTWLKDHCPPGRQAALNTSGSPTPSPTSSQTSPQATEDHHPPSTRMGNRARPADTRGIKSRNGRTTASPVSPTPTPPDYAPPASTGAPPSTTWQYSSPEGEAADQSPQPQEPQATASQEVGTPSPQPAPISTEAALKLQRLDQALDLLRSNRIEQWEPAPRDPSSLAHDSTSPHAEVATSTTPEWTAPPPTPTGQEGEQSQLNREAALAILTMDNIELWDPEEEMLSPTLLAGIATPPSAPSLSVTEHQQCRLEEGDTANRAANQLPLQLATSSTPPPARATKGQRSDLEEDEVDFLLQELTAPREEALAPPPTTLVHHIDAQPFIPGVPWTAVRTRQSNQGQQAQQERAVRHTSSPPTPHPSPQNTSPPARVSERQHHSLGVNVTNPLPPLARARGAPPRISIDPDRMDETLRHPFHTELTPFTGRHLGDFEWVAFEETLQRWSTAIKEVVTAQRRRPPNPTSQWSRRRRRREQETRGARSPTPTPEISDDPSQPSEEQDQGPTNNRASGRARRAAKARRLQKLYRANPGVCMRQLLDNTPRVYCAIAEPELVAHFTTTFTAPPPLAPPPTWLFTDRHPGNDGTPGATVEGDVLQSPITPEDVVTQFKRSKRTAPGADGISYSNWRWVDPLGLILSTIYNICRINSRIPHPWKHSTVTLIHKGGDVTSVRNWRPISLQLTVYKLYSAIIARRIASWAIATSAFSEAQKGFLAYDGCAEHNFMLRSMMTDSRRRRKDALFTWLDLRDAFGSVPHELMLLLMKRLGLAGTVIRDIYSHSTIAVRTGRESYTPAIPQNRGVKQGCPLSPILFNIALEGLLKHLSTSTAGYAIAGYTINALAYADDVCVIATTKPDLQGILDRCKEFADWAGLAFNAKKCGSLYLVNHTSRLYVDHLYSPHLGTDPIPALSWEERYKYLGCPTGAYRTPTNILNDLRDNLIRDTGTVFSSQLAEWQKLDAFRRFLFPRLCFIMKVIFPGTVWCRKLDTVLRTTIKRGLHLPPRTCTKYLYLSQALGGLGVPSAEDESHVSRAAQAFKYLADTRDRRIRGVALDQLSETVAKRARQLDHTTHEGLHLFLNSSPGPGEGRAGDLQTLWSAVRNSLVLTNATICLSQDSATISIGRHKLSWDKRKLLSQTLKTGLQDRHLAAIKASPDQGRAFDSVSLHPDSTFFTYTGAFLSFPQYRFIHRARLNLLPVRTVQARSRRPVTTTQCRTCGRAEETLAHIINHCHYNLGMVRDRHNAILERIVRAVPDYVGTKMKEQAIPGTTGNNRPDLTITSPDASTVFIVEVSCPFEGSPYALEDAAKTKLEKYEPLKQQLLQQHQQVYVYPFIVGSLGSWYPENDRVLSALHIGHRYAALMRRLCVVSAIAGSQNIWYQAVCKRDHHLNQTSNPLQQPAM

SEQ ID NO: 9137 - protein, 972 aa, Ephydatia muelleri
MDETLRHPFYQELTPFTGRHFGDFEWVAFEEVLLRWSTAIKEVVTAQRRRPPNPTSQWARRRRRREQEAQGARSPTPAAEPHEDPSQPSEEQGPTNNRASGRARRAAKARRLQKLYRANPGICMRQLLDNTPRVYCAITEPELVAHFTATFTAPQPLGPPPAWLFPDRRPGDTGVPGATDEGDVLQSPVTPEEVVTQFKRTKRTAPGADGISYSNWRWVDPLGLILSTIYNTCRVNSRVPRPWKHSTVTLIHKGGDVTSVRNWRPISLQLTIYKLYSAIIARRIASWASVTSAFLDAQKGFLAYDGCAEHNFLLRSVMTDSRRRKKDVILTWLDLRDAFGSVPHQLLLSLMKRLGLSGTVLDVVRDIYSHSTIAVRTERESYTPAIPQNRGVKQRCPLSPILFNIAHEGLLRHLSTSSAGYTIAGYTINALAYADDVCVLATSRTDMQGILDRCKEFADWAGLAFNANKCGSLCLINHTSRLYVDHLYNPHLGTDPIPALSWQERYKYLGCPTGAYRTPTNVLNELRDNLIRDTGIVFSSELAEWQKLDAFRRFLFPRLCFAMKVVFPGAIWCKKLDTALRTNIKRGLHLPSRTCTKYFYLSQALGGLGIPSAEDESHVARAAQAFKYLADTRDRRIRSVALDQLTETVAKRARYLDHTTHQGLYLFLNTSPGPGEGRAGDFQTLWSSVRNSLILTGATIRLTQDSATISTRQHELTWDKRKLLFHVLKKGLQDRHLGTIKRSTDQGRAFHSVSLHPDSTFFTYTGAFLSFPQYRFIHRARLNLLPVRTVQARSHRPVTTTQCRICGRAEETLAHILNHCHYNLGMVRDRHNSILERIVRAVPDYMGTKMKEQAIPGTMGNNRPDLTITSPDGSTITIVEVSCPFESSPNALEDAAKAKLAKYEPLKQHLLQQHQHVHIYPFIVGSLGSWYPRKRPGAVSPPHRPSLRGSDAPPLCGVGHRRVTEHMVPSHM

SEQ ID NO: 9138 - protein, 1170 aa, Ephydatia muelleri
MEEMLATLNQHNTELMEKALAILSQPNIQLWDPELEILSPSLEGIHTPPPTPPLATVTERRHCSPGLGVDLRSQLTVVTALPAPATAPPLATVTERRHCSPGVGVDLRPQSQRPPTPAIHTGETPRSSPTEEAPVSIFQSLLHAQEFIPRTFSRTRQADELLRPPRGEEAPSTSPPPMPPSSPVHTPPSTTASARQRCGSGAGVAVYQLLPPPPPAGEANPPTPPTSPGLPSPLACVPGPPPTITIDPERMDETLRIPMYQVIPFSGRQLGAFEWVAFEEVLMQWSTAIREVVTAQHRRPPNPTSQWARRRMRRAREGEGCPPSPSPDPELPPDPSQQTEVQEQDQNTTTTRASGRARRAAKARHLQRLYRANPGVCMRRLLETKGGDVTLVQNWRPISLQLTLYKLYSGIIARRIATWATETLAFSAAQKGFLAFDGCAEHNFLLRSMMTDSRRRKRNLLLAWLDLRDAFGSVPHHLMLSTMERLGLSGSVLKIVRDIYSHSTVAIRTGRDSFTSAIPQNRGVKQGCPLSPILFNIVLESLLKYLTTNKAGYTLAEDSYNSLAYADDICVAASTKEELQSLLDQCKEFADWAGLAFKVKKCGSLCLVNESHHAYVDHLFTPHLGTEAIPALSWEDRYRYLGCPVGAYRTPTKILDELREGVLRDCGIVFTSELAEWQKLDAYRRFLFPRLSFVLKVVFPGAIWCRKLDTAIRAVIKRGLHLPPRTCTQYLYLSQALGGMGIPSVEDESHVARSAQAFKFLSDSRDVRVRNVAINQLVATVAKRAPYLDPTDPGHLERWLNTSAGPLEGRAGDLQSLWSAVRQSLILTSSSIRLTEESATLHTTKHTITWDRRKLLYQVLKEGTNDRHLTILKRSADQGRATFSTSLHPDSTFFTYTGAFLSFPQYRFIHRARLNLLPVRTVQARCHRPVPNTQCRTCGRVPETLAHVLNHCHSNLGMARERHNAILERIVRAVPEFLGTKMKEQPIPGTTGDNRPDLTIISPCGTRVTLVEVSCPFEGTPTALEDAANLKVTKYEPLRQQLLQTYAEVTILPFIVGSLGSWFPDNDRVLSTLRIGRKYAALMRRLCVVSAIAGSQNIWYQAMCKSHHRPTRGAAGPAGSTGTDVAASDGTAADGGGPAIEAGISGAAGGHITPQGSATSGEASDPATHI

SEQ ID NO: 9139 - protein, 1122 aa, Bellardia pandia
MNQQRAIRGSANEMGTMNDINTSSSGGNSLRITSSIPLHEHRLGNRRSNRVSSTALDAHSSNLVSPSARGTQNNNDFQNIMPSVAQDEYNSNYRSNNIETINQIALVGGGSGPNTNAYPCVECGRSFTTKSGLGVHIRRAHPDLSDRMHVRTDKKARWNDEELSLLACAEAELSQRGGVRFMNLALHERFVHRTVEAIKKARQKNEYKEKVQTFINRLIASADGPNSIASAWAHSHEPITETLEIVSEDTPAVDIPHIREHPIVDDPLRSFLLSLEDLNTEQYRASYLNCIVHSVIENDKEHVLLRLSGYLDEEFPPSLESRQRVNRRPAPTFTNRRRRRRHEYATVQRNWHKHKGRCIRSILDGTESCSQPARITMEPYWRELIERQDLSEPQRDNLGCFNTGNIWYSISLLDIQNSKPDLSTSPGPDGITSRQLRAVPLPILVRIFNLIMWCGKIPRRFREARTIFIPKKQKPSLPEDYRPITLSSILIRWFHSILSKRIFQCINFERKQKGFMPTDGCADNTTMIDLLIRDHHQKYASCYIAVLDVSKAFDSVSHNAIYGTLESYELPQELINYIKHVYSTSCIRLSGDTWLSEQMLLPGRGVKQGDPLSPVLFNMVMDRLIRRLPSEIGCRIGNSNSNIAAFADDLVIWASTPKGLQKLLDITSEFLLSCGLKLNSGKCFSVSIKGQPKQKKSVVVQENFTIEGRVIRAWKRSEEWKYLGVKFTAEGRTKVNLKDDLKEKLDLLTRAPLKPQQRLYALRTVVIPQLYHVLTLGNVMIGCLNGIDKTVRAYVRKWLSLPDDIPVAFFHASVDDGGLGIVALRWQAPLLRLNRLRNLQLPLPSGIVAADDFVSSEIVKVERRLETGVYRILSREELKAYWADRLHASVDGHGLERSSDHRQAHRWITEPTRLLSGKDFVNCVKLRINALPSRSRCSRGRTSDRRCRAGCEAQETLNHIVQGCYRTKRDRVKRHDNIVSFVGRSLRARGFRVGIEDRLHTVDGIRKPDIVAIKGDEIYVLDAQIVTDGRDLSVIHRDKVGKYNNEGIKRALLDKYGRDQVHFGAITLNFRGIWCRDSVNSLLLWKMISVRDTALISTRTMLGGIISHRKFMCAVVDRTGIG

SEQ ID NO: 9140 - protein, 1172 aa, Chrysomya rufifacies
MVFHEDTSLWIHSTKRLMNKASEVPGAASPFDPVQIGTNTRNNNDINDITSRVSARETPILCDSGLQADTLSNLLVHSAVREPSVANNNPSAIHQGGVVNSGVRDGTITSLLSSSSSTTNQALGSSRGTVVRPGLPTPTRRGVRTRTVREVTSGSNLDLHEESGADPLVANMVQGHGGLPDPAASGNPHTCVVCGRSFSTKSGLGVHIRRAHPDESDRINVRSDVKARWNDEEISLLACAEAELTFAGGVRFMNHALHERFVHRTVEAIKKARQKDSYKSKLQDYLSRLMAQNTEAPLDANVQAHSQLETPEPQEDSIQTFLLSLNDLDTEGYNAQELNSIVRSVIESDKDFVLHRLSGYLNGIFPPNPRARQRAVTRPPPVNMNRRKRRRHEYATTQRNFYKHCTRCIKSIIEDTGECSQPPKAIMEPYWKNIFEKTELSEPPYEDLSRQLRGNIWCPIDEACIRNTKPSLSTSPGADGITSRQIRAVPIPILVRIFNLMMWIGKVPRRLRVAKTIFIPKKKNPQLPEDFRPITLGSILIRWFHSILAKRISSSISFELSQRGFMPTDGCADNTTMIDLLLRDHHQRFASCYIAVLDVSKAFDTVSHNALYGTLTSYGMNERFIGYIRHVYSSFSIQLSGDTWESDHPILPRSGVKQGDPLSPVLFNLIIDRLIRKLPAEVGCKIGNHMTNVAAFADDLIIWASTPGGLQKLLDIVHDFLKSCGLRLNSAKCRSISIKGQPKQKRSVIVQNEFKINGVTMPALKRTEEWKYLGVTFTADGRTKVDLKDELSQKLDLLTRAPLKPQQRLFALRTVLIPQLYHVLTLGNVMIGCLNGIDRTVRSYLRKWLRLPDDAPIAFFHADVEDGGLGIISLRWQAPLIRLNRLRNLQLPLPGGTVTADTFIASEVAKVERRLDTGVVRILSKGDLKSFWANRLHESFDGRGLLHCSDHKQAHRWLKEPTRLMSGRDFIHCVKLRINALPTLSRCSRGRGTSRRCRAGCEAQETLNHVVQGCYRTKADRTKRHDSLVKYLDRNLRNKGYMTLVEGQFRTTDGIRKPDIVASKGNEIYVLDAQVVTDGRDLSSMHRCKVGKYNTLGMVRSLTDRFNATQVHFGAITLTWRGIWCRESVSDLLRWGFIERGEVAILGIRVMLGSIIAHRRFLRYTSRRTGIG

SEQ ID NO: 9141 - protein, 1122 aa, Bellardia pandia
MNQQRAIRGSANEMGTMNDINTSSSGGNSLRITSSIPLHEHRLGNRRSNRVSSTALDAHSSNLVSPSARGTQNNNDFQNIMPSVAQDEYNSNDRSNNIETINQIALVGGGSGPNTNAYPCVECGRSFTTKSGLGVHIRRAHPDLSDRMHVRTDKKARWNDEELSLLACAEAELSQRGGVRFMNLALHERFVHRTVEAIKKARQKNEYKEKVQTFINRLIASADGPNSIASAWAHSHEPITETSEIVSEDTPAVDIPHIREHPIVDDPLRSFLLSLEDLNTEQYRASYLNSIVHSVIENDKEHVLLRLSGYLDEVFPPSLESRQRVNRRPAPTFTNRRRRRRHEYATVQRNWHKHKGRCIRSILDGTESCSQPARITMEPYWRELIERQDLSEPQRDNLGCFNTGNIWYSISPLDIQNSKPDLSTSPGPDGITSRQLRAVPLPILVRIFNLIMWCGKIPRRFREARTIFIPKKQKPSLPEDYRPITLSSILIRWFHSILSKRIFQCINFERKQKGFMPTDGCADNTTMIDLLIRDHHQKYASCYIAVLDVSKAFDSVSHYAIYGTLESYELPQELINYIKHVYSTSCIRLSGDTWLSEQMLLPGRGVKQGDPLSPVLFNMVMDRLIRRLPSEIGCRIGNSNSNIAAFADDLVIWASTPKGLQKLLDITSEFLLSCGLKLNSGKCFSVSIKGQPKQKKSVVVQENFTIEGRVIRALKRSEEWKYLGVKFTAEGRTKVNLKDDLKEKLDLLTRAPLKPQQRLYALRTVVIPQLYHVLTLGNVMIGCLNGIDKTVRAYVRKWLSLPDDIPVAFFHASVDDGGLGIVALRWQAPLLRLNRLRNLQLPLPSGIVAADDFVSSEIVKVERRLETGVYRILSREELKAYWADRLHASVDGHGLERSSDHRQAHRWITEPTRLLSGKDFVNCVKLRINALPSRSRCSRGRTSDRRCRAGCEAQETLNHIVQGCYRTKRDRVKRHDNIVSFVGRSLRARGFRVGIEDRLHTVDGIRKPDIVAIKGDEIYVLDAQIVTDGRDLSVIHRDKVGKYNNEGIKRALLDKYGRDQVHFGAITLNFRGIWCRDSVNSLLLWKMISVRDTALISTRTMLGGIISHRKFMCAVVDRTGIG

SEQ ID NO: 9142 - protein, 1122 aa, Bellardia pandia
MNQQRAIRGSANEMGTMNDINTSSSGGNSLRITSSIPLHEHRLGNRRSNRVSSTALDAHSSNLVSPSARGTQNNNDFQNIMPSVAQDEYNSNDRSNNIETINQIALVGGGSGPNTNAYPCVECGRSFTTKSGLGVHIRRAHPDLSDRMHVRTDKKTRWNDEELSLLACAEAELSQRGGVRFMNLALHERFVHRTVETIKKARQKNEYKEKVQTFINRLIASADGPNSIASAWAHSHEPITETLEIVSEDTPAVDIPHIREHPIVDDPLRSFLLSLEDLNTEQYRASYLNSIVHSVIENDKEHVLLRLSGYLDEVFPPSLESRQRVNRRPAPTFTNRRRRRRHEYATVQRNWHKHKGRCIRSILDGTESCSQPARITMEPYWRELIERQDLSEPQRDNLGCFNTGNIWYSISPLDIQNSKPDLSTSPGPDGITSRQLRAVPLPILVRIFNLIMWCGKIPRRFREARTIFIPKKQKPSLPEDYRPITLSSILIRWFHSILSKRIFQCINFERKQKGFMPTDGCADNTTMIDLLIRDHHQKYASCYIAVLDVSKAFDSVSHNAIYGTLESYELPQELINYIKHVYSTSCIRLSGDTWLSEQMLLPGRGVKQGDPLSPVLFNMVMDRLIRRLPSEIGCRIGNSNSNIAAFADDLVIWASTPKGLQKLLDITSEFLLSCGLKLNSGKCFSVSIKGQPKQKKSVVVQENFTIEGRVIRAWKRSEEWKYLGVKFTAEGRTKVNLKDDLKEKLDLLTRAPLKPQQRLYALRTVVIPQLYHVLTLGNVMIGCLNGIDKTVRAYVRKWLSLPDDIPVAFFHASVDDGGLGIVALRWQAPLLRLNRLRNLQLPLPSGIVAADDFVSSEIVKVERRLETGVYRILSREELKAYWADRLHASVDGHGLERSSDHRQAHRWITEPTRLLSGKDFVNCVKLRINALPSRSRCSRGRTSDRRCRAGCEAQETLNHIVQGCYRTKRDRVKRHDNIVSFVGRSLRARGFRVGIEDRLHTVDGIRKPDIVAIKGDEIYVLDAQIVTDGRDLSVIHRDKVGKYNNEGIKRALLDKYGRDQVHFGAITLNFRGIWCRDSVNSLLLWKMISVRDTALISTRTMLGGIISHRKFMCAVVDRTGIG

SEQ ID NO: 9143 - protein, 1086 aa, Lucilia sericata
MNLRQRAIRETLGSMNLSSVPEESSVTGTRVNIFNSTTSNPMSRLGDSNSNSNSNHLNLNTPEQAGGDSGVSVGASGMTDTPHLCVVCGRSFSTKSGLGVHIRRAHPDVSDQMNTRSDKKARWNDEEISLLACTEAELIHNGGVRFMNHALRERFVHRTVEAIKKMRQRDEYKVKVRTYLDRLASAEGQTNIASAWVPNQDAIMETSEVVDEVAPIVEHPLNGPLPIVEDPIKTFLLSLDDLDTDSYCAPYLNSIVRSVNENDKDHVLHRLSGYLDEVFPPRLRTRRQVLPRPPPTFTNRRKRRRHEYAKVQRNFRRHSGRCIKSILDGTESCSQPPRDIMEPYWKAVFEHREEVGPQCENLSRYLLGNPWYPIEHDEIKGSEPSLTTSPGADGITSRQIRSIPTNMLVRIFNLMMWCGKIPRRFRVARTIFIPKKQEPSLPEDYRPITLSSILLRWLHSILAKRISKCINFERRQKGFMPTDGCADNTTMIDLLLRVHHQNFESCHIAVLDVSKAFDSVSHKAILGTLKSYGLPQELVDYISHLYETSGITFAGDTWESDQLVLPGRGVKQGDPLSPVLFNLVVDRLIRKLPVELGCRIGNQMTNIAAFADDLVIWASTPLGLQKLLDITSEFLLSCGLRLNSAKCLSVSIKGQPKQKKSVVVQQEFKIAGRSISALKRTDEWRYLGVTFTADGKSKVDLKKDLIVKLDRLTRAPLKPQQRLFALRTILIPQLYHVLTLGNVMLGCLNGIDRTIRHYVRKWLSLPDDVPVAFFYALVEDGGLRLVALRWQAPLLRLERLRNLQLPLDSGIVSADTFVAAEVAKVERRLLAGDIRILSKGDMRAYWAKRLYDSFDGRGLLQSKDHKQAHRWVREPTRLLSGRDFINCIKLRINALPTRSRCSRGRTSNRRCRAGCEAQETLNHIVQGCYKTRADRTKRHDSVVKYVDRSLRGKGFTTVVEGRLQTIDGIRIPDIVAYKGEKIYVLDAQVVTDGRVMSEMHREKTNKYNNQGVIRALTDLYGRDQLHFGAITLNWRGIWCRESVDRLLDWGLIRKSDTAIISTRVMIGGIISHRRFMDPRSLRSGIG

SEQ ID NO: 9144 - protein, 1087 aa, Cochliomyia hominivorax
MSGSNLISRIGVDSIANSNHLSPPARGSQNNSNRLAPAAPGVQNDSNHLPPAAPGAQNTVGNGSGLGLDVGSTGSAVANNSEGVADDGGSVTTSHTCVVCGRSFSTKSGLGVHIRRAHPDESDRMNVRVDIKARWNEEEISLLACAEAELIKNGGVRFMNHALHERFVHRTVEAIKKARQKDSYKSKVQDYLSRLIAAESEPIISADVWAPNQQQMDESEINNNIEPGVGDSIRNFLISLGDYDDEYYKSHLLNSIVHSTRVEQKSHVLHRLSGYLDEILPPNLRTRRQALPRPPPTLQNRRKRRRHEYAITQRNFKKHSTRCIKSILDDTKNVSQPPRLVMEPFWKNIVERTELSKPQNENLSSRFRGNVWHPIDEDEIRCTKPSLSTAPGIDGVTSRQIRSIPVPILVRVFNLMMWCGEVPRRFRLARTIFIPKKQLPANPGDYRPITLCAILVRWFHSILAKRLAKCIEFERSQRGFMPTDGCADNTTLIDLLLREHHQNFSSCYIAVLDVSKAFDSVSHNTIYGTLESYGLPQELVDYIRHVYSTFHIRFTGDTWESDRPILPGVGVKQGDPLSPVLFNLIIDRLIRKLPSDIGCRIGNHMTNIAAFADDLVIWASTPCGLQKLLDMVSEFLKSCGLRLNSAKCLTVSIKGQPKQKRSVIVQKEFTIEGRTISALKRTDEWRYLGVNFTAEGRTKVDLMDDLIVKLDRLTRAPLKPQQRLFALRTVLIPQLYHVLTLGNVMIGCLNGIDRTIRKFVRKWLCLPDDVPVAYFHARVEDGGLGIVSLRWQAPLMRLNRLKRLQLPLPNGIVSADLFIASEVIKAERRLDTGVCRILSNMDLRKFWAERLHDSFDGRGLTLCKDHKQAQRWLAEPTRLMSGRDFIHCIKLRINALPTLSRCSRGRTSNRRCRAGCEAQETLNHIVQGCYRVRQDRTRRHDSVVNYVNRALRGKRFETIVEGRLQTSIGVRKPDIVAFKEDKVYVLDAQVVTDSRDMSEMHRCKVEKYRHPEVIRAIRDRYGCDNIHVGAITLNWRGVWCRDSVLDLIDCGVIKIRDTAIISIRVMLGGVISHRKFLRMVRDRTGIG

SEQ ID NO: 9145 - protein, 1128 aa, Lasioglossum lativentre
MAGERIEASDIEVPDPGTSMADLSAMIRRVNDDEHGNVPGNDFGMIVDLPLSGQIKCQFCEGRKKQFLNERDFDKHLERYHALARVGWRCAQCEKTFERMHGCKCHIPRCKGRAQVPVSGAVQFECSECGSVFGTQRGLSQHERHRHPEVRNEKRMREAVSASPVSRASVWTMEETQELIRLNDIYKNERQPNVKIGEFLTSKTAKQIGEKRRLLKLLPTRRVEMIAEETSSESGSSLNEPATEHQANDDLPEQSDAWKKNIKDVIMAYPLNDNHEMKSIERMIMDMASREVLEPLDTERIVDAIMEKVKENIRAEPSTRKRNDNGNQRKESDRTRYQKYRYARYQELYDKCPRKLVDMAVAGETIEERKQIELPERTKIEELYGNLWGTSGPTTGIPKLGRGPSIVSPMEECWRPISMEEILEKMKKIKNDTAAGVDGVTKANLRQPGFLHILWKLCNLLMLFRTYPAQWKKNRTTLIPKQGKDTKDAKNWRPITIGSLMGRIFSAMIDTRLRRAIRNSIRQKGFTKEDGCKYNISILEKIIKEMKENSGGIVTIVDISKAFDTVPHKAVGDGLKLKGLPPAITEYIEGMYDDCWTEIRTGGQEANIKIKLNRGVKQGDPLSPLLFNTIIDPIIQNIDETTEGIQMGDEKVSILAFADDIVLIAKSEVEATNQISKLDRYLGKLGMSIQADKCATFQIVRKNKTWHLRDPDIRIREHSIPASRPEDVTRYLGVNLKPWSGLQHAEIQHILKAARNIDQMGLKPHQKVNLIRVHLLPKYIHMLVANPPPLNLMETMDHEIKQIIKKILHLHPSTTDGLIYTGKRNGGLGIQKIADIVRIAKIRNGLRMKDSDDGAVREAYQRQEDVIIKYARSVGLEWPTTDDALESARCKLKRKCHEEWGQLVSQGHGVYEFVDDKYGNAWLYRPELLKPSRYLDALKLRTNTFGTKVALRRARRDLDPQCRRCKIQVETLGHILGNCIHTKSARMNRHNEIVRMIERKASKNSAVFTEPTVNVAGELKKPDLVIKNQDGKVLVVDVTVRYEDKDNLRKARKDKIDKYKETAELIRRKLQCESAEVLPVVVGCRGALPAGSVRNLKSLGFNKGDMVTVAMIALRSSIEIANSFIDYD

SEQ ID NO: 9146 - protein, 1130 aa, Lasioglossum lativentre
MADTEIEEASDVEAPGPGVSTADLSALDRRVIDDDNGYVPGQEFDLLVEVPLSGEVRCGLCTANIQFLQIGDFAKHLERHHINSKIGWKCAFCSKVFDKLHGCRCHKPHCKGRTPAQDQSENPQEEREVRCPICRAAFATQRGLSQHERYRHPNVRNDKRTAEAVPPRPVSRASVWTRAETQLLIELNDRYKHAAQPNAQIAKFLVTKTAKQIGEKRRLLKLLPTQREEIIVEQTRSRSSSSSQESTTEDQAEELLEEESDAWKNRFKDLIMAYPLKENHELKSIERMIMDLANKEELEPMDTERILDALMEHVKENVRAEPSARRKVNGDKSKESDRTRYQRFKYARYQEMYKKCPRKLVDMAVAGETLEQRKQIELPERADIEALYDNLWGTSGPTTGLPKLGGGPSAVSTLEECWKPISQEEIIEKMKRIRNDTAAGVDGVTKAQLRQPGFLHIAWKLFNVLMLFKTYPAQWKLNRTTLIPKPGKDTKDAKNWRPITIGSLLGRMFSAMIDIRLRRIIKNSKRQKGFTKEDGCKYNITILEKIIKEMKERTGGIVTIVDISKAFDTVPHKAVGDGLKQKGLPPAVADYIEGMYDNCWTEIKTTGENIKIKLRRGVKQGDPLSPLLFNTIIDPIIQNIDETTEGIKMGDDNVSILAFADDLVLIAESEKEATTQISKLNKYLNKLGMSIQADKCATFQIVRKNKTWHLKDPDIHIGDQRLPASQPEDVTKYLGINLKPWVGLQRAEIQTILKAAGNIDKMGLKPHQKIELIRIHLLPKYIHMLVANPPPLNLMEALDHEVKQIIKRILHLHPSTTDGILYTGKRNGGLGIQKIADIVRIAKLRNGLRMKDSDDGAVREAYRRQEEIMNKYARSVGLQWPTTDEELESTRCRLKKKCHEEWGRLVSQGHGVYEFVDDKHGNAWLYRPELLKPSRYLDALRIRTNTFGTKVALRRARREIDPQCRRCKIQVETLGHILGNCIHTKPARINRHNEIVKMIENKASKNAAVFTEPTVNVAGELKKPDLVIKNQDGKLYVVDVTVRYEDKDNLRKARKDKIDKYKETAEFIRVKLGCETAEVLPVVVGCRGAVPAGTVRNLKTLGFNKGEMITVAMIALRSSIEIANSFIDYD

SEQ ID NO: 9147 - protein, 1126 aa, Lasioglossum lativentre
MANEDDDASDVEVPGPGTSTADLSATDRRAIYDELGNVPGNDFKMVVDLPLSGQIICRCCDSQNKHFLKVGDFVKHLEKHHGQERIGWRCAQCDKIYEKVQGCRCHIPRCKGRQEPDEDATFLCSSCGRAFGTQRGLSQHERIRHPRVRNEIRMREATPAGPVNRASVWTTEEVQELIRLNEIYKYDRQPNAKIGRFLTSKSFRQICDKRRLMNLLPTQTIETAVEDERNSTSSSASYISTTEELEDDNNNEADAWKEKFRDAIRAHPLSEDHELRGIERMIMDLASKEALEPLDTERILDAMMEKAKENTKGERNVRRRGKEDSGNKRRESDRTRYQKYKFARYQELYRKCPRKLVDMAVAGETIEQRKQMELPERGNIEELYGNLWGISGPTTGIPKLGRGPSIVSPMERVWTPISMEEIIEKMKRIKNSTAAGVDGITKAHMRTPGFLHILWKFYNVLMLFQAHPEQWKLNRTTLIPKAGKCTKDVKNWRPITIGSLLGRVFSAMIDNRVRGIIKNSMRQKGFTKEDGCKYNISILEKVIKEMKEKKGGVVTIVDISKAFDTVPHKAVGDGLKRKGLPTAVAEYIEGMYDDCWTEIKTRGQEIKIRLKRGVKQGDPLSPILFNTIIDPIIENIDETTEGIKIGEESVSILAFADDLVLIGKTESEASKQLKKLNKYLTELGMSIQAEKCAAFQIVHKSKTWHLKDPQLKIGDRNLPASEPDDAIKYLGITVEPWTGLKRVEIQNILKAAGNINMMGLKPHQKVELIRVHLLPKYIHLLVGNPPPIKLLETLDHEIKQIIKKILHLHPSTTDGLLYTSKRNGGLGVQKIADIVRIAKLRNGLRMKDSEDGAVVEAYRRQEDTFIKYARSIGLQWPITEDDLDSARCRLKRSCHEEWGRLISQGHGIYDFVDDKHGNAWLYQPTLLKPSRYLDALKLRTNTVGTKVALRRARREIDPQCRRCKIQVETLGHVLGNCIHTKPARIHRHDEIVKMIEKKVPMSSAVFVEPTVNVAGELKKPDLVIKDQEGKILVVDVTVRYEDKDNLRKAHKDKIAKYKETAEQIRVKLNGKTAEVLPVVVGCRGAMPMGTARNLKTLGFNKGERITVAMIALRSSIEIANSFIDYE

SEQ ID NO: 9148 - protein, 1123 aa, Lasioglossum albipes
MAEHSESEEASDVEAPGPGVSTADLSATARRVTGNDTGNVSGNEFGMYVDLPLSGQIKCRFCEGRNRQFLQVGDFTKHLDQQHAQKKVGWRCAQCGKVFDKVHGCRCHIPKCKGRAEQESHRFRCPTCGSAYKTQIGLSQHERHRHPVVRNERRMREATPNRPVNRASGWTTEEKQELIRLNEIYKYTTQPNAQIGRFLTTKTCKQIGEKRRLMGLIPTQRAEIVDEEEDSDSSSSSTSYESATEDQTEEESDVWKEPFKTAIKAFPLGDDHDMKAIERMIMELADKEALEPLDTERILDAMMEKLKDEMRAENSVRRRGGNGNRTGDSDRTRYLKYRYARHQELYKKCPRKLVDMAVAGETMEKRKQVELPERAGIEELYGNLWGTSGPTTGIPKLGGGPSTVSPLEESWKPISIHEIIEKMRRIKNDTAAGVDGVKKAHLRRPGFLHILWKLFNVLMLFQTYPTQWKMNRTTLIPKAGKDTKDAKNWRPITIGSLLGRIYSAMIDVRLRRVVKNSMRQKGFTKEDGCKYNVSILEKVVKEMKEKTGGVVTVVDISKAFDTVPHKAVGDGLKIKGLPPTVANYIEKMYDDCWTEIKTNEGNIKIKLNRGVKQGDPLSPLLFNIIIDPIIDNIDETTEGIKIGDEKVSILAFADDLVLIAKSEQEASCQMKKLDEYLRSLGMSIQADKCATFQIVRKNKTWHLKDPKITIRDQCLPTSQPDDLIKYLGVNLNPWSGLQRVEVQNILRAAENINRMGLKPHQKINLIRVHLLPKYIHILVASPPPLNLLETLDQEVKQIVKKILHLHPSTTDGLLYTGKRNGGLGIQRIADIVRIAKLRNGLRMRDSEDGAVVEAYRRQEDIITKYARSVGLQWPVSEEELETTRCRLKRKCYEEWGLLVSQGHGVYEFVDDKHGNAWLYRPELLKPSRYLDALKLRTNTFGTRVALRRARRDIDPMCRKCKVQAETLGHVLGNCIHTKPARIHRHDEIVKMIENKAPGGSTVFREPTVNVAGELKKPDLVIKDQEGRLLVVDVTVRYEDKENLRKARNDKIEKYKETAEHLKVRLKCRSAEVLPVVVGCRGAIPAGTVRNLKTLGFTKGNIVTVAMIALRSSIEIANAFIDYD

SEQ ID NO: 9149 - protein, 1128 aa, Lasioglossum lativentre
MANEDDDASDVEVPGPGTSTADLSATDRRANYDELGNVPGNDFRMIIDLPLSGQIICQLCGSQNKHFLQVGDFVKHLEKHHGQEKVGWRCAQCDKTYEKVQGCRCHIPRCKGRQEPDEDATFLCHICGRAFGTQRGLSQHERIRHPRVRNEIRMREAAPAGPVNRASVWTTEEVQELIRLNEIYKYDRQPNAKIGQFLTAKTFRQISDKRRLMNLLPTQRIETVVDEERNSTSSSASHISTTEEQADNNSNNNETDAWKEKFKDAIRAHPLNEGHELRGIERMIMDLANKEALEPLDIERILDVMLEKAKENTRVERNVRKKKRADSEEEKRESDRTRYQKYKYARYQELYRKCPRKLVDMAVAGETIEQRKQIELPERENIEELYGNLWGTSGPTTGIPKFGRGPSIVSPMERAWTPISIEEIIEKMKRIKNSTAAGVDGITKAHMRTSGFLHILWKFFNVLMLFQAHPEQWKLNRTTLIPKAGKCTRDVKNWRPITIGSLLGRVFSAMIDNRVRRIIRNSMRQKGFTMEDGCKYNISILEKVIKEMKEKKGGVVTVVDISKAFDTVPHKAVGDGLKRKGLPTAVAEYIEGMYDDCWTEIKTRDQKIKIRLKRGVKQGDPLSPILFNTIIDPIIENIDETTEGIKIGEESVSILAFADDLVLIGKTETEASKQLKKLNKYLNQLGMSIQAEKCAAFQIVHKNKTWHLKDPQLKIGEQTLPASEPDDAIKYLGITVEPWTGLKRAGIQNILKAAGNINMMGLKPHQKVELIRVHLLPKYIHLLVANPPPLNLLETLDQEIKQIIKKILHLHPSTTDGLLYTSKRNGGLGVQKIADIVRIAKLRNGLRMKDSEDGAVVEAYRRQEDIMIKYAKSVGLQWPITEDELNSARCRLKRRCHEEWGQLISQGHGIYDFVDDKHGNAWLFQPTLLKPSRYLDALKLRTNTFGTKVALRRARREIDPQCRRCKIQVETLGHVLGNCIHTKPARIHRHDEIVKMIEKKVPRSSAVFVEPTVNVSGELKKPDLVIKDQEGKILVVDVTVRYEDKDNLRKAHKDKIAKYKETAEQIRVKLNGKTAEVLPVVVGCRGAMPMGTARNLRTLGFNKGERITVSMIALRSSIEIANSFIDYD

SEQ ID NO: 9150 - protein, 1124 aa, Lasioglossum albipes
MAEHSESEEASDVETPGPGVSTADLSATARRATGNETGNVPGSEFGMHVDLPLSGQIKCRFCESRNRQFLNVGDFMKHMEKQHAQKKVGWRCAQCGKVFDKVHGCRCHIPRCKGRAEQEGLRFKCSICGNAYKTQIGLSQHERHQHPVVRNERRMREATPDRPVNRASVWTMEEKQELIRLNEIYKHTTQPNARIGRFLTTKTCKQIGEKRRLMGLIPTQRAETVAEEEDSSSSSTSFESATEEQTEEEGFEQTDVWKEPFRTAIKAFPLNEDHDLKTIERMIVELADKEALEPLDAERILDAMMEKLKDEIRAEDSVRRVNSGNRARENDRTRYLKYRYARHQELYKKCPRKLVDMAVTGETIEKRKQVELPERAQIEELYGNLWGTGAPATGIPRLGGGPSTVSPLEECWKPISIQEIIEKMRKIKNDTAAGVDGVKKAHLRRPGFLHILWKLFNVLMLFQAYPAQWKRNRTTLIPKAGKDTKDAKNWRPITIGSLLGRIYSAMIDIRLRRIIRNSRRQKGFTMEDGCKYNISILDKIVKEMKENTGGVVTIVDISKAFDTVPHKAVGDGLEIKGLPSAVANYIEKMYDDCWTEIKTKEENIRIRLNRGVKQGDPLSPLLFNTIIDPIIDCIDETTEGIKIGDEKVSILAFADDLVLIAKSDKEAACQLKKLDEYLRSLGMSIQADKCATFQIVRKNKTWHLKDPEIKIGDQYLPASQPDDAIKYLGVNLNPWSGLQHMEVQKLLRAAENIHRMGLKPHQKINLIRTHLLPKYIHMLVASPPPLNLLETVDQEVKQIIKKILHLHPSTTDGILYTGKRNGGLGIQKIADIVRIAKLRNGLRMRDSEDEAVVEAYRRQENILTKYARSVGLQWPVTDEELEATRCRLKRKCYEEWGLLVSQGHGVYEFVDDKHGNAWLHRPELLKPSRYLDALKLRTNTFGTKVALRRARRDIDPMCRKCKVQAETLGHVLGNCIYTKPARIHRHDEIVKMIENKAPGGSTVFREPTVNVAGELKKPDLVIKDQDGRLLVVDVTVRYEDKENLRKARNDKIEKYKETAEHLKVRLKCKSAEVLPVVVGCRGAIPAGTVRNLKTLGCTKGNIVTVAMIALRSSIEIANAFIDYD

SEQ ID NO: 9151 - protein, 1137 aa, Megalopta genalis
MVDDNNGEASDTEVPGPGTSVADMSAVDRRANYDDLGDPNGPEYGTIVDLPLSGAVQCLLCRDFNRQFLQAGDLVRHFEQCHAGVGVGWRCSGCGKIFNKIHGCRCHIPKCKGRAPDSEARQHRCTVCGDTFDTKRGLSQHERHRHPVVRNTKRAQEALPTRSANRASVWTEEETQKLKDLYYYYRRVKQPNARIARFLTTKTAKQIGHKRRLLGLMPTQSEGMMVEEAGHTSSSEDLTITEQNVESITTDDGASPPAQESPVPVNWRFNIIDAIMANPLEENHEMRFIENMIMELANKDELEPHDIEQVLDALNERARSVSTRSKDGSKKKDSGNKKKESDRTRYLKYRYARYQEIYKKCPRKLADMAVAGETIEKRKQIELPERADIESLYGSLWGVQGPSRGLPILEGGPSAVSPMDTVWVPINTHELITKMRKIKNDTAAGVDGITKAQLKAPGYLHVLAKYYNLLMLFLTYPTQWKLNRTTLIPKPGKSTEDVRNWRPITIGSIMGRIYSAMIDTRLRSTIKNSIRQKGFTKEDGCKHNISILEKTLKEMKISKGGIMTVVDISKAFDTVPHKAIKDGLQAKGLPPAVARYIETMYEDCWTEIKTRGQNIKIKLNRGVKQGDPLSPLLFNTIIDPIINDIDETTEGRRMGDQNVSILAFADDLVLIAKDKKQATCQTKKLYDYLTKLGMNIQTNKCTTFQIVCKGKTWHLLDPGVKMGDEQIPMTQPGNTFKYLGIEIGPWSGPQRAEINMILKAAGNIDRMGLKPHQKINLIRTHLLPRYIHMLVANPPPLGLLDELDQEVKQIIKRILHLHHTTTDGLLYTKKKDGGLGIQKIADIVRIAKLRNGLRMMESEDEAVKEAYQGQIDVLNKYARSVGLQWPATDEQIENARSGLKRKCHEEWGRQVSQGQGIHEFVDDKYGNSWLISPTLLKPSRYLDALKLRTNTFGTRVALRRAQKDINPECRRCRVQLETLGHVLGNCISTKPARINRHNDIVRLIENKVAKKSAVFLEPTVSVNGELRKPDLVIKDHERLFVVDVTVRYEDKDNLRRARREKIEKYKDTAEQIKVKLKCKTAEILPIVVGCRGALPAGTARNLKVLGLGKADILTVAMIALRSSIEMANMFIDYDHSG

SEQ ID NO: 9152 - protein, 1173 aa, Macropis europaea
MTTWQARKMRWTWKELMYRITFFCIMSSEEEDVMPRTQDPHDPRDPVAKTSAVDQGVTVDDNDESNGNETAQVVEMPLAGQIKYNACSRKGFDKRFLYERDFIEHIQKQHPNSSIRWQCRPCKKIYQRIHGWRCHVHKCKGETNPVELEFKCECREETFATKRGLSMHERHRHPDTRNQKRQQEAEGSMKVPQYRGTVWTEEETALLRELNERFKNERYPNVKIKRYIMNKTLKQISDKRRIICPAQGADPSSGSSYANTSLESGSSQPAVGEGNADIPDGMEDAGESNSSDEWKEEIRRHIKNYCTQNRTKEFDEITETIKELTEEEEGDNTKRKIEGLVFRFTNKLTDSDETGEPNRSNKNRKGRGKRNIEGKTLSDRSRRARYKYARYQELYKQCPRKLVDMAEAGLLVEAREQIELPEREEVEKLYQELWGTPGPEGNALQGPREAEKAMEDIYSPITVEEVIRRLSKMKTDSAAGVDQIKKCHLKKRGAALSLASILNLLILHRYFPDLWRINRTTLIPKAGKSTKEVQNWRPITIGSILNRMFTAMTDARLKNKIQLNIRQKGFTKEDGCKQNARLLHDVITRMKETHGGVITVVDISKAFDTVPHAVIGECLIRKGVPKEIATFIRGTYDGCKTKIRTKDGEVDIPILRGVKQGDPLSPLIFNLIMNKVIQEIDETTEGTDVGEANVSILAFADDIVLIAKNKAEAKRQVNKLENFLTKLGMKISGPKCSTFEVKTKNKTWHIEDPGLKIGAETIPVAKPETTIKYLGVELDPWRGLNREHHLEEAIQAAKTIQRMGLKPHQKINLIRTYLLPRYIHRLVASPPPLKMLETLDKEIKQVIKRILRLHPSTTDGIIYSNKSHGGIGMQRVENIIKLAVLRSGVKMREAEDAAVRSAVLGQESTMVKYARSIGLSWPVTLQQIEQARKDLRKKETTRWEELISQGQGVREFRRDKIGNSWLYDPTLLKPSRYLDALRLRTNTYGTRVALRRANKEIDATCRRCKAQVETLGHVLGNCIHTKPERIRRHDEIKKLIEDKVAQRCAVFSEPTVNVLGELKKPDLVIKNQDGLLVVDVTVRYEDKHNLQNAFTEKVRKYTETAEFIRLKTNSTKAQVLPIVVGCRGAMPQETQRNLRVLGLSSKDMITISMIALRSSIELANKFIDYDHIR

SEQ ID NO: 9153 - protein, 1148 aa, Macropis europaea
MSSEEEGVMPRTQDLHDPRDPVADTSAVDQGVTVDDNGESNGNETAQIVEMPLAGQIKCNACYRKGFDKRFLYERDFIEHIQKEHPNSSIRWQCRPCKKIYQRIHGWRCHVHKCKGETNPVELEFKCECCEETFATKRGLSMHERHKHPDTRNKKRQQEAEGSMKVPQYRGTVWTEEETALLRELNERFKNDKYPNVKIKRYIMNKTLKQISDKRRMICPAQGADPNSGSSDANTSLESVSSQPAVGESNADIPDGMEDAGEGSSNDEWKGEIRRHIRNYCTQNRNKEFDEITEIIKELTEEEEGDNIKGKIEGLVFRFTNKLIENDETSEPNRSNKNRKGRGRRNMEGKTLSHRSRRARYKYARYQELYKQCPRKLVDMAEAGLLVEAREQIELPEREEVEKLYQELWGTPGPEGNALQGPREAEIAMEDIYSPITVEEVIRRLSKMKTDSAAGVDQIKKCHLKKRGAALSLASILNLLILHRYFPDLWRINRTTLIPKAGKSTKEVQNWRPITIGSILNRMFTAMIDARLKNKIQLNIRQKGFTKEDGCKQNARLLHDVITRMKESHGGVITVVDISKAFDTVPHAVIGECLTRKGVPKEIAEFIRGTYDGCKTKIKTKDGEVDIPILRGVKQGDPLSPLIFNLIMDKVIHEIDETTEGTDVGEANVSILAFADDIVLIAKDKAEAKRQINKLENFLTKLGMKISGPKCSTFEVKTKNKTWYIEDPGLKIGAETIPVAKPETTIKYLGVELDPWRGLNREHHLEEAIQAAKTIQRMGLKPHQKINLIRTYLLPRYIHRLVASPPPLKILETLDKEMKQIIKRILRLHPSTTDGIIYSNKSHGGIGMQRVENIIKLAVLRSGVKMREADDAAVRSAALGQEGTMTKYARSIGLSWPVTLQQIVQARKDLRKKETTRWEELVSQGQGVREFRRDKIGNSWLCDPTLLKPSRYLDALRLRTNTYGTRVALRRANKEIGATCRRCKAQVETLGHVLGNCIHTKPERIRRHDEIKKLIEDKVAQRCAVFSEPTVNVLGELKKPDLVFKNQDGLLVVDVTVRYEDKHNLQNAFTEKVRKYTETAEFIRLKTNSTKAQVLPIVVGCRGAMPQETQKNLRVLGLSSKDMITISMIALRSSIEIANKFIDYDHIR

SEQ ID NO: 9154 - protein, 1114 aa, Macropis europaea
MDMEGTDARNKSLLLLMSSEEDGVMPRTQDPLDPRDPVADTSAVDQGVSGDDNGESNGNETVQIVEMPLAGQIKCDACSKKGLDKRFLYERDFIEHTQKQHPNNSIRWQCRPCKKIYQRIHGWRCHIHKCKGEINPEELEFKCECCEETFATKRGLSMHERHRHPDTRNQKRQNEAEGSMKVPQYRGRVWTEEETALLRELNEKFKNGRYPNVMIKRYITNKTLKQISDKRRTIGPAQGADPNSESSDANTSFESASSQPAIGEGNADIPDGMEDAGEGSSNDEWKDEIRRHIKYYCTQNKTKEFEEITRTIEELTEEEEGDSTRRKIEGLVLKFTNKLTDSDGTGEPNRPNKNRKGRGKRNIEGKTLSDRSRRARYKYARYQELYNQCPRKLVDMAEAGLLVEVREQIELPEREEVEKLYQELWGTSGPEGNALQRPREEEITIEDIYSPITVEEVIKRISKMKTDSAAGVDKIKKCHLKKRGAALSLASILNLLILHNYFPDLWRINRTTLIPKAGKSTKEVQNWRPITIGSILNRMFTAMIDARLKNKIQQNIRQKGFTKEDGCKQNVRLLHDVITRMKETHGGVITVVDICKAFDSVPHTVIVECLIRKGVPKQIATFIRGTYNGCKTKIKTKDGEVDIPILRGVKQGDPLSPLIFNLIMDKIIQEIDETTEGTDVGEANVSILAFADDIVLIAKNGAEAKRQIDKLENFLTKLGMKISGPKCSTFEVKTKNRTWYIEDPGLKIGGETIPVTKPKNTIKYLGVELDPWRGLNRELHLEEAIQAAKIIRRMGLKPHQKINLIRTYLLPRYIHRLVASPPPLKTLEALDKEIKQIIKKILRLHPSTTDGIIYSNKSHGGIGMQRVENIIKLAVLRSGVKMRETEDAAVRSAVLGQESTMKKYARSIGLDGPVTLQQIEQARKDLRKKETTRWEELISQDQGVREFKRDRIGNSWLYDPTLLKPSRYLDALRLRTNTYGTRVALRRANKEIDATCRRCKAQVETLGHVLGNCIHTKPERIRRHDEIKKLIEDKVAQRCAVFSEPTVNVMGELKKPDLVIKNQDGLLVVDVTVRYEDKHNLQNAFVEKVRKYAETAEFIRLKTNSTKAQLCCQL

SEQ ID NO: 9155 - protein, 1149 aa, Macropis europaea
MLSEDEEVPRTQDPHDPGVPAADVSALEQGVNDDDTGESQDNEITQRIGMPLAGPIQCEECLKKGLDKRFLNERDFVKHSQEQHPAKNIEWQCRPCGKTFQRVHGWRCHAPRCKGVKNPEELEFKCGSCGESFASKRGLSTHERHRHPTIRNEKRKAEAEGLTKVPQYRRTVWTEEETTLLRRLNDIYKHEKQPNVKIKEFIPHKTLKQISDKRRILGPAQGVNQDSDNSDSDTPYESATSQTSDDENIIIVSENTEETGEEHVENEWRETLRRHIQNYCSQNKSREMADINTIIKELAEEDNTTNLEQRIEGLVLKFTSRITDSDQAGESNKQNTNKRGRNGKGTRGKALSARSRRAGYKYSRYQELYNKCPRKLVDMAEAGLLIEAREQIELPERDEVEKLYKELWGTPGPANNVLQGQRGNTEKISINEIYTPITVDEVIKRIRKMKADSAAGVDQVRKCHLKKGGAALTLASILNLLILHNYFPELWRKNRTTLIPKTGKDTKDVQNWRPITIGSILNRMCTSMIDARLKEKVQQSIRQKGFTKEDGCKQNVVLLQDVITRMKETNGGVITIVDISKAFDTVPHTVIEECLVRKGVPPKVAAYIKETYRDCITRVKTKSGEVDIPILRGVKQGDPLSPLIFNLVMDKIICEIDETTEGTDIGETNVSVLAFADDIVLVAKNQSEAKKQIKKLENFLTLLGMKVSVPKCSTFEIKAKNKTWYIEDPKIKIGSEMIPLTQPDETIKYLGVELDPWKGLNKNYHLEGAIKAAKVIQRMGLKPHQKINLIRTYLLPRYIHRLVASPPPIKTLEALDKEIKQTVKNILHLHPSTTDGVIYSSKGHGGIGLQRVENIIKLAVLRSGVKMRQTEDDAVKTAILGQENILIKYAKSIGLEWPPTMQQIEQARKDLRKKETTRWEELISQGQGVREFRRDRVGNSWLYDPTLLKPSRYLDALRLRTNTYGTKVALRRANKELDATCRRCKAQAETLGHILGNCIFTKSERIRRHDQIKELIENKAARKCAVYAEPTVNVMGELKKPDLVIKNQEGLLVVDVTVRYEDKQNLQNAFTEKVRKYRETAEFIRLKTNSAKAQVLPIVVGSRGAMPQETQRNLRVLGLTGRDMITVSMIALRSSIEIVNKFMDYDYIR

SEQ ID NO: 9156 - protein, 774 aa, Cheilosia vulpina
MNWSKHQNRCIKSILEGPTQATIPPMNTMESFWRTVMERHSSNTLPDESLHQHLDAVWTPITEDEILANRPALTTSPGPDGITPRQLRPIPLRILIRILNLIMWCGKPPQHLNESRTTMIPKKMNACDPSDFRPITVTSTIIRLLHGILASRLAAAITLDPRQQAFRETDGCATNVAIVDLLLRHHHEKHASCYIAALDVAKAFDSLSHETIFGTLRSYGAPKGFIEYMRATYADSTTKLKIDGKLSTPIRPKSGVKQGDPLSPTLFNLVIDRLLRSLPKDIRCNIGTATTNAIAFADDLTLCATTPTGLQKLLDHTQEFLSSCGLSLNPSKCMTISIKGQPKLKNTVLEQRTFHTSGQRMPALKRSDVWNYLGIKFTADGRCKIDPGADLYPKLTRITRAPLKPQQRLHITRSVLIPQLYHQLTLGSASIESLNKIDRTIRAEIRKWLDLPKDTPTPFFHAPVDKGGLGITALRWKAPQMRAERLAKLKLPNLEENAMANTFLAKEIDRAKARLRVGDESLNTNENINRYWSTRLHAMVDGRGLREADTNKHSHRWVKEPTKLLTGRDFVHCIKVRANALPTRSRTTRGRVTEDRQCRGGCQAPETLNHVVQQCHRSHQSRVDRHNSIIKFIKRKATNKGLRTMEEPPITTPEGLRKPDIVIASAHKAIIIDAQVVTDGRSLEEAHQRKLAKYNTTHIKNEIASLLQVEEVHVATATLNWRGIWAGSSVGELLRHEVISTSDTALISTRVMIGTFRCFQQFNKMTLTREWNPG

SEQ ID NO: 9157 - protein, 760 aa, Cheilosia vulpina
MNWSKHQNRCIKSILEGPTQATIPPMNTMESFWRTVMERHSSNTLPDESLHQHLDAVWTPITEDEILANRPALTTSPGPDGITPRQLRAIPLRILIRILNLIMWCGKPPQHLNESRTTMIPKKMNACDPSDFRPITVTSTIIRLLHGILASRLAAAITLDPRQQAFRETDGCATNVAIVDLLLRHHHEKHASCYIAALDVAKAFDSLSHETIFGTLRSYGAPKGFIEYMRATYADSTTKLKIDGKLSTPIRPKSGVKQGDPLSPTLFNLVIDRLLRSLPKDIRCNIGTATTNAIAFADDLTLCATTPTGLQKLLDHTQEFLSSCGLSLNPSKCMTISIKGQPKLKNTVLEQRTFHTSGQRMPALKRSDVWNYLGIKFTADGRCKIDPGADLYPKLTRITRAPLKPQQRLHITRSVLIPQLYHQLTLGSASIGSLNKIDRTIRAEIRKWLDLPKDTPTPFFHAPVDKGGLGITALRWKAPQMRAERLAKLKLPNLEENAMANTFLAKEIDRAKARLRVGDESLNTNENINRYWSTRLHAMVDGRGLREADTNKHSHRWVKEPTKLLTGRDFVHCIKVRANALPTRSRTTRGRVTEDRQCRGGCQAPETLNHVVQQCHRSHQSRVDRHNSIIKFIKRKATNKGLRTMEEPPITTPEGLRKPDIVIASAHKAIIIDAQVVTDGRSLEEAHQRKLAKYNTTHIKNEIASLLQVEEVHVATATLNWRGIWAGSSVGELLRHAVISTFRCFQQFNKMTLTREWNPG

SEQ ID NO: 9158 - protein, 774 aa, Cheilosia vulpina
MNWSKHQNRCIKSILEGPTQATIPPMNTMESFWRTVMERHSSNTLPDESLHQHLDAVWTPITEDEILANRPALTTSPGPDGITPRQLRAIPLRILIRILNLIMWCGKPPQHLNESRTTMIPKKMNACDPSDFRPITVTSTIIRLLHGILASRLAAAITLDPRQQAFRETDGCATNVAIVDLLLRHHHEKHASCYIAALDVAKAFDSLSHETIFGTLRSYGAPKGFIEYMRATYADSTTKLKIDGKLSTPIRPKSGVKQGDPLSPTLFNLVIDRLLRSLPKDIRCNIGTATTNAIAFADDLTLCATTPTGLQKLLDHTQEFLSSCGLSLNPSKCMTISIKGQPKLKNTVLEQRTFHTSGQRMPALKRSDVWNYLGIKFTADGRCKIDPGADLYPKLTRITRAPLKPQQRLHITRSVLIPQLYHQLTLGSASIGSLNKIDRTIRAEIRKWLDLAKDTPTPFFHAPVDKGGLGITALRWKAPQMRAERLAKLKLPNLEENAMANTFLAKEIDRAKARLRVGDESLNTNENINRYWSTRLHAMVDGRGLREADTNKHSHRWVKEPTKLLTGRDFVHCIKVRANALPTRSRTTRGRVTEDRQCRGGCQAPETLNHVVQQCHRSHQSRVDRHNSIIKFIKRKATNKGLRTMEEPPITTPEGLRKPDIVIASAHKAIIIDAQVVTDGRSLEEAHQRKLAKYNTTHIKNEIASLLQVEEVHVATATLNWRGIWAGSSVGELLRHEVISTSDTALISTRVMIGTFRCFQQFNKMTLTREWNPG

SEQ ID NO: 9159 - protein, 826 aa, Danionella translucida
MSLHLEEHATRYFPQRWLPSKQRQVQPRNWSNRLIRRANYATIQRLYRTRRKDAATCIFSGRWNRAYEDQRRVVDGMEEYWAEVFQQDSCPATLTADEPRDAVWSIIDPIIASEVKDALKSMIHSATGLDRLTASELASWNMPSIAAYMNLLLAIGTCPRAISTARITFLPKVENPHHPAEFRPIAVASIIQRAFHKILARRMRDTLEFSEFQLAFLQKDGTLEASTLLHTILRKAHDGLKQVAMVFLDVSKAFDCVSHQTLLQVARKSGLPPPLISYIKNLYSDSWVQLGESSTRCRRGVRQGDPLSPLLFILAMDTIIKETLPEVGFDLNGTRVGALAYADDLVLFAENPARLQEKLDGLVGALTSAGMSINPQKSYGLTIKKDSKNKWLVLVPHKYITTSGPITPMGTDDSVRYLGLQFNWKGVMAPRHTNELDSALKEITKAPLKPYQRLELLRTYLVPKYTHQLVLGRAHRNTLRKMDVLVRAAVRQWFRLPKDVSTGYLHAAIKDGGLGIPCFVTCIPLLQKNRFSKLLSIPSPITQAIRSEPSFIKSLHAVNRACCLKSVLIGSKEDARSFWSSRWHGSVDGREMACPVDSATHGWLVNPERVFPRLHLRGIQLRGGVLPTKARASRGAGRVIQDPSCRGPCKQPETLNHILQSCEVTHDARCCRHNRVLQRVNQLLMKKELKTWVEPIIPTSTSYIKPDLLIQVGDRVVVLDVSVVSGLRLVDTWALKINKYSSPKNTEALQTWLQSPTRVEHLPLIISSRGLMYGPSGAGLKELGLSKRDISDLGLLAIMGSLKCFDLYMRGTALKRRRPNQRSGIG

SEQ ID NO: 9160 - protein, 965 aa, Danionella translucida
MHRHHQHKAEVNASRIQQLPTKKMVWTLSEDASLIRLANSNWLPTMLKKDLTATLVPSFPGRSAEALRKRLLHLNWTPPAPVTPVQPVMTAPPAPDPTPTWRTTILEAVLQNLSEPRLGAEVLSAGVREVLAGTLATTEMSLHLEEHATRYFPQRWLPSKQRQVQPRNWSNRLIRRANYATIQRLYRSRRKDAATCIFSGRWNRAYEDQRRVVDGMEEYWAEVFQQDSCPATLTADEPRDAVWSIIDPIIASEVKDALKSMIHSATGLDRLTASELASWNMPSIAAYMNLLLAIGTCPRAISTARITFLPKVENPHHPAEFRPIAVASIIQRAFHKILARRMRDTLEFSEFQLAFLQKDGTLEASTLLHTILRKAHDGLKQVAMVFLDVSKAFDCVSQQTLLQVARKSGLPPPLISYIKNLYSDSWVQLGESSTRCRRGVRQGDPLSPLLFILAMDTIIKETLPEVGFDLNGTRVGALAYADDLVLFAENPARLQEKLDGLVGALTSAGMSINPQKSYGLTIKKDSKNKCLVLVPHKYITTSGPITPMGTDDSVRYLGLQFNWKGVMAPRHTNELDSALKEITKAPLKPYQRLELLRTYLVPKYTHQLVLGHAHRNTLRKMDVLVRAAVRQWFRLPKDVSTGYLHAAIKDGGLGIPCFVTCIPLLQKNRFSKLLSIPSPITQAIRSEPSFIKSLHAVNRACCLKSVLIGSKEDARSFWSSRWHGSVDGREMACPVDSATHGWLVNPERVFPRLHLRGIQLRGGVMPTKARASRGAGRVIQDPSCRGPCKQPETLNHILQSCEVTHDARCCRHNRVLQRVNQLLMKKELKTWVEPIIPTSTSYIKPDLLIQVGDRVVVLDVSVVSGLRLVDTWALKINKYSSPKNTEALQTWLQSPTRVEHLPLIISSRGLMYGPSGAGLKELGLSKRDISDLGLLAIMGSLKCFDLYMRGTALKRRRPNQRSGIG

SEQ ID NO: 9161 - protein, 826 aa, Danionella translucida
MSLHLEEHATRYFPQRWLPSKQRQVQPRNWSNRLIRRANYATIQRLYRTRRKDAATCIFSGRWNRAYEDQRRVVDGMEEYWAEVFQQDSCPATLTADEPRDAVWSIIDPIIASEVKDALKSMIHSATGLDRLTASELASWNMPSIAAYMNLLLAIGTCPRAISTARITFLPKVENPHHPAEFRPIAVASIIQRAFHKILARRMRDTLEFSEFQLAFLQKDGTLEASTLLHTILRKAHDGLKQMAMVFLDVSKAFDCVSHQTLLQVARKSGLPPPLISYIKNLYSDSWVQLGESSTRCRRGVRQGDPLSPLLFILAMDTIIKETLPEVGFDLNGTRVGALAYADDLVLFAENPARLQEKLDGLVGALTSAGMSINPQKSYGLTIKKDSKNKWLVLVPHKYITTSGPITPMGTDDSVRYLGLQFNWKGVMAPRHTNELDSALKEITKAPLKPYQRLELLRTYLVPKYTHQLVLGRAHRNTLRKMDVLVRAAVRQWFRLPKDVSTGYLHAAIKDGGLGIPCFVTCIPLLQKNRFSKLLSIPSPITQAIRSEPSFIKSLHAVNRACCLKSVLIGSKEDARSFWSSRWHGSVDGREMACPVDSATHGWLVNPERVFPRLHLRGIQLRGGVLPTKARASRGAGRVIQDPSCRGPCKQPETLNHILQSCEVTHDARCCRHNRVLQRVNQLLMKKELKTWVEPIIPTSTSYIKPDLLIQVGDRVVVLDVSVVSGLRLVDTWALKINKYSSPKNTEALQTWLQSPTRVEHLPLIISSRGLMYGPSGAGLKELGLSKRDISDLGLLAIMGSLKCFDLYMRGTALKRRRPNQRSGIG

SEQ ID NO: 9162 - protein, 887 aa, Gopherus evgoodei
MRMKVWTEEEIRQLVELEKKYVGKRNINKCIELEMKTKTNKQISDKRWELAKKCLVVDRKLSEEVEVGGLLEGILEDPPLRERILPLKGHPDVDQVSRICKQGKQIREGKEIRSSLDEIEGLLKEDSTKSLGWAKLEKVCLVLVEREDKIEEGQIRLPSNVGRKMGKGRKQQSNALRGYAAKKARYKFYQLLFEKDRKRLVRIVLREPDKVMCGIPMEDIGRYYGDMLSEVGHGSMVGWPSSAEIVDNDVLLSPISADEVRCVLKEFKKDSAPGPDKVRVNDLWDVFNLDSLILTKIFNIWLVEGQIPSVFKENRTILIPKTQDEEELKKVTSWRPLTIGSVWVRTYTKILAKRLSSVVKICPRQKGFVAASVCEENISILSNLIKGAKRNGDEMAIVFVDLAKAFDSVGHGHIVAGLKRFGVHQHFIEIIRDLYEDCFTRVWVGENCTESILIKRGVKQEDPLSPILFNIALDPLLTKLEGEGDGFYVQGNMVTSLAFADDVAILSSSYIGMQRNLGILETFCNSTNLRINVSKTKGFHILTKYKTYVVNPKENWVLGQQKIEYIQPGQFEKYLGARIDPWIGVGGSGLKERLEEWSDRLMETPLKPGQKLMILQTYILPKLFYNLLLMEPSFNLLEELDLLVRRKVKEVLHLPQCTTDGLFYSRSRDGGLALTKFSIQVPNMLLRKWRRHVVSKDSWIHLSYLYAGENLIDKIIELGAITSHPRKWREEEFLRWSRMRCQGIGIKYFKDDKISNTIFRRIDKIKPAVHIAALQLRANVYPTRETLARGRGGFNAVCRWCGKVKETVSHISGQCYKTKGMRIKRHNRVVSALVDKVGKLGWKATIEPHLRNSKGDLRKPDIVFLKGEVSVVVDVTVRWEDNAGSLE

SEQ ID NO: 9163 - protein, 1169 aa, Gopherus evgoodei
MEDCISKNQGEDILLILAMVFTGDTFNTLNMDEGEPNFKYLNEFEDPYIGDSAILNNGLQIDFNGGRLREKDDVDISKRKDGVYYLEYPVDKFNCPICPQILASFGKWAKHINVVHQSKAIRVICSKCGKSSQFHSIACHYPKCMPREVDAPKKSHACSICGLAFHTQSGLSQHCRHRHPNERNEQRKEKLGIRKKRNEGAMRMKVWTEEEIRQLIELEKKYIGKRNINKCIELELKTKTNKQISDKRRELAKKRLGVNREVNAEVEVGGLLLDILEDPPPRERILPLKGHPDVDHVGQICKQGRQIREGREIRGSLDEIERLLKKESTKGLGWAELEKICCVLVEKEDKNEEGQIKLQSNVGRKDGKGRKQQSNALRRYAAKKARYKFYQQLFEKDRRRLVRILLGEPDKVMCGIPLGDIERYFGDMLSEVGHGSMVGWPSSAEIVDNDVLLSPISADEVRSVLKEFKKDSAPGPDKVRVSDLWDVFNLDSLILTKIFNIWLVEGQIPSVFKENRTILIPKTKNEEELKKITSWRPLTIGSVWVRTYTKILAKQLSSIVKICPRQKGFVAASGCEENISILSNLIKGAKRNGDELAIVFVDLAKAFDSVGHGHIVAGLKRFGVHKHFIEIIRDLYEDCFTRVWVGEKYTESILIKRGVKQGDPLSPILFNIALDPLLTKLEKEGDGFYVQGNMVTSLAFADDVAILSGSYVGMQRNVGILQTFCNSTNLRINVSKTKGFHILTKYKTYVVNPRENWMLGEQRIDYIQPGQFEKYLGARIDPWIGVEGLGLKEKLEGWCDRLLEAPLKPGQKLIILQTYILPKLFYNLLLMEPSFNLLEELDLLVRRKVKEVLHLPQCTTDGLFYSRSRDGGLALTRFSIQVPNMLLRKWRRHVVSRDSWIDLSYLYAGENLVDKIIELGAIASNPRKWREEEFQRWSRMRCQGIGIKYFKDDKISNSIFRQIDKFRPAVHIAALQLRANVYPTRETLARGRGGSNAVCRWCGTVKETVPHISGQCYKTKEMRIKRHNRVVSALVDKVGKLGWKAIIEPHLRNRKGDLRKPDIVFVKGEVSVVVDVTVRWEDNDGSLEQAHEDKVTYYLELEDQIKSLTGGKKVYFFGFVIGARGKWSERNDDLSQILGMDRGKNFKESICRLVLYSTIDMMALFSSGE

SEQ ID NO: 9164 - protein, 844 aa, Chelonoidis abingdonii
MEDSTKALGWAKLEKVCSCLVEKEGRSKDGQVRTGSGVGEIREEGRKRQSNALRRYAAKKAKYKFYQLLFEKDRRRLARIILGEPDRVVCGIPLEDIAGYYRGMLSEVGHGSIAGWPSSAEVADNDVLLSPISVDEVRNVFREFKKDSAPGPDKVSVSDLWDVFNMDSLIFTKIFNMWFSQGQIPKVFKENRTILIPKTKDEEELKKITSWRPLTIGSMWVRAYTKILAKRLSEAVKLCTRQKGFVAASGCEENISILNNLIKGAKRNGDEIAIVFVDLAKAFDSIGHGHIVAGLKRFGVHSHFIEIIRDLYSDCFTRVWVGASFTESILIKRGVKQSDPLSPILFNIALDPLLTKLESDGSGFYVQGNMVTSLAFADDVAILSSSYLGMQRNLGILEGFCKSTNLRVNVNKTKGFHIVTKYKTYVVNIKDNWCLGKEKIEYVQPGSFEKYLGAKIDPWIGVGGSGLKERLIEWSDRLMEASLKPGQKLLILQTYILPKLFYNLLLVEPSFTLLEDLDLVVRKKVKEILHLPQCTTDGLFYSRGRDGGLALTQFSIQIPNMLLRKWRRYVVSQDNWVDLSYLYAGENLIDKIIEFGAATPHPRKWREEEFLRWARMRCQGIEVKYFQNDRISNSVFRRSDRIKPAVYLAALQLRANVYPTRETLSRGRLGSHALCRWCGKVKETVPHISGQCYKTKAMRIKRHNRVVSALIDKVGKLGWKVFVEPHLRNRKGELRKPDIVFVKGDTSVVVDVTVRWEDNDGSLEQAHEDKVTYYLELEDEIKILTGGKNIHFFGFVVGARDKWSERNEDLLKILGIDRGKNFKESICRMVLYSTIDMMVMFSDR

SEQ ID NO: 9165 - protein, 1258 aa, Terrapene carolina
MEKSNLYFYTGLALDRVNNAPAVGFDAPADSVKYIRGVIRVAGPMDKIVWTIMKSHEHESENQVLPVEHGEEVEENVCDDHGEEILSILPMVFTRDTFNDLTMESFNPDFKYLSTFDDPYVSESGYLNAHLVNGSSLLNSFRPSTDFNRDRNKDLNSTGSNINILESSSWKDGFFYLEYPVDSFNCPICPQILPTFGKWAKHINVVHKSKAIRVVCSKCGKSSQYHNIACHYPKCIPKKADTPMKSHTCSVCGLGFHTRSGLSQHCRHRHPALRNEQRKEDMAAKSKIKEGSTRSRIWTKDEVAQLIQLERKYIGKRNINKCIESEMRTKTNKQISDKRRELAKKKLVVTGDREEVTEVEDIRVNILEIPPPRERIFPLKGHPEVDLVEKICKRGKQSREGREIINSLGEIEGLLKEDLTKALGWAMLEKLCYSLVEGKDPRNESQIELRNKGKGKMRKEGRRKQFNAIRRYATKKAKYKFYQQLFDKDRRRLTRIIMGEPDKAKCAIPMKEYYVNILGTIGHGNMIGWPSSTENADNDILMSPISVDEIRIALREIRKDSAPGPDKVKVSNLWDIFNLDSLILTKIFNIWFLNRQVPDEFKKNRTILIPKTQDEEEMKKLTSWRPLTIGSVWIRIYTKILAKRLVETVKICSRQKGFISAPGCEENIAILDNLIKGAKRNGNEIAIVFVDLAKAFDSVGHGHIIAGLRRFGIDEHFIDIIRDLYDNCTTRVWVGDEATESILIRRGVKQGDPLSPILFNIAMDPLLTRLEVEGSGFYVKGNGVTSLAFADDVAILSSSYKGMIKNLGILEEFCKNTNLSVNVKKTKGFHILTKHKTYVVNPKDNWQIGSEEIEYVQPGDFEKYLGARIDPWIGVGGPVLKEKLKDWSENLIKAPLKPAQKILILQTYILPKLFYNLLLIEPPFNLLDDLDVLVRKIVKEILHLPQCITDGIFYSRGRDGGLALTKFSVQIPNMLIRKWRRHIVSRDDWMDLSYLYAGENFVDKILSFSAVTSHPKKWREEEFLRWSELRCQGIGIKYFKNDLISNSIFRNSSKVKSSAYIAALQLRANIYPTRDTLARGRGGVNALCRWCGKVRETVPHISGQCYKTKNARIKRHNRVVSAVVDKVGKLGWKAMIEPHLRNSKGELRKPDIIFIKGDTAVVVDVTVRWEDNAGSLEQAHSEKVAYYLELEEEIKNLTGGKNIHFFGFVLGARGKWSEGNNDLLQLLGMDRSKNFKESICRVYVLYSTIGMMAIFSDR

SEQ ID NO: 9166 - protein, 1169 aa, Trachemys scripta
MVFTRDTFNDLTMDSFNPDFKYLSTFDDPYVRESGYLNAHLVNGSSLLNSFRPSTDFNRDRNKDLNSTGSNMNILESSSWKDGVFYLEYPVDSFNCPICPQILPTFGKWAKHINVVHKSKAIRVVCSKCGKSSQYHNIACHYPKCIPKKADTPMKSHTCSVCGLGFHTRSGLSQHCRHRHPAVRNEQRKEDMAAKSKIKEGSTRSRIWTKDEVAQLIQLERKYIGKRNINKCIESEMRTKTNKQISDKRRELAKKKVVTGDREEVTEVEDIRVNILEIPPPRERIFPLKGHPEVDLVEKICKRGKQSREGREIIYSLGKIEGLLKEDLTKALGWAMLEKLCYSLVEGKDPRNESQIELRNKGKGKMRKEGRRKQFNAIRRYATKKAKYKFYQQLFDKDRRRLTRIIMGEPDKAKCAIPMKEIEEYYVNILGTIGHGDMIGWPSSTENADNDILMNPISVDEIRIALREIRKDSAPGPDKVKVSNLWDIFNLDSLIFTKIFNIWFLNRQVPDEFKKNRMILIPKTQDEEEMKKLTSWRPLTIGSVWIRIYTKILAKRLVETVKICSRQKGFISAPGCEENIAILDNLIKGAKRNGNEIAVVFVDLAKAFDSVGHGHIIAGLRRFGIDEHFIDIIRDLYDNCTTRVWVGDEATESILIRRGVKQGDPLSPILFNIAMDPLLTRLEVEGSVFYVKGNSVTSLAFADDVAILSSSYKGMIKNLGILEEFCKNTNLSVNVKKTKGFHILTKHKTYVVNPKDNWQIGSEEIEYVQPGDFEKYLGARIDPWIGVGGPVLKEKLKDWSENLIKAPLKPAPKILILQTYILLKLFYNLLLIEPPFNLLDDLDVLVRKIVKEILHLPQCTTDGIFYSRGRDGGLALTKFSVQIPNMLIRKWRRHIVSRDDWMDLSYLYAGENLVDKILSFSAVTSHPKKWREEEFLRWSELRCQGIGIKYFKNDLISNSIFRNSSKVKSSAYISALQLRANIYPTRETLARGRGGVNALCRWCGKVRETVPHISGQCYKTKNARIKRHNRVVAAVVDKVGKLGWKAMIEPHLRNSKGELRKPDIIFIKGDTAVVVDVTGRWEDNAGSLEQAHSEKVAYYLELEEEIKNLTGGKNIHFFGFVLGAHGKWSEGNNDLLQLLGMDRSKNFKESICRLVLYSTIGMMAIFSDR

SEQ ID NO: 9167 - protein, 1216 aa, Actinemys marmorata
MDKMVWTIMKSHEHESENQVLPVEHGEEVEENVCDDHGEEILSILPMVFTRDTFNDLTMESFNPDFKYLSTFDDPYVRESGYLNAHLVNGSSLLNSFRPSTDFNRDRNKDLNSTGSNINILESSSWKDGVFYLEYPVDSFNCPICPQILPTFGKWAKHINVVHKSKAIRVVCSKCGKSSQYHNIACHYPKCIPKKADTPMKSHTCSVCGLGFHTRSGLSQHCRHRHPAVRNEQRKEDMAAKSKIKEGSTRSRIWTKDEVAQLIQLERKYIGKRNINKCIESEMRTKTNKQISDKRRELAKKKLVVTGDREEVTEVEDIRVNILEIPPPRERIFPLKGHPEVNLVEKICKRGKQSRDGREIINSLGEIEGLLKEDLTKALGWAMLEKLCYSLVEGKDPRNESQIELRNKGKGKMRKEGRRKQFNAIRRYATKKAKYKFYQQLFDKDRRRLTRIIMGEPDKAKCAIPMKEIEEYYVNILGTIGHGNMIGWPSSTENADNDILMSPISVDEIRIALREIRKDSAPGPDKVKVSNLWDIFNLDSLILTKIFNIWFLNRQVPDEFKKNRTILIPKTQDEEEMKKLTSWRPLTIGSVWIRIYTKILAKRLVETVKICSRQKGFISAPGCEENVAILDNLIKGAKRNGNEIAIVFVDLAKAFDSVGHGHIIAGLRRFGIDEHFIDIIRDLYDNCTTRVWVGDEATESILIRRGVKQGDPLSPILFNIAMDPLLTRLEVEGSGFYVKGNSVTSLAFADDVAILSSSYKGMIKNLGILEEFCKNTHLSVNVKKTKGFHILTKHKTYVVNPKDNWQIGSEEIEYVQPGDFEKYLGARIDPWIGVGGPVLKEKFKDWSENLIKAPLKPAPKILILQTYILPKLFYNLLLIEPPFNLLDDLDVLVRKIVKEILHLPQCTTDGIFYSRGRDGGLALTKFSVQIPNMLIRKWRRHIVSRDDWMDLSYLYAGENLVDKILSFSAVTSHPKKWREEEFLRWSELRCQGIGIKYFKNDLISNSIFRNSSKVKSSAYIAALQLRVNIYPTRETLARGRGGVNALCRWCGKVRETVPHISGQCYKPKNARIKRHNRVVSAVVDKVGKLGWKAMIEPHLRNSKGELRKPDIIFIKGDTALVVDVTVRWEDNAGSLEQAHSEKVAYYLELEEEIKNLTGGKNIHFFGFVLGARGKWSEGNNDLLQLLGMDRSKNFKESICRLVLYSTIGMMAIFSDR

SEQ ID NO: 9168 - protein, 1017 aa, Actinemys marmorata
MKSHTCSVCGLGFHTRSGLSQHCRHRHPAVRNEQRKEDMAVKSKIKERSTRSRIWTKDEVAQLIQLERKYIGKRNINKCIESEMRTKTNKQISDKRRELAKKKLVVTGDREEVTEVEDIRVNILEIPPPRERIFPLKGHPEVDLVEKICKRGKQSREGREIINSLGEIEGLLKEDLTKALGWAMLEKLCYSLVEGKDPRNESQIELRNKGKGKMRKEGRRKQFNAIRRYATKKAKYKFYQQLFDKDRRRLTRIIMGEPDKAKCAIPMKEIEEYYVNILGTIGHGNMIGWPSSTENADNDILMSPISVDEIRIALREIRKDSAPGPDKVKVSNLWDIFNLDSLILTKNFNIWFLNRQVPDEFKKNRTILIPKTQDEEEMKKLTSWRPLTIGSVWIRIYTKILAKRLVETVKICSRQKGFISAPGCEENIAILDNLIKGAKRNGNEIAIVFVDLAKAFDSVGHGHIIAGLRRFGIDEHFIDIIRDLYDNCTTRVWVGDEATESILIRRGVKQGDPLSPILFNIAMDPLLTRLEVEGSGFYVKGNSVTSLAFADDVAILSSSYKGMIKNLGILEEFCKNTNLSVNVKKTKGFHILTKHKTYVVNPKDNWQIGSEEIEYVQPGDFEKYLGARIDPWIGVGGPVLKEKLKDWSENLIKAPLKPAQKILILQTYILPKLFYNLLLIEPPFNLLDDLDVLVRKIVKEILHLPQCTTDGIFYSRGRDGGLALTKFSVQIPNMLIRKWRRHIVSRDDWMDLSYLYAGENLVDKILSFSAVTSHPKKWREEEFLRWSELRCQGIGIKYFKNDLISNSIFRNSSKVKSSAYIAALQLRANIYPTRETLARGRGGVNALCRWCGKVRETVPHISGQCYKTKNARIKRHNRVVSAVVDKVGKLGWKAMIEPHLRNSKGELRKPDIIFIKGDTAVVVDVTVRWEDNAGSLEQAHSEKVAYYLELEEEIKNLTGGKNIHFFGFVLGARGKWSEGNNDLLQLLGMDRSKNFKESICRLVLYSTVGMMAIFSDR

SEQ ID NO: 9169 - protein, 1241 aa, Chrysemys picta
MEKSNLYFYTGLALDRVNNAPAVGFDAPADSVKYIRGVIRVAGPMDKMVWTIMKSHENESENQVLPVEHGEEVEENVCDDHGEEILSILPMVFTRDTFNDLTMDSFNPDFKYLSTFDDPYVRESSTDFNRDCNKDLNSIGSNINILESSSWKDGVFYLEYPVDSFNCPICPQILPTFGKWAKHINVVHKSKAIRVVCSKCGKSSQYHNIACHYPKCIPKKADTPMKSHTCSVCGLGFHTRSGLSQHCRHRHPAVRNEQRKEDMDAKSKIKEGSTRSRIWTKDEVAQLIQLERKYIGKRNINKCIESEMRTKTNKQISDKRRELAKKKLVVTGDREEVTEVEDIRVNILEIPPPRERIFPLKGHPEVDLVEKICKRGKQSREGREIINSLGEIEGLLKEDLTKALGWAMLEKLCYSLVEGQDPRNESQIELRNKGKGKIRKEGRRKQFNAIRRYATKKAKYKFYQQLFDKDRRRLTRIIMGEPDKAKCAIPMKEIEEYYVNILGTIGHGNMRGWPSSTENADNDILMSPISVDEIRIALTEIRKDSAPGPDKVKVSNLWDIFNLDSLILTKIFNIWFLNRQVPDEFKKNRTILIPKTQDEEEMKKLTSWRPLTIGSVWIRIYTKILAKRLVETVKICSRQKGFISAPGCEENIAILDNLIKGAKRNGNEIAIVFVDLAKAFDSVGHGHIIAGLRRFGIDEHFIDIIRDLYDNCTTRVWVGDEATESILIRRGVKQGDPLSPILFNIAMDPLLTRLEVEGSGFYVKGNSVTSLAFADDVAILSSSYKGMIKNVGILEEFCKNTNLSVNVKKTKGFHILTKHKTYVVNPKDNWQIGSEKIEYVQPGDFEKYLGARIDPWIGVGGPVLKEKLKDWSENLMKAPLKPAQKILILQTYILPKLFYNLLLIEPPFNLLDDLDVLVRKIVKEILHLPQCTTDGIFYSRGRDGGLALTKFSVQIPNMLIRKWRRHIVSRDDWMDLSYLYAGENLVDKILSFSAVTSHPKKWREEEFLRWSELRCQGIGIKYFKNDLISNSIFRNSSKVKSSAYIAALQLRANIYPTRETLARGRGGVNALCRWCGKVRETVPHISGQCYKTKNARIKRHNRVVSAVVDKVGKLGWKAMIEPHLRNSKGELRKPDIIFIKGDTAVVVDVTVRWEDNAGSLEQAHSEKVAYYLELEEEIKNLTGGKNIHFFGFVLGARGKWSEGNNDLLQLLGMDRSKNFKESICRLVLYSTIGMMAIFSDR

SEQ ID NO: 9170 - protein, 1241 aa, Chrysemys picta
MEKSNLYFYTGLALDRVNNAPAVGFDAPADSVKYIRGVIRVAGPMDKMVWTIMKSHENESENQVLPVEHGEEVEENVCDDHGEEILSILPMVFTRDTFNDLTMDSFNPDFKYLSTFDDPYVRESSTDFNRDRNKDLNSIGSNINILESSSWKDGVFYLEYPVDSFNCPICPQILPTFGKWAKHINVVHKSKAIRVVCSKCGKSSQYHNIACHYPKCIPKKADTPMKSHTCSVCGLGFHTRSGLSQHCRHRHPAVRNEQRKEDMAAKSKIKEGSTRSRIWTKDEVAQLIQLERKYIGKRNINKCIESEMRTKTNKQISDKRRELAKKKLVVTGDREEVTEVEDIRVNILEIPPPRERIFPLKGHPEVDLVEKICKRGKQSREGREIINSLGEIEGLLKEDLTKALGWAMLEKLCYSLVEGQDPRNESQIELRNKGKGKIRKEGRRKQFNAIRRYATKKAKYKFYQQLFDKDRRRLTRIIMGEPDKAKCAIPMKEIEEYYVNILGTIGHGNMIGWPSSTENADNDILMSPISVDEIRIALTEIRKDSAPGPDKVKVSNLWDIFNLDSLILTKIFNIWFLNRQVPDEFKKNRTILIPKTQDEEEMKKLTSWRPLTIGSVWIRIYTKILAKRLVETVKICSRQKGFISASGCEENIAILDNLIKGAKRNGNEIAIVFVDLAKAFDSVGHGHIIAGLRRFGIDEHFIDIIRDLYDNCTTRVWVGDEATESILIRRGVKQGDPLSPILFNIAMDPLLTRLEVEGSGFYVKGNSVTSLAFADDVAILSSSYKGMIKNLGILEEFCKNTNLSVNVKKTKGFHILTKHKTYVVNPKDNWQIGSEKIEYVQPGDFEKYLGARIDPWIGVGGPVLKEKLKDWSENLIKAPLKPAQKILILQTYILPKLFYNLLLIEPPFNLLDDLDVLVRKIVKEILHLPQCTTDGIFYSRGRDGGLALTKFSVQIPNMLIRKWRRHIVSRDDWMDLSYLYAGENLVDKILSFSAVTSHPKKWREEEFLRWSELRCQGIGIKYFKNDLISNSIFRNSSKVKSSAYIAALQLRANIYPTRETLARGRGGVNALCRWCGKVRETVPHISGQCYKTKNARIKRHNRVVSAVVDKVGKLGWKAMIEPHLRNSKGELRKPDIIFIKGDTAVVVDVTVRWEDNAGSLEQAHSEKVAYYLELEEEIKNLTGGKNIHFFGFVLGARGKWSEGNNDLLQLLGMDRSKNFKESICRLVLYSTIGMMAIFSDR

SEQ ID NO: 9171 - protein, 1241 aa, Chrysemys picta
MEKSNLYFYTGLALDRVNNAPAVGFDAPADSVKYIRGVIRVAGPMDKMVWTIIKSHENESENQVLPVEHGEEVEENVCDDHGEEILSILPMVFTRDTFNDLTMDSFNPDFKYLSTFDDPYVRESSTDFNRDRNKDLNTIGSNINILESSSWKDGVFYLEYPVDSFNCPICPQILPTFGKWDKHINVVHKSKAIRVVCSKCGKSSQYHNIACHYPKCIPKKADTPMKSHTCSVCGLGFHTRSGLSQHCRHRHPAVRNEQRKEDMAAKSKIKEGSTRSRIWTKDEVAQLIQLERKYIGKRNINKCIESEMRTKTNKQISDKRRELAKKKLVVTGDREEVTEVEDIRVNILEIPPPRERIFPLKGHPEVDLVEKICKRGKQSREGREIINSLGEIEGLLKEDLTKALGWAMLEKLCYSLVEGQDPRNESQIELRNKGKGKIRKEGRRKQFNAIRRYATKKAKYKFYQQLFDKDRRRLTRIIMGEPDKAKCAIPMKEIEEYYVNILGTIGHGNMIGWPSSTENADNDILMSPISVDEIRIALTEIRKDSAPGPDKVKVSNLWDIFNLDSLILTKKINIWFLNRQVPDEFKKNRTILIPKTQEEEEMKKLTSWRPLTIGSVWIRIYTKILAKRLVETVKICSRQKGFISTPGCEENIAILDNLIKGAKRNGNEIAIVFVDLAKAFDSVGHGHIIAGLRRFGIDEHFIDIIRDLYDNCTTRVWVGDEATESILIRRGVKQGDPLSPILFNIAMDPLLTRLEVEGSGFYVKGNSVTSLAFADDVAILSSSYKGMIKNLGILEEFCKNTNLSVNVKKTKGFHILTKHKTYVVNPKDNWQIGSEKIEYVQPGDFEKYLGARIDPWIGVGGPVLKKKLKDWSENLIKAPLKPAQKILILQTYILPKLFYNLLLIEPPFNLLDYLDVLVRKIVKEILHLPQCTTDGIFYSRGRDGGLALTKFSVQIPNMLIRKWRRHIVSRDDWMDLSYLYAGENLVDKILSFSAVTSHPKKWREEEFLRWSELRCQGIGIKYFKNDLISNSIFRNSSNVKSSAYIAALQLRANIYPTRETLARGRGGVNALCRWCGKVRETVPHISGQCYKTKNARIKRHNRVVSAVVDKVGKLGWKAMIEPHLRNSKGELRKPDIIFIKGDTAVVVDVTVRWEDNAGSLEQAHSEKVAYYLELEEEIKNLTGGKNIHFFGFVLGARGKWSEGNNDLLQLLGMDRSKNFKESICRLVLYSTIGMMAIFSDR

SEQ ID NO: 9172 - protein, 1260 aa, Terrapene carolina
MEKSNLYFYTGLALDRVNNAPAVGFDAPADSVKYIRGVIRVAGPMDKMVWTIMKSHEHESENQVLPVEHGEEVEENVCDDHGEEILSILPMVFTRDTFNDLTMESFNPDFKYLSTFDDPYVSESGYLNAHLVNGSSLLNSFRPSTDFNRDRNKDLNSTGSNINILESSSWKDGVFYLEYPVDSFNCPICPQILPTFGKWAKHINVVHKSKAIRVVCSKCGKSSQYHNIACHYPKCIPKKADTPMKSHTCSVCGLGFHTRSGLSQHCRHRHPAVRNEQRKEDMAAKSKIKEGSTRSRIWTKDEVAQLIQLERKYIGKRNINKCIESEMRTKTNKQISDKRRELAKKKLVVTGDREEVTEVEDIRVNILEIPPPRERIFPLKGHPEVDLVEKICKRGKQSREGREIINSLGEIEGLLKEDLTKALGWAMLEKLCYSLVEGKDPRNESQIELRNKGKGKMRKEGRRKQFNAIRRYATKKAKYKFYQQLFDKDRRRLTRIIMGEPDKAKCAIPMKEIEEYYVNILGTIGHGNMIGWPSSTENADNDILMSPISVDEIRIALREIRKDSAPGPDKVKVSNLWDIFNLDSLILTKIFNIWFLNRQVPDEFKKNRTILIPKTQDEEEMKKLTSWRPLTIGSVWIRIYTKILAKRLVETVKICSRQKGFISAPGCEENIAILDNLIKGAKRNGNEIAIVFVDLAKAFDSVGHGHIIAGLRRFGIDEHFIDIIRDLYDNCTTRVWVGDEATESILIRRGVKQGDPLSPILFNIAMDPLLTRLEVEGSGFYVKGNGVTSLAFADDVAILSSSYKGMIKNLGILEEFCKNTNLSVNVKKTKGFHILTKHKTYVVNPKDNWQIGSEEIEYVQPGDFEKYLGARIDPWIGVGGPVLKEKLKDWSENLIKAPLKPAQKILILQTYILPKLFYNLLLIEPPFNLLDDLDVLVRKIVKEILHLPQCTTDGIFYSRGRDGGLALTKFSVQIPNMLIRKWRRHIVSRDDWMDLSYLYAGENLVDKILSFSAVTSHPKKWREEEFLRWSELRCQGIGIKYFKNDLISNSIFRNSSKVKSSAYIAALQLRANIYPTRETLARGRGGVNALCRWCGKVRETVPHISGQCYKTKNARIKRHNRVVSAVVDKVGKLGWKAMIEPHLRNSKGELRKPDIIFIKGDTAVVVDVTVRWEDNAGSLEQAHSEKVAYYLELEEEIKNLTGGKNIHFFGFVLGARGKWSEGNNDLLQLLGMDRSKNFKESICRLVLYSTIGMMAIFSDR

SEQ ID NO: 9173 - protein, 1260 aa, Terrapene carolina
MEKSNLYFYTGLALDRVNNAPAVGFDAPADSVKYIRGVIRVAGPMDKMVWTIMKSHEHESENQVLPVEHGEEVEENVCDDHGEEILSILPMVFTRDTFNDLTMESFNPDFKYLSTFDDPYVSESGYLNAHLVNGSSLLNSFRPSTDFNRDRNKDLNSTGSNINILESSSWKDGVFYLEYPVDSFNCPICPQILPTFGKWAKHINVVHKSKAIRVVCSKCGKSSQYHNIACHYPKCIHKKADTPMKSHTCSVCGLGFHTRSGLSQHCRHRHPAVRNEQRKEDMAAKSKIKEGSTRSRIWTKDEVAQLIQLERKYIGKRNINKCIESEMRTKTNKQISDKRRELAKKKLVVTGDREEVTKVEDIRVNILEIPPPRERIFPLKGHPEVDLVEKICKRGKQSREGREIINSLGEIEGLLKEDLTKALGWAMLEKLCYSLVEGKDPRNESQIELRNKGKGKMRKEGRRKQFNAIRRYATKKAKYKFYQQLFDKDRRRLTRIIMGEPDKSKCAIPMKEIEEYYVNILGTIGHGNMIGWPSSTENADNDILMSPISVDEIRIALREIRKDSAPGPDKVKVSNLWDIFNLDSLILTKIFNIWFLNRQVPDEFKKNRTILIPKTQDEEEMKKLTSWRPLTIGSVWIRIYTKILAKRLVETVKICSRQKGFISAPGCEENIAVLDNLIKGAKRNGNEIAIVFVDLAKAFDSVGHGHIIAGLRRFGIDEHFIDIIRDLYDNCTTRVWVGDEATESILIRRGVKQGDPLSPILFNIAMDPLLTRLEVEGSGFYVKGNGVTSLAFADDVAILSSSYKGMIKNLGILEEFCKNTNLSVNVKKTKGFHILTKHKTYVVNPKDNWQIGSEEIEYVQPGDFEKYLGARIDPWIGVGGPVYKEKLKDWSENLIKAPLKPAQKILILQTYILPKLFYNLLLIEPPFNLLDDLDVLVRKIVKEILHLPQCTTDGIFYSRGRDGGLALTKFSVQIPNMLIHKWRRHIVSRDDWMDLSYLYAGENLVDKILSFSAVTSHPKKWREEEFLRWSELRCQGIGIKYFKNDLISNSIFRNSSKVKSSAYIAALQLRANIYPTRETLARGRGGVNALCRWCGKVRETVPHISGQCYKTKNARIKRHNRVVSAVVDKVGKLGWKAMIEPHLRNSKGELRKPDIIFIKGDTVVVVDVTVRWEDNAGSLEQAHSEKVAYYLELEEEIKNLTGGKNVHFFGFVLGARGKWSEGNNDLLQLLGMDRSKNFKESICRLVLYSTIGMMAIFSDR

SEQ ID NO: 9174 - protein, 934 aa, Terrapene carolina
MRTKTNKQISDKRRELAKKKLVVTGDREEVTEVEDIRVNILEIPPPRERIFPLKGHPEVDLVEKICKRGKQSREGREIINSLGEIEGLLKEDLTKALGWAMLEKLCYSLVEGKDPRNESQIELRNKGKGKMRKEGRRKQFNAIRRYATKKAKYKFYQQLFDKDRRRLTRIIMGEPDKAKCAIPMKEIEEYYVNILGTIGHGNMIGWPSSTENADNDILMSPISVDEIRIALREIRKDSAPGPDKVKVSNLWDIFNLDSLILTKIFNIWFLNRQVPDEFKKNRTILIPKTQDEEEMKKLTSWRPLTIGSVWIRIYTKILAKRLVETVKICSRQKGFISAPGCEENIAILDNLIKGAKRNGNEIAIVFVDLAKAFDSVGHGHIIAGLRRFGIDEHFIDIIRDLYDNCTTRVWVGDEATESILIRRGVKQGDPLSPILFNIAMDPLLTRLEVEGSGFYVKGNGVTSLAFADDVAILSSSYKGMIKNLGILEEFCKNTNLSVNVKKTKGFHILTKHKTYVVNPKDNWQIGSEEIEYVQPGDFEKYLGARIDPWIGVGGPVLKEKLKDWSENLIKAPLKPTQKILILQTYILPKLFYNLLLIEPPFNLLDDLDVLVRKIVKEILHLPQCTTDGIFYSRGRDGGLALTKFSVQIPNMLIRKWRRHIVSRDDWMDLSYLYAGENLVDKILSFSAVTSHPKKWREEEFLRWSELRCQGIGIKYFKNDLISNSIFRNSSKVKSSAYIAALQLRANIYPTRETLARGRGGVNALCRWCGKVRETVPHISGQCYKTKNARIKRHNRVVSAVVDKVGKLGWKAMIEPHLRNSKGELRKLDIIFIKGDTAVVVDVTVRWEDNAGSLEQAHSEKVAYYLELEEEIKNLTGGKNIHFFGFVLGARGKWSEGNNDLLQLLGMDRSKNFKESICRLVLYSTIGMMAIFSDR

SEQ ID NO: 9175 - protein, 1199 aa, Terrapene carolina
MEKSNLYFYTGLALDRVNNAPAVGFDAPADSVKYIRGVIRVAGPMDKMVWTIMKSHEYESENQVLPVEHGEEVEENVCDDHGEEILSILPMVFTRDTFNDLTMESFNPDFKYLSTFDDPYVSESGYLNAHLVNGSSLLNSFRPSTDFNRDRNKDLNSTGSNINILESSSWKDGVFYLEYPVDSFNCPICPQILPTFGKWAKHINVVHKSKAIRVVCSKCGKSSQYHNIACHYPKCIPKKADTPMKSHTCSVCGLGFHTRSGLSQHCRHRHPAVRNEQRKEDMAAKSKIKEGSTRSRIWTKDEVAQLIQLERKYIGKRNINKCIESEMRTKTNKQISDKRRELAKKKLVVTGDREEVTEVEDIRVNILEIPPPRERIFPLKGHPEVDLVEKICKRGKQSREGREIINSLGEIEGLLKEDLTKALGWAMLEKLCYSLVEGKDPRNESQIELRNKGKGKMRKEGRRKQFNAIRRYATKKAKYKFYQQLFDKDRRRLTRIIMGEPDKAKCAIPMKEIEEYYVNILGTIGHGNMIGWPSSTENADNDILMSPISVDEIRIALREIRKDSAPGPDKVKVSNLWDIFNLDSLILTKIFNIWFLNRQVPDEFKKNRTILIPKTQDEEEMKKLTSWRPLTIGSVWIRIYTKILAKRLVETVKICSRQKGFISAPGCEENIAILDNLIKGAKRNGNEIAIVFVDLAKAFDSVGHGHIIAGLRRFGIEEHFIDIIRDLYDNCTTRVWVGDEATESILIRRGVKQGDPLSPILFNIAMDPLLTRLEVEGSGFYVKGNGVTSLAFADDVAILSSSYKGMIKNLGILEEFCKNTNLSVNVKKTKGFHILTKHKTYVVNPKDNWQIGSEEIEYVQPGDFEKYLGARIDPWIGVGGPVLKEKLKDWSENLIKAPLKPAQKILILQTYILPKLFYNLLLIEPPFNLLDDLDVLVRKIVKEILHLPQCITDGIFYSRGRDGGLALTKFSVQIPNMLIRKWRRHIVSRDDWMDISYLYAGENLVDKILSFSAVTSHPKKWREEEFLRWSELRCQGIGIKYFKNDLISNSIFRNSSKVKSSAYIAALQLRANIYPTRETLARGRGGVNALCRWCGKVRETVPHISGQCYKTKNARIKRHNRVVSAVVDKVGKLGWKAMIEPHLRNSKGELRKPDIIFIKGDTAVVVDVTVRWEDNAGSLEQAHSEKVAYYLELEEEIKT

SEQ ID NO: 9176 - protein, 1171 aa, Trachemys scripta
MEKSNLYFYTGLALDRVNNAPAVGFDAPADSVKYIRGVIRVAGPMDKMVWTIMKSHEHESENQVLPVEHGEEVEENVCDDHGEEILSILPMVFTRDTFNDLTMDSFNPDFKYLSTFDDPYVRESGYLNAHLVNGSSLLNSFRPSTDFNRDRNKDLNSTGSNINILESSSWKDGVFYLEYPVDSFNCPICPQILPTFGKWAKHINVVHKSKAIRVVCSKCGKSSQYHNIACHYPKCIPKKADTPMKSHTCSVCGLGFHTRSGLSQHCRHRHPAVRNEQRKEDMAAKSKIKEGSTRSRIWTKDEVAQLIQLERKYIGKRNINKCIESEMRTKTNKQISDKRRELAKKKLVVTGDREEVTEVEDIRVNILEIPPPRERIFPLKGHPEVDLVEKICKRGKQSREGREIINSLGEIEGLLKEDLTKALGWAMLEKLCYSLVEGKDPRNESQIELRNKGKGKMRKEGRRKQFNAIRRYATKKAKYKFYQQLFDKDRRRLTCIIMGEPDKAKCAIPMKEIEEYYVNILGTIGHGNMIGCPSSTENVDNDILMSPISVDEIRIALREIRKDSAPGPDKVKVSNLWDIFNLDSLILTKNFNIWFLNRQVPDEFKKNRMILIPKTQDEEEMKKLTTSWRPLTIGSVWIRIYTKILAKRLVETVKICSRQKGFISAPGCEENIAILDNLIKGAKRNGNEIAIVFVDLAKAFDSVGHGHIIAGLRRFGIDEHFIDIIRDLYDNCTTRVWVGDEATESILIRRGVKQGDPLSPILFNIAMDPLLTRLEVEGSGFYVKGNSVTSLAFADDVAILSSSYKGMIKNLGILEEFCKNTNLSVNVKKTKGFHILTKHKTYVVNPKDNWQIGSEEIEYVQPGDFEKYLGARIDPWIGVGGPVLKEKLKDWSENLIKAPLKPSQKILILQTYILPKLFYNLLLIEPPFNLLDDLDVLVRKIVKEILHLPQCTTDGIFYSRGRDGGLALTKFSVQIPNMLIRKWRRHIISRDDWMDLSYLYAGENLVDKILSFSAVTSHPKKWREEEFLRWSELRCQGIGIKYFKNDLISNSIFRNSSKVKSSAYIAALQLRANIYPTRETLARGRGGVNALCRWCGKVRETVPHISGQCYKTKNARIKRHNRVVSAVVDKVGKLGWKAMIEPHLRNSKGELRKTDIIFIKGDTAVVVDVTV

SEQ ID NO: 9177 - protein, 1260 aa, Actinemys marmorata
MEKSNLYFYTGLALDRVNNAPAVGFDAPADSVKYIRGVIRVAGPMDKMVWTIMKSHEHESENQVLPVEHGEEVEENVCDDHGEEILSILPMVFTRDTFNDLTMESFNPDFKYLSTFDDPYVRESGYLNAHLVNGSSLLNSFRPSTDFNRDRNKDLNSTGSNINILESSSWKDGVFYLEYPVDSFNCPICPQILPTFGKWAKHINVVHKSKAIRVVCSKCGKSSQYHNIACHYPKCIPKKADTPMKSHTCSVCGLGFHTRSGLSQHCRHRHPAVRNEQRKEDMAAKSKIKEGSTRSRIWTKDEVAQLIQLERKYIGKRNINKCIESEMRTKTNKQISDKRRELAKKKLVVTGDREEVTEVEDIRVNILEIPPPRERIFPLKGHPEVDLVEKICKRGKQSREGREIINSLGEIEGLLKEDLTKALGWAMLEKLCYSLVEGKDPRNESQIELRNKGKGKMRKEGRRKQFNAIRRYATKKAKYKFYQQLFDKDRRRLTRIIMGEPDKAKCAIPMKEIEEYYVNILGTIGHGNMIGWPSSTENADNDILMSPISVDEIRIALREIRKDSAPGPDKVKVSNLWDIFNLDSLILTKIFNIWFLNRQVPDEFKKNRTILIPKTQDEEEMKKLTSWRPLTIGSVWIRIYTKILAKRLVETVKICSRQKGFISAPGCEENIAILDNLIKGAKRNGNEIAIVFVDLAKAFDSVGHGHIIAGLRRFGIDEHFIDIIRDLYDNCTTRVWVGDEATESILIRRGVKQGDPLSPILFNIAMDPLLTRLEVEGSGFYVKGNSVTSLAFADDVAILSSSYKGMIKNLGILEEFCKNTNLSVNVKKTKGFHILTKHKTYVVNPKDNWQIGSEEIEYVQPGDFEKYLGARIDPWIGVGGPVLKEKLKDWSENLIKAPLKPAQKILILQTYILPKLFYNLLLIEPPFNLLDDLDVLVRKIVKEILHLPQCTTDGIFYSRGRDGGLALTKFSVQIPNMLIRKWRRHIVSRDDWMDLSYLYAGENLVDKILSFSAVTSHPKKWREEEFLRWSELRCQGIGIKYFKNDLISNSIFRNSSKVKSSAYIAALQLRANIYPTRETLARGRGGVNALCRWCGKVRETVPHISGQCYKTKNARIKRHNRVVSAVVDKVGKLGWKAMIEPHLRNSKGELRKPDIIFIKGDTAVVVDVTVRWEDNAGSLEQAHSEKVAYYLELEEEIKNLTGGKNIHFFGFVLGARGKWSEGNNDLLQLLGMDRSKNFKESICRLVLYSTIGMMAIFSDR

SEQ ID NO: 9178 - protein, 1241 aa, Chrysemys picta
MEKSNLYFYTGLALDRVNNAPAVGFDAPADSVKYIRGVIRVAGPMDKMVWTIMKSHENESENQVLPVEHGEEVEENVCDDHGEEILSILPMVFTRDTFNDLTMDSFNPDFKYLSTFDDPYVRESSTDFNRDRNKDLNSIGSNINILESSSWKDGVFYLEYPVDSFNCPICPQILPTFGKWAKHINVVHKSKAIRVVCSKCGKSSQYHNIACHYPKCIPKKADTPMKSHTCSVCGLGFHTRSGLSQHCRHRHPAVRNEQRKEDMAAKSKIKEGSTRSRIWTKDEVAQLIQLERKYIGKRNINKCIESEMRTKTNKQISDKRRELAKKKLVVTGDREEVTEVEDIRVNILEIPPPRERIFPLKGHPEVDLVEKICKRGKQSREGREIINSLGEIEGLLKEDLTKALGWAMLEKLCYSLVEGQDPRNESQIELRNKGKGKIRKEGRRKQFNAIRRYATKKAKYKFYQQLFDKDRRRLTCIIMGEPDKAKCAIPMKEIEEYYVNILGTIGHGNMIGWPSSTENADNDILMSPISVDEIRIALTEIRKDSAPGPDKVKVSNLWDIFNLDSLILTKNFNIWFLNRQVPDEFKKNRTILIPKTQDEEEMKKLTSWRPLTIGSVWIRIYTKILAKRLVETVKICSRQKGFISAPGCEENIAILDNLIKGAKRNGNEIAIVFVDLAKAFDSVGHGHIIAGLRRFGIDEHFIDIIRDLYDNCTTRVWVGDEATESILIRRGVKQGDPLSPILFNIAMDPLLTRLEVEGSGFYVKGNSVTSLAFADDVAILSSSYKGMIKNLGILEEFCKNTNLSVNVKKTKGFHILTKHKTYVVNPKDNWQIGSEKIEYVQPGDFEKYLGARIDPWIGVGGPVLKEKLKDWSENLIKAPLKPAQKILILQTYILPKLFYNLLLIEPPFNLLDDLDVLVRKIVKEILHLPQCTTDGIFYSRGRDGGLALTKFSVQIPNMLIRKWRRHIVSRDDWMDLSYLYAGENLVDKILSFSAVTSHPKKWREEEFLRWSELRCQGIGIKYFKNDLISNSIFRNSSKVKSSVYIAALQLRANIYPTRETLARGRGGVNALCRWCGKVRETVPHISGQCYKTKNARIKRHNRVVSAVVDKVGKLGWKAMIEPHLRNSKGELRKPDIIFIKGDTAVVIDVTVRWEDNAGSLEQAHSEKVAYYLELEEEIKNLTGGKNIHFFGFVLGARGKWSEGNNDLLQLLGMDRSKNFKESICRLVLYSTIGMMAIFSDR

SEQ ID NO: 9179 - protein, 1241 aa, Chrysemys picta
MEKSNLYFYTGLALDRVNNAPAVGFDAPADSVKYIRGVIRVAGPMDKMVWTIMKSHENESENQVLPVEHGVEVEENVCDDHGEEILSILPMVFTRDTFNDLTMDSFNPDFKYLSTFDDPYVRESSTDFNRDRNKDLNSIGSNINILESSSWKDGVFYLEYPVDSFNCPICPQILPTFGKWAKHINVVHKSKAIRVVCSKCGKSSQYHNIACHYPKCIPKKADTPMKSHTCSVCGLGFHTRSGLSQHCRHRHPAVRNEQRKEDMAAKSKIKEGSTRSRIWTKDEVAQLIQLERKYIGKRNINKCIESEMRTKTNKQISDKRRELAKKKLVVTGEREEVTEVEDIRVNILEIPPPRERIFPLKGHPEVDLVEKICKRGKQSREGREIINSLGEIEGLLKEDLTKALGWAMLEKLCYSLVEGQDPRNESQIELRNKGKGKIRKEGRRKQFNAIRRYATKKAKYKFYQQLFDKDRRRLTRIIMGEPDKAKCAIPMKEIEEYYVNILGTIGHGNMIGWPSSTENADNDILMSPISVDEIRIALTEIRKDSAPGPDKVKVSNLWDIFNLDSLILTKIFNIWFLNRQVPDEFKKNRTILIPKTQDEAEMKKLTSWRPLTIGSVWIRIYTKILAKRLVETVKICSRQKGFISAPGCEENIAILDNLIKGAKRNGNEIAIVFVDLAKAFDSVGHGHIIAGLRRFGIDEHFIDIIRDLYDNCTTRVWVGDEATESILIRRGVKQGDPLSPILFNIAMDPLLTRLEVEGSGFYVKGNSVTSLAFADDVAILSSSYKGMIKNLGILEEFCKNTNLSVNVKKTKGFHILTKHKTYVVNPKDNWQIGSEKIEYVQPGDFEKYLGARIDPWIGVGGPVLKEKLKDWSENLIKAPLKPAQKILILQTYILPKLFYNLLLIEPPFNLLDDLDVLVRKIVKEILHLPQCTTDGIFYSRGRDGGLALTKFSVQIPNMLIRKWRRHIVSRDDWMDLSYLYAGENLVDKILSFSAVTSHPKKWREEEFLRWSELRCQGIGIKYFKNDLISNSIFRNSSKVKSSAYIAALQLRANIYPTRETLARGRGGVNALCRWCGKVRETVPHISGQCYKTKNARIKRHNRVVSAVVDKVGKLGWKAMIEPHLRNSKGELRKPDIIFIKGDTAVVVDVTVRWEDNAGSLEQAHSEKVAYYLELEEEIKNLTGGKNIHFFGFVLGARGKWSEGNNDLLQLLGMDRSKNFKESICRLVLYSTIGMMAIFSDR

SEQ ID NO: 9180 - protein, 1260 aa, Chrysemys picta
MEKSNLYFYTGLVLDRVNNAPAVGFDAPADSVKYIRGVIRVAGPMDKMVWTIMKSHENESENQVLPVEHGEEVEENVCDDHGEEILSILPMVFTRDTFNDLTMDSFNPDFKYLSTFDDPYVRESGYLNAHLVNGSSLLNSFRPSTDFNRDRNKDLNSTGSNINILESSSWKDGVFYLEYPIDSFNCPICPQILPTFGKWAKHINVVHKSKAIRVVCSKCGKSSQYHNIACHYPKCIPKKADTPMKSHTCSVCGLGFHTRFGLSQHCRHRHPAVRNEQRKEDMAAKSKIKEGSTRSRIWTKDEVAQLIQLERKYVGKRNINKCIESEMRTKTNKQISDKRRELAKKKLVVTGDREEVTEVEDIRVNILEIPPPRERIFPLKGHPEVDLVEKICKRGKQSREGREIINSLGETEGLLKEDLTKALGWAMLEKLCYSLVEGKDPRNESQIELRNKGKGKMRKEGRRKQFNAIRRYATKKAKYKFYQQLFDKDRRRLTRIIMGEPDKAKCAIPMKEIEEYYVNILGTIGHGNMIGWPSSTENADNDILMSPISVDEIRIALREIRKDSAPGPDKVKVSNLWDIFNLDSLILTKIFNIWFLNRQVPDEFKKNRTILIPKTQDEEEMKKLTSWRPLTIGSVWIRIYTKILAKRLVETVKICSRQKGFISAPGCEENIAILDNLIKGAKRNGNEIAIVFVDLAKAFDSVGHGHIIAGLRRFGIDEHFIDIIRDLYDNCTTRVWVGDEATESILIRRGVKQGDPLSPILFNIAMDPLLTRLEVEGSDFYVKGNSVTSLTFADDVAILSSSYKGMIKNLGILEEFCKNTNLSVNVKKTKGFHILTKHKTYVVNPKDNWQIGSEEIEYVQPGDFEKYLGARIDPWIGVGGPVLKEKLKDWSENLIKAPLKTAQKILILQTYILPKLFYNLLLIEPPFNLLDDLDVLVRKIVKEILHLPQCTTDGIFYSRGRDGGLALTKFSVQIPNMLIRKWRRHIVSRDDWMDLSYLYAGENLVDKILSFSAVTSHPKKWREEEFLRWSELRCQGIGIKYFKNDLISNSIFRNSSKVKSSAYIAALQLRANIYPTRETLARGRGGVNALCRWCGKVRETVPHISGQCYKTKNARIKRHNRVVSAVVDKVGKLGWKEMIEPHLRNSKGELRKPDIIFIKGDTAVVVDVTVRWDDNAGSLEQAHSEKVAYYLELEEEIKNLTGGKNIHFFGFVLGARGKWSEGNNDLLQLLGMDRSKNFKESIGRLVLYSTIGMMAIFSDR

SEQ ID NO: 9181 - protein, 1260 aa, Terrapene carolina
MEKSNLYFYTGLALDRVNNAPAVGFDAPADSVKYIRGVIRVAGPMDKMVWTIMKSHEHESENQVLPVEHGEEVEENVCDDHGEEILSILPMVFTRDTFNDLTMESFNPDFKYLSTFDDPYVSESGYLNAHLVNGSSLLNSFRPSTDFNRDRNKDLNSTGSNINILESSSWKDGVFYLEYPVDSFNCPICPQILPTFGKWAKHINVVHKSKAIRVVCSKCGKSSQYHNIACHYPKCIPKKADTPMKSHTCSVCGLGFHTRSGLSQHCRHRHPAVRNEQRKEDMAAKSKIKEGSTRSRIWTKDEVAQLIQLERKYIGKRNINKCIESEMRTKTNKQISDKRRELAKKKLVVTGDREEVTEVEDIRVNILEIPPPRERIFPLKGHPEVDLVEKICKRGKQSREGREIINSLGEIEGLLKEDLTKALGWAMLEKLCYSLVEGKDPRNESQIELRNKGKGKMRKEGRRKQFNAIRRYATKKAKYKFYQQLFDKDRRRLTRIIMGEPDKAKCAIPMKEIEEYYVNILGTIGHGNMIGWPSSTENADNDILMSPISVDEIRIALREIRKDSAPGPDKVKVSNLWDIFNLDSLILTKIFNIWFLNRQVPDEFKKNRTILIPKTQDEEEMKKLTSWRPLTIGSVWIRIYTKILAKRLVETVKICSRQKGFISAPGCEENIAILDNLIKGAKRNGNEIAIVFVDLAKAFDSVGHGHIIAGLRRFGIDEHFIDIIRDLYDNCTTRVWVGDEATESILIRRGVKQGDPLSPILFNIAMDPLLTRLEVEGSGFYVKGNGVTSLAFADDVAILSSSYKGMIKNLGILEEFCKNTNLSVNVKKTKGFHILTKHKTYVVNPKDNWQIGSEEIEYVQPGDFEKYLGARIDPWIGVGGPVLKEKLKDWSENLIKAPLKPAQKILILQTYILPKLFYNLLLIEPPFNLLDDLDVLVRKIVKEILHLPQCTTDGIFYSRGRDGGLALTKFSVQIPNMLIRKWRRHIVSRDDWMDLSYLYAGENLVDKILSFSAVTSHPKKWREEEFLRWSELRCQGIGIKYFKNDLISNSIFRNSSKVKSSAYIAALQLRANIYPTRETLARGRGGVNALCRWCGKVRETVPHISGQCYKTKNARIKRHNRVVSAVVDKVGKLGWKAMIEPHLRNSKGELRKPDIIFIKGDTAVVVDVTVRWEDNAGSLELAHSEKVAYYLELEEEIKNLTGGKNIHFFGFVLGARGKWSEGNNDLLQLLGMDRSKNFKESICRLVLYSTIGMMAIFSDR

SEQ ID NO: 9182 - protein, 1260 aa, Terrapene carolina
MEKSNLYFYTRLALDRVNNAPAVGFDAPADSVKYIRGVIRVAGPMDKMVWTIMKSHEHESENQVLPVEHGEEVEENVCDDHGEEILSILPMVFTRDTFNDLTMESFNPDFKYLSTFDDPYVSESGYLNAHLVNGSSLLNSFRPSTDFNRDRNKDLNSTGSNINILESSSWKDGVFYLEYPVDSFNCPICPQILPTFGKWAKHINVVHKSKAIRVVCSKCGKSSQYHNIACHYPKCIPKKADTPMKSHTCSVCGLGFHTRSGLSQHCRHRHPAVRNEQRKEDMAAKSKIKEGSTRSRIWTKDEVAQLIQLERKYIGKRNINKCIESEMRTKTNKQISDKRRELAKKKLVVTGDREEVTEVEDIRVNILEIPPPRERIFPLKGHPEVDLVEKICKRGKQSREGREIINSLGEIEGLLKEDLTKALGWAMLEKLCYSLVEGKDPRNESQIELRNKGKGKMRKEGRRKQFNAIRRYATKKAKYKFYQQLFDKDRRRLTRIIMGEPDKAKCAIPMKEIEEYYVNILGTIGHGNMIGWPSSTENADNDILRSPISVDEIRITLREIRKDSAPGPDKVKVSNLWDIFNLDSLILTKIFNIWFLNRQVPDEFKKNRTILIPKTQDEEEMKKLTSWRPLTIGSVWIRIYTKILAKRLVETVKICSRQKGFISAPGCEENIAILDNLIKGAKRNGNEIAIVFVDLAKAFDSVGHRHIIAGLRRFGIDEHFIDIIRDLYDNCTTRVWVGDEATESILIRRGVKQGDPLSPILFNIAMDPLLTRLEVEGSGFYVKGNGVTSLAFADDVAILSSSYKGMIKNLGILEEFCKNTNLSVNVKKTKGFHILTKHKTYVVNPKDNWQIGSEEIEYVQPGDFEKYLGARIDPWIGVGGPVLKEKLKDWSENLIKAPLKPAQKILILQTYILPKLFYNLLLIEPPFNLLDDLDVLVRKIVKEILHLPQCTTDGIFYSRGRDGGLALTKFSVQIPNMLIRKWRRHIVSRDDWMDLSYLYAGENLVDKILSFSAVTSHPKKWREEEFLRWSELRCQGIGIKYFKNDLISNSIFRNSSKVKSSAYIAALQLRANIYPTRETLARGRGGVNALCRWCGKVRETVPHISGQCYKTKNARIKRHNRVVSAVVDKVGKLGWKAMIEPHLRNSKGELRKPDIIFIKGDTAVVVDVTVRWEDNAGSLEQAHSEKVAYYLELEEEIKNLTGGKNIHFFGFVLGARGKWSEGNNDLLQLLGMDRSKNFKESICRLVLYSTIGMMAIFSDR

SEQ ID NO: 9183 - protein, 1260 aa, Terrapene carolina
MEKSNLYFYTGLALDRVNNAPAVGFDAPADSVKYIRGVIRVAGPMDKMVWTIMKSHEHENENQVLPVEHGEEVEENVCDDHGEEILSILPMVFTRDTFNDLTMESFNPDFKYLSTFDDPYVSESGYLNAHLVNGSSLLNSFRPSTDFNRDRNKDLNCTGSNINILESSSWKDGVFYLEYPVDSFNCPICPQILPTFGKWAKHINVVHKSKAIRVVCSKCGKSSQYHNIACHYPKCIPKKADTPMKSHTCSVCGLGFHTRSGLSQHCRHRHPAVRNEQRKEDMAAKSKIKEGSTRSRIWTKDEVAQLIQLERKYIGKRNINKCIESEMRTKTNKQISDKRRELAKKKLVVTGDREEVTEVEDIRVNILEIPPPRERIFPLKGHPEVDLVEKICKRGKQSREGREIINSLGEIEGLLKEDLTKALGWAMLEKLCYSLVEGKDPRNESQIELRNKGKGKMRKEGRRKQFNAIRRYATKKAKYKFYQQLFDKDRRRLTRIIMGEPDKAKCAIPMKEIEEYYVNILGTIGHGNMIGWPSSTENADNDILMSPISVDEIRIALREIRKDSAPGPDKVKVSNLWDIFNLDSLILTKIFNIWFLNRQVPDEFKKNRTILIPKTQDEEEMKKLTSWRPLTIGSVWIRIYTKILAKRLVETVKICSRQKGFISAPGCEENIAILDNLIKGAKRNGNEIAIVFVDLAKAFDSVGHGHIIAGLRRFSIDEHFIDIIRDLYDNCTTRVWVGDEATESILIRRGVKQGDPLSPILFNIAMDPLLTRLEVEGSGFYVKGNGVTSLAFADDVAILSSSYKGMIKNLDILEEFCKNTNLSVNVKKTKGFHILTKHKTYVVNPKDNWQIGSEEIEYVQPGDFEKYLGARIDPWIGVGGPVLKEKLKDWSENLIKAPLKPAQKILILQTYILPKLFYNLLLIEPPFNLLDDLDVLVRKIVKEILHLPQCITDGIFYSRGRDGGLALTKFSVQIPNMLIRKWRRHIVSRDDWMDLSYLYAGENLVDKILSFSAVTSHPKKWREEEFLRWSELRCQGIGIKYFKNDLISNSIFRNSSKVKSSAYIAALQLRANIYPTRETLARGRGGVNALCRWCGKVRETVPHISGQCYKTKNARIKRHNRVVSAVVDKVGKLGWKAMIEPHLRNSKGELRKPDIIFIKRDTAVVVDVTVRWEDNAGSLEQAHSEKVAYYLELEEEIKNLTGGKNIHFFGFVLGARGKWSEGNNDLLQLLGMDRNKNFKESICRLVLYSTIGMMAIFSDR

SEQ ID NO: 9184 - protein, 1260 aa, Terrapene carolina
MEKSNLYFYTGLALDRVNNAPAVGFDAPADSVKYIRGVIRVAVPMDKIVWTIMKSHEHESENQVLPVEHGEEVEENVCDDHGEEILSILPMVFTRDTFNDLTMESFNPDFKYLSTFDDPYVSESGYLNAHLVNGSSLLNSFRPSTDFNRDRNKDLNSTGSNINILESSSWKDGVFYLEYPVDSFNCPICPQILPTFGKWAKHINVVHKSKAIRVVCSKCGKSSQYHNIACHYPKCIPKKADTPMKSHTCSVCGLGFHTRSGLSQHCRHRHPAVRNEQRKEDMAAKSKIKEGSTRSRIWTKDEVAQLIQLERKYIGKRNINKCIESEMRTKTNKQISDKRRELAKKKLVVTGDREEVTEVEDIRVNILEIPPPRERIFPLKGYPEVDLVEKICKRGKQSREGREIINSLGEIEGLLKEDLTKALGWAMLEKLCYSLVEGKDPRNESQIELRNKGKGKMRKEGRRKQFNAIRRYATKKAKYKFYQQLFDKDRRRLTRIIMGEPDKAKCAIPMKEIEEYYVNILGTIGHGNMIGWPSSTENADNDILMSPISVDEIRIALREIRKDSAPGPDKVKVSNLWDIFNLDSLILTKIFNIWFLNRQVPDEFKKNRTILIPKTQDEEEMKKLTSWRPLTIGSVWIRIYTKILAKRLVETVKICSRQKGFISAPGCEENIAILDNLIKGAKRNGNEIAIVFVDLAKAFDSVGHGHIIAGLRRFGIDEHFIDIIRDLYDNCTTRVWVGDEATESILIRRGVKQGDPLSPILFNIAMDPLLTRLEVEGSGFYVKGNGVTSLAFADDVAILSSSYKGMIKNLGILEEFCKNTNLSVNVKKTKGFHILTKHKTYVVNPKDNWQIGSEEIEYVQPGDFEKYLGARIDPWIGVGGPVLKEKLKDWSENLIKAPLKPAQKILILQTYILPKLFYNLLLIEPPFNLLDDLDVLVRKIVKEILHLPQCTTDGIFYSRGRDGGLALTKFSVQIPNMLIRKWRRHIVSRDDWMDLSYLYAGENLVDKILSFSAVTSHPKKWREEEFLRWSELRCQGIGIKYFKNDLISNSIFRNSSKVKSSAYIAALQLRANIYPTRETLARGRGGVNALCRWCGKVRETVPHISGQCYKTKNARIKRHNRVVSAVVDKVGKLGWKAMIEPHLRNSKGELRKPDIIFIKGDTAVVVDVTVRWEDNAGSLEQAHSEKVAYYLELEEEIKNLTGGKNIHFFGFVLGARGKWSEGNNDLLQLLGMDRSKNFKESICRLVLYSTIGMMAIFSDR

SEQ ID NO: 9185 - protein, 1260 aa, Trachemys scripta
MEKSNLYFYTGLALDRVNNAPAVGFDAPADSVKYIRGVIRVAGPMDKMVWTIMKSHENESENQVLPVEHGEEVEENVCDDHGEEILSILPMVFTRDTFNDLTMDSFNPDFKYLSTFDDPYVRESGYLNAHLVNGSSLLNSFRPSTDFNRDRNKDLNSTGSNINRLESSSWKDGVFYLEYPVDSFNCPICPQILPTFGKWAKHINVVHKSKAIRVVCSKCGKSSQYHNIACHYPKCIPKKADTPMKSHTCSVCGLGFHTRSGLSQHCRHRHPVVRNEQRKEDMAAKSKIKEGSTRSRIWTKDEVAQLIQLERKYIGKRNINKCIESEMRTKTNKQISDKRRELAKKKLVVTGDREEVTEVEDIRVNILEIPPPRERIFPLKGHPEVDLVEKICKRGKQSREGREIINSLGEIEGLLKEDLTKALGWAMLEKLCYSLVEGKDPRNESQIELRNKGKGKMRKEGRRKQFNAIRRYSTKKAKYKFYQQLFDNDRRRLTRIIMGEPDKAKCAIPMKEIEEYYVNILGTIGHGNMIGWPSSTENADNDILMSPIFVDEIRIALREIRKDSAPGPDKVKVSNLWDIFNLDSLILTKIFNIWFLNRQVPDEFKKNRTILIPKTQDEEEMKKLTSWRPLTIGSVWIRIYTKILAKRLVETVKICSRQKGFISTPGCEENIAILGNLIKGAKRNGNEIAIVFVDLAKAFDSVGHGHIIAGLRRFGIDEHFIDIIRDLYDNCTTRVWVGDEATESILIRRGVKQGDPLSPILFNIAMDPLLTRLEVEGSGFYVKGNSVTSLAFADDVAILSSSYKGMIKNLGILEEFCKNTNLSVNVKKTKGFHILTKHKTCVVNPKDNWQIGSEEIEYVQPGDFEKYLGARIDPWIGVGGPVLKEKLKDWSENLIKAPLKPAQKILILQTFILPKLFYNLLLIEPPFNLLDDLDVLVRKIVKEILHLPQCTTDGIFYSRGRDGGLALTKFSVQIPNMLIRKWRRHIVSRDDWMDLSYLYAGENLVDKILSFSAVTSHPKKWREEEFLRWSELRCQGIGIKYFKNDLISNSIFRNSSKVKSSAYIAALQLRANIYPTRETLARGRGGVNALCRWCGKVRETVPHISGQCYKTKNARIKRHNRVVSAVVDKVGKLGWKAMIEPHLRNSKGELRKPDIIFIKGDTAVVVDVTVRWEDNAGSLEQAHSEKVAYYLELEEEIKNLTGGKNIHFFGFVLGARGKWSEGNNDLLKLLGMDRSKNFKESICRLVLYSTIGMMAIFSDR

SEQ ID NO: 9186 - protein, 1260 aa, Actinemys marmorata
MEKSNLYFYTGLALDRVNNAPAVGFDAPADSVKYIRGVIRVAGPMDKMVWTIMKSHEHESENQVLPVEHGEEVEENVCDDHGEEILSILPMVFTRDTFNDLTMESFNPDFKYLSTFDDPYVRESGYLNAHLVNGSSLLNSFRPSTDFNRDRNKDLNSTGSNINILESSSWKDGVFYLEYPVDSFNCPICPQILPTFGKWAKHINVVHKSKAIRVVCSKCGKSSQYHNIACHYPKCIPKKADTPMKSHTCSVCGLGFHTRSGLSQHCRHRHPAVRNEQRKEDMAAKSKIKEGSTRSRIWTKDEVAQLIQLERKYIGKRNINKCIESEMRTKTNKQISDKRRELAKKKLVVTGDREEVTEVEDIRVNILEIPPPRERIFPLKGHPEVDLVEKICKRGKQSREGREIINSLGEIEGLLKEDLTKALGWAMLEKLCYSLVEGKDPRNESQIELRNKGKGKMRKEGRRKQFNAIRRYATKKAKYKFYQQLFDKDRRRLTRIIMGEPDKAKCAIPMKEIEEYYVNILGTIGHGNMIGWPSSTENADNDILMSPISVDEIRIALREIRKDSAPGPDKVKVSNLWDIFNLDSLILTKIFNIWFLNRQVPDEFKKNRTILIPKTQDEEEMKKLTSWRPLTIGSVWIRIYTKILAKRLVETVKICSRQKGFISAPGCEENIAILDNLIKGAKRNGNEIAIVFVDLAKAFDSVGHGHIIAGLRRFGIDEHFIDIIRDLYDNCTTRVWVGDEATESILIRRGVKQGDPLSPILFNIAMDPLLTRLEVEGSGFYVKGNSVTSLVFADDVAILSSSYKGMIKNLGILEEFCKNTNLSVNVKKTKGFHILTKHKTYVVNPKDNWQIGSEEIEYVQPGDFEKYLGARRDPWIGVGGPILKEKLKDWSENLIKAPLKPAQKILILQTYILPKLFYNLLLIEPPFNLLDDLDVLVRKIVKEILHLPQCTTDGIFYSRGRDGGLALTKFSVQIPNMLIRKWRRHIVSRDDWMDLSYLYAGENLVDKILSFSAVISHPKKWREEEFLRWSELRCQGIGIKYFKNDLISNSIFRNSSKVKSSAYIAALQLRANIYPTRETLARGRGGVNALCRWCGKVRETVPHISGQCYKTKNARIKRHNRVVSAVVDKVGKLGWKAMIEPHLRNSKGELRKPDIIFIKGDTAVVVDVTVRWEDNAGSLEQAHSEKVAYYLELEEEIKNLTGGKNIHFFGFVLGARGKWSEGNNDLLQLLGMDRSKNFKESICRLVLYSTIGMMAIFSDR

SEQ ID NO: 9187 - protein, 1260 aa, Actinemys marmorata
MEKSNVYFYTGLALDRVNNAPAVGFDAPADSVKYIRGVIRVAGPMDKMVWTIMKSHEHESENQVLPVEHGEEVEENVCDDHGEEILSILPMVFTRDTFNDLTMESFNPDFKYLSTFDDPYVRESGYLNAHLVNGSSLLNSFRPSTDFNRDCNKDLNSTGSNINILESSSWKDGVFYLEYPVDSFNCPICPQILPTFGKWAKHINVVHKSKAIRVVCSKCGKSSQYHNIACHYPKCIPKKTDTPMKSHTCSVCGLGFHTRSGLSQHCRHRHPAVRNEQRKEDMAAKSKIKEGSTRSRIWTKDEVAQLIQLERKYIGKRNINKCIESEMRTKTNKQISDKRRELAKKKLVVTGDREEVTEVEDIRVNILEIPPPRERIFPLKGHPEVDLVEKICKRGKQSREGREIINSLGEIEGLLKEDLTKALGWAMLEKLCYSLVEGKDPRNESQIELRNKGKGKMRKEGRRKQFNAIRRYATRKAKYKFYQQLFDKDRRRLTRIIMGEPDKAKCAIPMKEIEEYYVNILGTIGHGNMIGWPSSTENADNDILMSPISVDEIRIALREIRKDSAPGPDKVKVSNLWDIFNLDSLILTKIFNIWFLNRQVPDEFKKNRTILIPKTQDEEEMKKLTSWRPLTIGSVWIRIYTKILAKRLVETVKICSRQKGFISAPGCEENIAILDNLIKGAKRNGNEIAIVFVDLAKAFDSVGHGHIIAGLRRFGIDEHFIDIIRDLYDNCTTRVWVGDEATESILIRRGVKQGDPLSPILFNIAMDPLLTRLEVEGSGFYVTGNSVTSLAFADDVAILSSSYKGMIKNLGILEEFCKNTNLSVNVKKMKGFHILTKHKTYVVNPKDNWQIGSEEIEYVQPGDFEKYLGARIDPWIGVGGPVLKEKLKDWSENLIKAPLKPAPKILILQTYILPKLFYNLLLIEPPFNLLDDLDVLVRKIVKEILHLPQCTTDGIFYSRGRDGGLALTKFSVQIPNMLIRKWRRHIVSRDDWMDLSYLYAGENLVDKILSFSAVTSHPKKWREEEFLRWSELRCQGIGIKYFKNDLISNSIFRNSSKVKSSAYIAALQLRANIYPTRETLARGRGGVNALCRWCGKVRETVPHISGQCYKTKNARIKRHNRVVSAVVDKVGKLGWKAMIEPHLRNSKGELRKPDIIFIKGDTAVVVDVTVRWEDNAGSLEQAHSEKVAYYLELEEEIKNLTGGKNIHFFGFVLGARGKWSEGNNDLLQLLGMDRSKNFKESICRLVLYSTIGMMAIFSDR

SEQ ID NO: 9188 - protein, 1241 aa, Chrysemys picta
MEKSNLYFYTGLALDRVNSAPAVGFDAPADSVKYIRGVIRVAGPMDKMVWTIMKSHENESENQVLPVEHGEEVEENVCDDHGEEILSILPMVFTRDTFNDLTMDSFNPDFKYLSTFDDPYVRESSTDFNRDRNKDLNSIGSNINILESSSWKDGVFYLEYPVDSFNCPICPQILPTFGKWAKHINVVHKSKAIRVVCSKCGKSSQYHNIACHYPKCIPKKAETPMKSHTCSVCGLGFHTRSGLSQHCRHRHPAVRNEQRKEDMAAKSKIKEGSTRSRIWTKDEVAQLIQLERKYIGKRNINKCIESEMRTKTNKQISDKRRELAKKKLVVTGDREEVTEVEDIRVNILEIPPPRERIFPLKGHPEVDLVEKICKRGKQSREGREIINSLGEIEGLLKEDLTKALGWAMLEKLCYSLVEGQDPRNESQIELRNKGKGKIRKEGRRKQFNAIRRYATKKAKYKFYQQLFDKDRRRLTRIIMGEPDKAKCAIPMKEIEEYYVNILGTIGHGNMIGWPSSTENADNDILMSPISVDEIRIALREIRKDSAPGPDKVKVSNLWDIFNLDSLILTKIFNIWFLNRQVPDEFKKNRTILIPKTQDEEEMKKLTSWRPLTIGSVWIRIYTKILAKRLVETVKICSRQKGFISAPGCEENIAILDNLIKGAKRNGNEIAIVFVDLAKAFDSVGHGHIIAGLRRFGIDEHFIDIIRDLYDNCTTRVWVGDEATESILIRRGVKQGDPLSPILFNIAMDPLLTRLEVEGSGFYVKGNSVTSLAFADDVAILSSSYKGMIKNLGILEEFCKNTNLSVNVKKTKGFHILTKHKTYVVNPKDNWQIGSEKIEYVQPGDFEKYLGARIDPWIGVGGPVLKEKLKDWSENLIKAPLKPAQKILILQTYILPKLFYNLLLIEPPFNLLDDLDVLVRKIVKEILHLPQCTTDGIFYSRGRDGGLALTKFSVQIPNMLIRKWRRHIVSRDDWMDLSYLYAGENLVDKILSFSAVTSHPKKWREEEFLRWSELRCQGIGIKYFKNDLISNSIFRNSSKVKSSAYIAALQLRANIYPTRETLARGRGGVNALCRWCGKVRETVPHISGQCYKTKNARIKRHNRVVSAVVDKVGKLGWKAMIEPHLRNSKGELRKPDIIFIKGDTAVVVDVTVRWEDNAGSLEQAHSEKVAYYLELEEEIKNLTGGKNIHFFGFVLGARGKWSEGNNDLLQLLGMDRSKNFKESICRLVLYSTIGMMAIFSDR

SEQ ID NO: 9189 - protein, 1241 aa, Chrysemys picta
MEKSNLYFYTGLALDRVNNAPAVGFDAPADSVKYIRGVIRVAGPMDKMVWTIMKSHENESENQVLPVEHGEEVEENVCDDHGEEILSILPMVFTRDTFNDLTMDSFNPDFKYLSTFDDPYVRESSTDFNRDRNKDLNSIGSNINISESSSWKDGVFYLEYPVDSFNCPICPQILPTFGKWAKHINVVHKSKAIRVVCSKCGKSSQYHNIACHYPKCIPKKADTPMKSHRCSVCGLGFHTRSGLSQHCRHRHPAVRNEQRKEDMAAKSKIKEGSTRSRIWTKDEVAQLIQLERKYIGKRNINKCIESEMRTKTNKQISDKRRELAKKKLVVTGDREEVTEVEDIRVNILEIPPPRERIFPLKGHPEVDLVEKICKRGKQSREGREIINSLGEIEGLLKEDLTKALGWAMLEKLCYSLVEGQDPRNESQIELRNKGKGKIRKEGRRKQFNAIRRYATKKAKYKFYQQLFDKDRRRLTRIIMGEPDKAKCAIPMKEIEEYYVNILGTIGHGNMIGWPSSTENADNDILMSPISVDEIRIALTEIRKDSAPGPDKVKVSNLWDIFNLDSLILTKIFNIWFLNRQVPDEFKKNRTILISKTQDEEEMKKLTSWRPLTIGSVWIRIYTKILAKRLVETVKICSRQKGFISAPGCEENIAILDNLIKGAKRNGNEIAIVFVDLAKAFDSVGHGHIIAGLRRFGIDEHFIDIIRDLYDNCITRVWVGDEATESILIRRGVKQGDPLSPILFNIAMDPLLTRLEVEGSGFYVKGNSVTSLAFADDVAILSSSYKGMIKNLGILEEFCKNTNLSVNVKKTKGFHILTKHKTYVVNPKDNWQIGSEKIEYVQPGDFEKYLGARIDPWIGVGGPVLKEKLKDWSENLIKAPLKPAQKILILQTYILPKLFYNLLLIEPPFNLLDDLDVLVRKIVKEILHLPQCTTDGIFYSRGRDGGLALTKFSVQIPNMLIRKWRRHIVSRDDWMDLSYLYAGENLVDKILSFSAVTSHPKKWREEEFLRWSELRCQGIGIKYFKNDLISNSIFRNSSKVKSSAYIAALQLRANIYPTRETLARGRGGVNALCRWCGKVRETVPHISGQCYKTKNARIKRHNRVVSAVVDKVGKLGWKAMIEPHLRNSKGELRKPDIIFIKGDTAVVVDVTVRWEDNAGSLEQAHSEKVAYYLELEEEIKNLTGGKNIHFFGFVLGARGKWSEGNNDLLQLLGMDRSKNFKESICRLVLYSTIGMMAIFSDR

SEQ ID NO: 9190 - protein, 1241 aa, Chrysemys picta
MEKSNLYFYTGLALDRVNNAPAVGFDAPADSVKYIRGVIRVAGPMDKMVWTIMKSHENESENQVLPVEHGEEVEENVCDDHGEEILSILPMVFTRDTFNDLTMDSFNPDFKYLSTFDDPYVRESSTDFNRDRNKDLSSIGSNINILESSSWKDGVFYLEYPVDSFNCPICPQILPTFGKWAKHINVVHKSKAIRVVCSKCGKSSQYHNIACHYPKCIPKKADTPMKSHMCSVCGLGFHTRSGLSQHCRHRHPAVRNEQRKEDMAAKSKIKEGSTRSRIWTKDEVAQLIQLERKYIGKRNINKCIESEMRTKTNKQISDKRRELAKKKLVVTGDREEVTEVEDIRVNILEIPPPRERIFPLKGHPEVDLVEKICKRGKQSREGREIINSLGEIEGLLKEDLTKALGWAMLEKLCYSLVEGQDPRNESQIELRNKGKGKIRKEGRRKQFNAIRRYATKKAKYKFYQQLFDKDRRRLTRIIMGEPDKAKCAIPMKEIEEYYVNILGTIGHGNMIGWPSSTENADNDILMSPISVDEIRIALTEIRKDSAPGPDKVKVSNLWDIFNLDSLILTKIFNIWFLNRQVPDEFKKNRTILIPKTQDEEEMKKLTSWRPLTIGSVWIRIYTKILAKRLVETVKICSRQKGFISAPGCEENIAILDNLIKGAKRNGNEIAIVFVDLAKAFDSVGHGHIIAGLRRFGIDEHFIDIIRDLYDNCTTRVWVGDEATESILIRRGVKQGDPLSPILFNIAMDPFLTRLEVEGSGFYVKGNSVTSLAFADDVAILSSSYKGMIKNLGILEEFCKNTNLSVNVKKTKGFHILTKHKTYVVNPKDNWQIGSEKIEYVQPGDFEKYLGARIDPWIGVGGPVLKEKLKDWSENLIKAPLKPAQKILILQTYILPKLFYNLLLIEPPFNLLDDLDVLVRKIVKEILHLPQCTTDGIFYSRGRDGGLALTKFSVQIPNMLIRKWRRHIVSRDDWMDLSYLYAGENLVDKILSFSAVTSHPKKWREEEFLRWSELRCQGIGIKYFKNDLISNSIFRNSSKVKSSAYIAALQLRANIYPTRETLARGRGGVNALCRWCGKVRETVPHISGQCYKTKNARIKRHNRVVSAVVDKVGKLGWKAMIEPHLRNSKGELRKPDIIFIKGDTAVVVDVTVRWEDNAGSLEQAHSEKVAYYLELEEEIKNLTGGKNIHFFGFVLGARGKWSEGNNDLLQLLGMDRSKNFKESICRLVLYSTIGMMAIFSDR

SEQ ID NO: 9191 - protein, 1178 aa, Chrysemys picta
MEKSNLYFYTGLALDRINNAPAVGFDALADSVKYIRGVIRVTGPMDKMVWTIMKSHENESENQVLPVEHGEEVEENVCDDRGEEILSILPMVFTRDTFNDLTMDSFNPDFKYLSTFDDPYVRESGYLNAHLVNGSSLLNSFRPSTDFNRDRNKDLFINSTGSNINILESSSWKDGVFYLEYPVDSFNCPICPQILPTFGKWAKHINVVHKSKAIRVVCSKCGKSSQYRNIACHYPKCIPKKADTPMKSHTCSVCGLGFHTRSGLSQHCRHRHPAVRNEQRKEDMAAKSKIKEGSIRSRIWTKDEVAQLIQLERKYIGKRNINKCIESEMRTKTNKQISDKRRELAKKKLVVTGDREEVTEVEDIRVNILEIPPPRERIFPLKGHPELDLVEKICKRGKQSREGREIINSLGEIEGLLKEDLTKALGWAMLEKLCYSLVEGKDPRNESQIELRNKGKGKMRKEGRRKQFNASRRYATKKAKYKFYQQLFDKDRRRLTRIIMGEPDKAKCAIPMKEIEEYYVNILETIGHGNMIGWPSSTENADNDILMNLISVDEIRIALREIRKDSAPGPDKVKVSNLWDIFNLDSLILTKIFNIWFLNRQVPDEFKKNRTILIPKTQDEEEMKKLTPWRPLTIGSVWIRIYTKILAKRLVETVKICSRQKGFISAPGCEENIAILDNLIKGAKRNGNEIAIVFVDLAKAFDSVGHGHIIAGLRRFGIDEHFIDIIRDLYDNCTTRVWVGDEATESILIRRGVKQGDPLSPILFNIAMDPLLTRLEVEGSGFYVKGNSVTSLAFADDVAILSSSYKGMIKNLGILEEFCKNTNLSVNVKKTKGFHILTKHKTYVVNPKDNWQIGSEEIEYVQPGDFEKYLGARIDPWIGVGGPVLKEKLKDWSENLIKAPLKPAPKILILQTYILPKLFYNLLLIEPPFNLLDDLDVLVRKIVKEILHLPQCTIDGIFYSRGRDGGLALTKFSVQIPNMLIRKWRRHIVSRDDWMDLSYLYAGEHLVDKILLFSAVTSHPKKWREEEFLRWSELRCQGIGIKYFKNDLISNSIFRNSSKVKSSAYIAALQLRANIYPTRETLARGRGGVNALCRWCGKVRETVPHISGQCYKTKNARIKRHNRVVSAVVDKVGKLGWKAIIEPHLRNSKGELRKPDSIFIKGDTAVVVDVTVLLSLNF

SEQ ID NO: 9192 - protein, 1260 aa, Terrapene carolina
MEKSNLYFYTGLALDRVNNAPAVGFDAPADSVKYIRGVIRVAGPMDKMVWTIMKSHEHESENQVLPVEHGEEVEENVCDDHGEEILSILPMVFTRDTFNDLTMESFNPDFKYLSTFDDPYVSESGYLNAHLVNGSSLLNSFRPSTDFNRDRNKDLNSTGSNINILESSSWKDGVFYLEYPVDSFNCPICPQILPTFGKWAKHINVVHKSKAIRVVCSKCGKSSQYHNIACHYPKCIPKKADTPMKSHTCSVCGLGFHTRSGLSQHCRHRHPAVRNEQRKEDMAAKSKIKEGSTRSRIWTKDEVAQLIQLERKYIGKRNINKCIESEMRTKTNKQISDKRRELAKKKLVVTGDREEVTEVEDIRVNILEIPPPRERIFPLKGHPEVDLVEKICKRGKQSREGREIINSLGEIEGLLKEDLTKALGWAMLEKLCYSLVEGKDPRNESQIELRNKGKGKMRKEGRRKQFNAIRRYATKKAKYKFYQQLFDKDRRRLTRIIMGEPDKAKCAIPMKEIEEYYVNILGTIGHGNMIGWPSSTENADNDILMSPISVDEIRIALREIRKDSAPGPDKVKVSNLWDIFNLDSLILTKIFNIWFLNRQVPDEFKKNRTILIPKTQDEEEMKKLTSWRPLTIGSVWIRIYTKILAKRLVETVKICSRQKGFISAPGCEENIAILDNLSKGAKRNGNEIAIVFVDLAKAFDSVGHGHIIAGLRRFGIDEHFIDIIRDLYDNCTTRVWVGDEATESILIRRGVKQGDPLSPILFNIAMDPLLTRLEVEGSGFYVKGNGVTSLAFADDVAILSSSYKGMIKNLGILEEFCKNTNLSVNVKKTKGFHILTKHKTYVVNPKDNWQIGSEEIEYVQPGDFEKYLGARIDPWIGVGGPVLKEKLKDWSENLIKAPLKPAQKILILQTYILPKLFYNLLLIEPPFNLLDDLDVLVRKIVKEILHLPQCTTDGIFYSRGRDGGLALTKFSVQIPNMLIRKWRRHIVSRDDWMDLSYLYAGENLVDKILSFSAVTSHPKKWREEEFLRWSELRCQGIGIKYFKNDLISNSIFRNSSKVKSSAYIAALQLRANIYPTRETLARGRGGVNALCRWCGKVRETVPHISGQCYKTKNARIKRHNRVVSAVVDKVGKLGWKAMIEPHLRNSKGELRKPDIIFIKGDTAVVVDVTVRWEDNAGSLELAHSEKVAYYLELEEEIKNLTGGKNIHFFGFVLGARGKWSEGNNDLLQLLGMDRSKNFKESICRLVLYSTIGMMAIFSDR

SEQ ID NO: 9193 - protein, 1260 aa, Terrapene carolina
MEKSNLYFYTGLALDRVNNAPAVGFDAPADSVKYIRGVIRVAGPMDKMVWTIMKSHEHESENQVLPVEHGAEVEENVCDDHGEEILSILPMVFTRDTFNDLTMESFNPDFKYLSTFDDPYVSESGYLNAHLVNGSSLLNSFRPSTDFNRDRNKDLNSTGSNINILESSSWKDGVFYLEYPVDSFNCPICPQILPTFGKWAKHINVVHKSKAIRVVCSKCGKSSQYHNIACHYPKCIPKKADTPMKSHTCSVCGLGFHTRSGLSQHCRHRHPAVRNEQRKEDMAAKSKIKEGSTRSRIWTKDEVAQLIQLERKYIGKRNINKCIESEMRTKTNKQISDKRRELAKKKLVVTGDREEVTEVEDIRVNILEIPPPRERIFPLKGHPEVDLVEKICKRGKQSREGREIINSLGEIEGLLKEDLTKALGWAMLEKLCYSLVEGKDPRNESQIELRNKGKGKMRKEGRRKQFNAIRRYATKKAKYKFYQQLFDKDRRRLTRIIMGEPDKAKCAIPMKEIEEYYVNILGTIGHGNMIGWPSSTENADNDILMSPISVDEIRIALREIRKDSAPGPDKVKVSNLWDIFNLDSLILTKIFNIWFLNRQVPDEFKKNRTILIPKTQDEEEMKKLTSWRPLTIGSVWIRIYTKILAKRLVETVKICSRQKGFISAPGCEENIAILDNLIKGAKRNGNEIAIVFVDLAKAFDSVGHGHIIAGLRRFGIDEHFIDIIRDLYDNCTTRVWVGDEATESILIRRGVKQGDPLSPILFNIAMDPLLTRLEVEGSDFYVKGNGVTSLAFADDVAILSSSYKGMIKNLGILEEFCKNTNLSVNVKKTKGFHILTKHKTYVVNPKDNWQIGSEEIEYVQPGDFEKYLGARIDPWIGVGGPVLKEKLKDWSENLIKAPLKPAQKILILQTYILPKLFYNLLLIEPPFNLLDDLDVLVRKIVKEILHLPQCTTDGIFYSRGRDGGLALTKFSVQIPNMLIRKWRRHIVSRDDWMDLSYLYAGENLVDKILSFSAVISHPKKWREEEFLRWSELRCQGIGIKYFKNDLISNSIFRNSSKVKSSAYIAALQLRANIYPTRETLARGRGGVNALCRWCGKVRETVPHISGQCYKTKNARIKRHNRVVSAVVDKVGKLGWKAMIEPHLRNSKGELRKPDIIFIKGDTAVVVDVTVRWEDNAGSLEQAHSEKVAYYLELEEEIKNLTGGKNIHFFGFVLGARGKWSEGNNDLLQLLGMDRSKNFKESICRLVLYSTIGMMAIFSDR

SEQ ID NO: 9194 - protein, 1260 aa, Terrapene carolina
MEKSNLYFYTGLALDRVNNAPAVGFDAPADSVKYIRGVIRVAGPMDKMVWTIMKSHEHESENQVLPVEHGEEVEENVCDDHGEEILSILPMVFTRDTFNDLTMESFNPDFKYLSTFDDPYVSESGYLNAHLVNGSSLLNSFRPSTDFNRDRNKDLNSTGSNINILESSSWKDGVFYLEYPVDSFNCPICPQILPTFGKWAKHINVVHKSKAIRVVCSKCGKSSQYHNIACHYPKCIPKKADTPMKSHTCSVCGLGFHTRSGLSQHCRHRHPAVRNEQRKEDMAAKSKIKEGSTRSRIWTKDEVAQLIQLERKYIGKRNINKCIESEMRTKTNKQISDKRRELAKKKLVVTGDREEVTEVEDIRVNILEIPPPRERIFPLKGHPEVDLVEKICKRGRQSREGREIINSLGEIEGLLKEDLTKALGWAMLEKLCYSLVEGKDPRNESQIELRNKGKGKMRKEGRRKQFNAIRRYATKKAKYKFYQQLFDKDRRRLTRIIMGEPDKAKCAIPMKEIEEYYVNILGTIGHGNMIGWPSSTENADNDILMSPISVDEIRIALSEIRKDSAPGPDKVKVSNLWDIFNLDSLILTKNFNIWFLNRQVPDEFKKNRTILIPKTQDEEEMKKLTSWRPLTIGSVWIRIYTKILAKRLVETVKICSRQKGFISAPGCEENIAILDNLIKGAKRNGNEIAIVFVDLAKAFDSVGHGHIIAGLRRFGIDEHFIDIIRDLYDNCTTRVWVGDEATESILIRRGVKQGDPLSPILFNIAMDPLLTRLEVEGSGFYVKGNGVTSLAFADDVAILSSSYKGMIKNLGILEEFCKNTNLSVNVKKTKGFHILTKHKTYVVNPKDNWQIGSEEIEYVQPGDFEKYLGARIDPWIGVGGPVLKEKLKDWSENLIKAPLKPAQKILILQTYILPKLFYNLLLIEPPFNLLDDLDVLVRKIVKEILHLPQCTTDGIFYSRGRDGGLALTKFSVQIPNMLIRKWRRHIVSRDDWMDLSYLYAGENLVDKILSFSAVTSHPKKWREEEFLRWSELRCQGIGIKYFKNDLISNSIFRNSSKVKSSAYIAALQLRANIYPTRETLARGRGGVNALCRWCGKVRETVPHISGQCYKTKNARIKRHNRVVSAVVDKVGKLGWKAMIEPHLRNSKGELRKPDIIFIKGDTAVVVDVTVRWEDNAGSLEQAHSEKVAYYLELEEEIKNLTGGKNIHFFGFVLGARGKWSEGNNDLLQLLGMDRSKNFKESICRLVLYSTIGMMAIFSDR

SEQ ID NO: 9195 - protein, 1307 aa, Terrapene carolina
MDAPLVRVRFPLVRVRFPLVRVSFPQVRVSFPLERVSFPLRRVNLLAMEKSNLYFYTGLALDRVNNAPAVGFDAPADSVKYIRGVIRVAGPMDKMVWTIMKCHEHESENQVLPVEHGEEVEENVCDDHGEEILSILPMVFTRDTFNDLTMESFNPDFKYLSTFDDPYVSESGYLNAHLVNGSSLLNSFRPSTDFNRDRNKDLNSTGSNINILESSSWKDGVFYLEYPVDSFNCPICPQILPTFGKWAKHINVVHKSKAIRVVCSKCGKSSQYHNIACHYPKCIPKKADTPMKSHTCSVCGLGFHTRSGLSQHCRHRHPAVRNEQRKEDMAAKSKIKEGSTRSRIWTKDEVAQLIQLERKYIGKRNINKCIESEMRTKTNKQISDKRRELAKKKLVVTGDREEVTEVEDIRVNILEIPPPRERIFPLKGHPEVDLVEKICKRGKQSREGREIINSLGEIEGLLKEDLTKALGWAMLEKVCYSLVEGKDPRNESQIELRNKGKGKMRKEGRRKQFNAIRRYATKKAKYKFYQQLFDKDRRRLTRIIMGEPDKAKCAIPMKEIEEYYVNILGTIGHGNMIGWPSSTENADNDILMSPSSVDEIRIALREIRKDSAPGPDKVKVSNLWDIFNLDSLILTKIFNIWFLNRQVPDEFKKNRTILIPKTQDEEEMKKLTSWRPLTIGSVWIRIYTKILAKRLVETVKICSRQKGFISAPGCEENIAILDNLIKGAKRNGNEIAIVFVDLAKAFDSVGHGHIIAGLRRFGIDEHFIDIIRDLYDNCTTRVWVGDEATESILIRRGVKQGDPLSPILFNIAMDPLLTRLEVEGSGFYVKGNGVTSLAFADDVAILSSSYKGMIKNLGILEEFCKNTNLSVNVKKTKGFHILTKHKTYVVNPKDNWQIGSEEIEYVQPGDFEKYLGARIDPWIGVGGPVLKEKLKDWSENLIKAPLKPAQKILILQTYILPKLFYNLLLIEPPFNLLDDLDVLVRKIVKEILHLPQCTTDGIFYSRGRDGGLALTKFSVQIPNMLIRKWRRHIVSRDDWMDLSYLYAGENLVDKILSFSAVTSHPKKWREEEFLRWSELRCQGIGIKYFKNDLISNSIFRNSTKVKSSAYIAALQLRANIYPTRETLARGRGGVNALCRWCGKVRETVPHISGQCYKTKNARIKRHNRVVSAVVDKVGKLGWKAMIEPHLRNSKGELRKPDIIFIKGDTAVVVDVTVRWEDNAGSLEQAHSEKVAYYLELEEEIKNLTGGKNIHFFGFVLGARGKWSEGNNDLLQLLGMDRSKNFKESICRLVLYSTIGMMAIFSDR

SEQ ID NO: 9196 - protein, 1260 aa, Trachemys scripta
MEKSNLYFYTGLALDRVNNAPAVGFDAPADSVKYIRGVIRVAGPMDKMVWNIMKSHENESENQVLPVEHGEEVEENVCDDHGEEILSILPMVFTRDTFNDLTMDSFNPDFKYLSTFDDPYVRESGYLNAHLVNGSSLLNSFRPSTDFNRDRNKDLNSTGSNINILESSSWKDGVFYLEYPVDSFNCPICPQILPTFGKWAKHINVVHKSKAIRVVCSKCGKSSQYHNIACHYPKCIPKKADTPMKSHTCSVCGLGFHTRSGLSQHCRHRHPAVRNEQRKEDMAAKSKIKEGSTRSRIWTKDEVAQLIQLERKYIGKRNINKCIESEMRTKTNKQISDKRRELAKKKLVVTGDREEVTEVEDIRVNILEILPPRERIFPLKGHPEVDLVEKICKRGKQSREGREIINSLGEIEGLLKEDLTKALGWAMLEKLCYSLVEGKDPRNESQIELRNKGKGKMRKEGRRKQFNAIRRYATKKAKYKFYQQLFDKDRRRLTRIIMGEPDKAKCAIPMKEIEEYYVNILGTIGHGNMIGWPSSTENADNDILMSPISVDEIRIALREIRKDSAPGPDKVKVRNLWDIFNLDSLILTKNFNIWFLNRQVPDKFKKNRTILIPKTQDEEEMKKLTSWRPLTIGSVWIRIYTKILAKRLVETVKICSRQKGFISAPGCEENIAILDTLIKGAKRNGNEIAIVFVDLAKAFDSVGHGHIIAGLRRFGIDEHFIDIIRDLYDNCTTRVWVGDEATESILIRRGVKQGDPLSPILFNIAMDPLLTRLEVEGSGFYVKGNSVTSLAFANNVAILSSSYKGMIKNLGILEEFCKNINLSVNVKKTKGFHILTKHKTYVVNPKDNWQIGSEEIEYVQPGDFEKYLGARIDPWIGVGGPVLKEKLKDWSENLIKAPLKPAQKILILQTYILPKLFYNLLLIEPPFNLLDDLDVLVRKIVKEILHLPQCTTDGIFYSRGRDGGLVLTKFSVQIPNMLIRKWRRHIVSRDDWMDLSYLYAGENLVDKILSFSAVTSHPKKWREEEFLRWSELRCQGIGIKYFKNDLISNSIFRNSSKVKSSAYIAALQLRANIYPTRETLARGRGGVNALCRWCGKVRETVPHISGQCYKTKNARIKRHNRVVSAVVDKVGKLGWKAMIEPHLRNSKGELRKPDIIFIKGDTAVVVDVTVRWEDNAGSLEQAHSEKMAYYLELEEEIKNLTGGKNIHFFGFVLGARGKWSEGNNDLLQLLGMDRSKNFKESICRLVLYSTIGMMAIFSDR

SEQ ID NO: 9197 - protein, 1260 aa, Actinemys marmorata
MEKSNLYFYTGLALDRVNNAPAVGFDAPADSVKYIRGVIRVAGPMDKMVWTIMKSHEHESENQVLPVEHGEEVEENVCDDHGEEILSILPMVFTRDTFNDLTMESFNPDFKYLSTFDDPYVRESGYLNAHLVNGSSLLNSFRPSTDFNRDRNKDLNSTGSNINILESSSWKDGVFYLEYPVDSFNCPICPQILPTFGKWAKHINVVHKSKAIRVVCSKCGKSSQYHNIACHYPKCIPKKADTPMKSHTCSVCGLGFHTRSGLSQHCRHRHPAVRNEQRKEDMAAKSKIKEGSTRSRIWTKDEVAQLIQLERKYIGKRNINKCIESEMRTKTNKQISDKRRELVKKKLVVTGDREEVTEVEDIRVNILEIPPPRERIFPLKGHPEVDLVEKICKRGKQSREGREIINSLGEIEGLLKEDLTKALGWAMLEKLCYSLVEGKDPRNESQIELRNKGKGKMRKEGRRKQFNAIRRYATKKAKYKFYQQLFDKDRRRLTRIIMGEPDKAKCAIPMKEIEEYYMNILGTIGHGNMIGWPSSTENADNDILMSPISVDEIRIALREIRKDSAPGPDKVKVSNLWDIFNLDSLILTKNFNIWFLNRQVPDEFKKNRTILIPKTQDEEEMKKLTSWRPLTIGSVWIRIYTKILAKRLVETVKICSRQKGFISAPGCEENIAILDNLIKGAKRNGNEIAIVFVDLAKAFDSVGHGHIIAGLRRFGIDEHFIDIIRDLYDNCTTRVWVGDEATESILIRRGVKQGDPLSPILFNIAMDPLLTRLEVEGSGFYVKGNSVTSLAFADDVAILSSSYKGMIKNLGILEEFCKNTNLSVNVKKTKGFHILTKHKTYVVNPKDNWQIGSEEIEYVQPGDFEKYLGARIDPWIGVGGPVLKEKLKDWSENLIKAPLKPAPKILILQTYILPKLFYNLLLIEPPFNLLDDLDVLVRKIVKEILHLPQCTTDRIFYSRGRDGGLALTKFSVQIPNMLIRKWRRHIVSRDDWMDLSYLYAGENLVDKILSFSAVTSHPKKWREEEFLRWSELRCQGIGIKYFKNDLISNSIFRNSSKVKSSAYIAALQLRANIYPTRETLARGRGGVNALCRWCGKVRETVPHISGQCYKTKNARIKRHNRVVSAVVDKVGKLGWKAMIEPHLRNSKGELRKPDIIFIKGDTAVVVDVTVRWEDNAGSLEQAHSEKMAYYLELEEEIKNLTGGKNIHFFGFVLGARGKWSEGNNDLLQLLGMDRSKNFKESICRLVLYSTIGMMAIFSDR

SEQ ID NO: 9198 - protein, 1260 aa, Actinemys marmorata
MEKSNLYFYTGLALDRVNNAPAVGFDAPADSVKYIRGVIRVAGPMDKMVWTIMKSHEHESENQVLPVEHGEEVEENVCDDHGEEILSILPMVFTRDTFNDLTMESFNPDFKYLSTFDDPYVRESGYLNAHLVNGSSLLNSFRPSTDFNRDRNKDLNSTGSNINILESSSWKDGVFYLEYPVDSFNCPICPQILPTFGKWAKHINVVHKSKAIRVVCSKCGKSSQYHNIACHYPKCIPKKVDTPMKSHTCSVCGLGFHTRSGLSQHCRHRHPAVRNEQRKEDMAAKSKIKEGSTRSRIWTKDEVAQLIQLERKYIGKRNINKCIESEMRTKTNKQISDKRRELAKKKLVVTGDREEVTEVEDIRVNILEIPPPRERIFPLKGHPEVDLVEKICKRGKQSREGREIINSLGEIEGLLKEDLTKALGWAMLEKLCYSLVEGKDPRNESQIELRNKGKGKMRKEGRRKQFNAIRRYATKKAKYKFYQQLFDKDRRRLTRIIMGEPDKAKCAIPMKEIEEYYVNILGTIGHGNMIGWPSSTENADNDILMSPISVDEIRIALREIRKDSAPGPDKVKVSNLWDIFNLDSLILTKIFNIWFLNRQVPDEFKKNRTILIPKTQDEEEMKKLTSWRPLTIGSVWIRIYTKILAKRLVETVKICSRQKGFISAPGCEENIAILDNLIKGAKRNGNEIAIVFVDLAKAFDSVGHGHIIAGLRRFGIDEHFIDIIRDLYDNCTTRVWVGDEATESILIRRGVKQGDPLSPILFNIAMDPLLTRLEVEGSGFYVKGNSVTSLAFADDVAILSSSYKGMIKNLGILEEFCKNTNLSVNVKKTKGFHILTKHKTYVVNPKDNWQIGSEEIEYVQPGDFEKYLGARIDPWIGVAGPVLKEKLKDWSENLIKAPLKPAQKILILQTYILPKLFYNLLLIEPPFNLLDDLDVLVRKIVKEILHLPQCTTDGIFYSRGRDGGLALTKFSVQIPNMLIRKWRRHIVSRDDSMDLSYLYAGENLVDKILSFSAVTSHPKKWREEEFLRWSELRCQGIGIKYFKNDLISNSIFRNSSKVKSSAYIAALQLRANIYPTRETLARGRGGVNALCRWCGKVRETVPHISGQCYKTKNARIKRHNRVVSAVVDKVGKLGWKAMIEPHLRNSKGELRKPDIIFIKGDTAVVVDVTVRWEDNAGSLEQAHSEKVAYYLELEEEIKNLTGGKNIHFFGFVLGARGKWSEGNNDLLQLLGMDRSKNFKESICRLVLYSTIGMMAIFSDR

SEQ ID NO: 9199 - protein, 1015 aa, Chrysemys picta
MKSHTCSVCGLGFHTRSGLSQHCRHRHPAVRNEQRKEDMAAKSKIKEGSIRSRIWTKDEVAQLIQLERKYIGKRNINKCIESEMRTKTNKQISDKRRELAKKKLVVTGDREEVTEVEDIRVNILEIPPPRERIFPLKEHPEVDLVEKICKRGKQSREGREIINSLGEIEGLLKEDLTKALGWAMLEKLCYSLVEGKDPRNESQTELRNKGKGKMRKEGRRKQFNASRRYATKKAKYKFYQQLFDKDRRRLTRIIMGEPDKAKCAIPMKEIEEYYVNILGTIGHGNMIGWPSSTENADNDILMSPISVDEIRIALREIRKDSAPGPDKVKVSNLWDIFNLDSLILTKIFNIWFLNRQVPDEFKKNRTILIPKTQDEEEMKKLTSWRPLTIGSVWIRIYTKILAKRLVETVKICSRQKGFISPPGCEENIAILDNLIKGAKRNGNEIAIVFVDLAKAFDSVGHGHIIAGLRRFGIDEHFIDIIRDLYDNCTTRVWVGDEATESILIRRGVKQGDPLSPILFNIAMDPLLTRLEVEGSGFYVKGNSVTSLAFADDVAILSSSYKGMIKNLGIFEEFCKNTNLSVNVKKTKGFHILTKHKTYVVNPKDNWQIGSEEIEYVQPGDFEKYLGARIDPWIGVGGPVLKEKLKDWSENLIKAPLKPDQKILILQTYILPKLFYNLLLIEPPFNLLDDLDVLVRKIVKETLHLPQCTTDGIFYSRGRDGGLALTKFSVQIPNMLIRKWRRHIVSRDDWMDLSYLYAGENLVDKILLFSAVTSHPKKWREEEFLRWSELRCQGVGIKYFKNDLISNSIFRNSSKVKSSAYIAALQLRANIYPTRETRGRGGVNALCRWCGKVRETVPHISGQCYKTKNARIKRHNRVVSAVVDKVGKLGWKAIIEPHLRNSKGELRKPDIIFIKGDTAVVVDVTVRWEDNAGSLEQAHSEKVAYYLELEEEIKNLTGGKNIHFFGFVLGARGKWSEGNNDLLQLLGMDRSKNFKESICRLVLYSTIGMMAIFSDR

SEQ ID NO: 9200 - protein, 1241 aa, Chrysemys picta
MEKSNLYFYTGLALDRVNNAPAVGFDAPADSVKYIRGVIRVAGPMDKMVWTIMKSHENESENQVLPVEHGEEVEENVCDDHGEEILSILPMVFTRDTFNDLTMDSFNPDFKYLSTFDDPYVRESSTDFNRDRNKDLNSISSNINILESSSWKDGVFYLEYPVDSFNCPICPQILPTFGKWAKHINVVHKSKAIRVVCSKCGKSSQYHNIACHYPKCIPKKADTPMKSHTCSVCGLGFHTRSGLSQHCRHRHPAVRNEQRKEDMAAKSKIKEGSTRSRIWTKDEVAQLIQLERKYIGKRNINKCIESEMRTKTNKQISDKRRELAKKKLVVTGDREEVTEVEDIRVNILEIPPPRERIFPLKGHPEVDLVEKICKRGKQSREGREIINSLGEIEGLLKEDLTKALGWAMLEKLCYSLVEGQDPRNESQIELRNKGKGKIRKEGRRKQFNAIRRYATKKAKYKFYQQLFDKDRRRLTRIIMGEPDKAKCAIPMKEIEEYYVNILGTIGHGNMIGWPSSTENADNDILMSPISVDEIRIALREIRKDSAPGPDKVKVSNLWDIFNLDSLILTKIFNIWFLNRQVPDEFKKNRTILIPKTQDEEEMKKLTSWRPLTIGSVWIRIYTKILAKRLVETVKICSRQKGFISAPGCEENIAILDNLIKGAKRNGNEIAIVFVDLAKAFDSVGHGHIIAGLRRFGIDEHFIDIIRDLYDNCTTRVWVGDEATESILIRRGVKQGDPLSPILFNIAMDPLLTRLEVEGSGFYVKGNSVTSLAFADDVAILSSSYKGMIKNLGILEEFCKNTNLSVNVKKTKGFHIVTKHKTYVVNPKDNWQIGSEKIEYVQPGDFEKYLGARIDPWIGVGGPVLKEKLKDWSENLIKAPLKPAQKILILQTYILPKLFYNLLLIEPPFNLLDDLDVLVRKIVKEILHLPQCTTDGIFYSRGRDGGLALTKFSVQIPNMLIRKWRRHIVSRDDWMDLSYLYAGENLVDKILSFSAVTSHPKKWREEEFLRWSELRCQGIGIKYFKNDLISNSIFRNSSKVKSSAYIAALQLRANIYPTRETLARGRGGVNALCRWCGKVRETVPHISGQCYKTKNARIKRHNRVVSAVVDKVGKLGWKAMIEPHLRNSKGELRKPDIIFIKGDTAVVVDVTVRWEDNAGSLEQAHSEKVAYYLELEEEIKNLTGGKNIHFFGFVLGARGKWSEGNNDLLQLLGMDRSKNFKESICRLVLYSTIGMMAIFSDR

SEQ ID NO: 9201 - protein, 1291 aa, Chrysemys picta
MVPHGCPPGKGSLPQAQVSFPLERVSFPQVRVSFPLERVSFPLRRVNLLAMEKSNLYFYTGLALDRVNNAPAVGFDAPADSVKYIRGVIRVAGPMDKMVWTIMKSHENESENQVLPVEHGEEVEENVCDDHGEEILSILPMVFTRDTFNDLTMDSFNPDFKYLSTFDDPYVRESSTDFNRDRNKDPNSIGSNINILESSSWKDGVFYLEYPVDSFNCPICPQILPTFGKWAKHINVVHKNKAIRVVCSKCGKSSQYHNIACHYPKCIPKKADTPMKSHTCSVCGLGFHTRSGLSQHCRHRHPAVRNEQRKEDMAAKSKIKEGSTRSRIWTKDEVAQLIQLERKYIGKRNINKCIESEMRTKTNKQISDKRRELAKKKLVVTGDREEVTEVEDIRVNILEIPPPRERIFPLKGHPEVDLVEKICKRGKQSREGREIINSLGEIEGLLKEDLTKALGWAMLEKLCYSLVEGQDPRNESQIELRNKGKGKIRKEGRRKQFNAIRRYATKKAKYKFYQQLFDKDRRRLTRIIMGEPDKAKCAIPMKEIEEYYVNILGTIGHGNMIGWPSSTENADNDILMSPISVDEIRIALTEIRKDSAPGPDKVKVSNLWDIFNLDSLILTKIFNIWFLNRQVPDEFKKNRTILIPKTQDEEEMKKLTSWRPLTIGSVWIRIYTKILAKRLVETVKICSRQKGFISAPGCEENIAILDNLIKGAKRNGNEIAIVFVDLAKAFDSVGHGHIIAGLRRFGIDEHFIDIIRDLYDNCTTRVWVGDEATESILIRRGVKQGDPLSPILFNIAMDPLLTRLEVEGSGFYVKGNSVTSLAFADDVAILSSSYKGMIKNLGILEEFCKNTNLSVNVKKTKGFHILTKHKTYVVNPKDNWQIGSEKIEYVQPGDFEKYLGARIDPWIGVGGPVLKEKLKDWSENLIKAPLKPAQKILILQTYILPKLFYNLLLIEPPFNLLDDLDVLVRKIVKEILHLPQCTTDGIFYSRGRDGGLALTKFSVQIPNMLIRKWRRHIVSRDDWMDLSYLYAGENLVDKILSFSAVTSHPKKWREEEFLRWSELRCQGIGIKYFKNDLISNSIFRNSSKVKSSAYIAALQLRANIYPTRETLARGRGGVNALCRWCGKVRETVPHISGQCYKTKNARIKRHNRVVSAVVDKVGKLGWKAMIEPHLRNSKGELRKPDIIFIKGDTAVVVDVTVRWEDNAGSLEQAHSEKVAYYLELEEEIKNLTGGKNIHFFGFVLGARGKWSEGNNDLLQLLGMDRSKNFKESICRLVLYSTIGMMAIFSDR

SEQ ID NO: 9202 - protein, 1241 aa, Chrysemys picta
MEKSNLYFYTGLALDRVNNAPAVGFDAPADSVKYIRGVIRVAGPMDKMVWTIMKSHENESENQVLPVEHGEEVEENVCDDHGEEILSILPMVFTRDTFNDLTMDSFNPDFKYLSTFDDPYVRESSTDFNRDRNKDLNSIGSNINILESSSWKDGVFYLEYPVDSFNCPICPQILPTFGKWAKHINVVHKSKAIRVVCSKCGKSSQYHNIACHYPKCIPKKADTPMKSHTCSVCGLGFHTRSGLSQHCRHRHPAVRNEQRKEDMAAKSKIKEGSTRSRIWTKDEVAQLIQLERKYIGKRNINKCIESEMRTKTNKQISDKRRELAKKKLVVTEDREEVTEVEDIRVNILEIPPPRERIFPLKGHPEVDLVEKICKRGKQSREGREIINSLGEIEGLLKEDLTKALGWAMLEKLCYSLVEGQDPRNESQIELRNKGKGKIRKEGRRKQFNAIRRYATKKAKYKFYQQLFDKDRRRLTRIIMGEPDKAKCAIPMKEIEEYYVNILGTIGHGNMIGWPSSTENADNDILMSPISVDEIRIALTEIRKDSAPGPDKVKVSNLWDIFNLDSLILTKIFNIWFLNRQVPDEFKKNRTILIPKTQDEEEMKKLTSWRPLTIGSVWIRIYTKILAKRLVETVKICSRQKGFISAPGCEENIAILDNLIKGAKRNGNEIAIVFVDLAKAFDSVGHGHIIAGLRRFGIDEHFIDIIRDLYDNCTTRVWVGDEATESILIRRGVKQGDPLSPILFNIAMDPLLTRLEVEGSGFYVKGNSVTSLAFADDVAILSSSYKGMIKNLGILEEFCKNTNLSVNVKKTKGFHILTKHKTYVVNPKDNWQIGSEKIEYVQPGDFEKYLGARIDPWIGVGGPVLKEKLKDWSENLIKAPLKPAQKILILQTYILPKLFYNLLLIEPPFNLLDDLDVLVRKIVKEILHLPQCTTDGIFYSRGRDGGLALTKFSVQIPNMLIRKWRRHIVSRDDWMDLSYLYAGENLVDKILSFSAVTSHPKKWREEEFLRWSELRCQGIGIKYFKNDLISNSIFRNSSKVKSSAYIAALQLRANIYPTRETLARGRGGVNALCRWCGKVRETVPHISGQCYKTKNARIKRHNRVVSAVVDKVGKLGWKAMIEPHLRNSKGELRKPDIIFIKGDTAVVVDVTVRWEDNAGSLEQAHSEKVAYYLELEEEIKNLTGGKNIHFFGFVLGARGKWSEGNNDLLQLLGMDRSKNFKESICRLVLYSTIGMMAIFSDR

SEQ ID NO: 9203 - protein, 1260 aa, Terrapene carolina
MEKSNLYFYTGLALDRVNNAPAVGFDAPADSVKYIRGVIRVAGPMDKMVWTIMKSHEHESENQVLPVEHGEEVEENVCDDHGEEILSILPMVFTRDTFNDLTMESFNPDFKYLSTFDDPYVSESGYLNAHLVNGSSLLNSFRPSTDFNRDRNKDLNSTGSNINILESSSWKDGVFYLEYPVDSFNCPICPQILPTFGKWAKHINVVHKSKAIRVVCSKCGKSSQYHNIACHYPKCIPKKVDTPMKSHTCSVCGLGFHTRSGLSQHCRHRHPAVRNEQRKEDMAAKSKIKEGSTRSRIWTKDEVAQLIQLERKYIGKRNINKCIESEMRTKTNKQISDKRRELAKKKLVVTGDREEVTEVEDIRVNILEIPPPRERIFPLKGHPEVDLVEKICKRGKQSREGREIINSLGEIEGLLKEDLTKALGWAMLEKLCYSLVEGKDPRNESQIELRNKGKGKMRKEGRRKQFNAIRRYATKKAKYKFYQQLFDKDRRRLTRIIMGEPDKAKCAIPMKEIEEYYVNILGTIGHGNMIGWPSSTENADNDILMSPISVDEIRIALREIRKDSAPGPDKVKVSNLWDIFNLDSLILTKIFNIWFLNRQVPDEFKKNRTILIPKTQDEEEMKKLTSWRPLTIGSVWIRIYTKILAKRLVETVKICSRQKGFISAPGCEENIAILDNLIKGAKRNGNEIAIVFVDLAKAFDSVGHGHIIAGLRRFGIDEHFIDIIRDLYDNCTTRVWVGDEATESILIRRGVKQGDPLSPILFNIAMDPLLTRLEVEGSGFYVKGNGVTSLAFADDVAILSSSYKGMIKNLGILEEFCKNTNLSVNVKKTKGFHILTKHKTYVVNPKDNWQIGSEEIEYVQPGDFEKYLGARIDPWIGVGGPVLKEKLKDWSENLIKAPLKPAQKILILQTYILPKLFYNLLLIEPPFTLLDDLDVLVRKIVKEILHLPQCITDGIFYSRGRDGGLALTKFSVQIPNMLIRKWRRHIVSRDDWMDLSYLYAGENLVDKILSFSAVTSHPKKWREEEFLRWSELRCQGIGIKYFKNDLISNSIFRNSSKVKSSAYIAALQLRANIYPTRETLARGRGGVNALCRWCGKVRETVPHISGQCYKTKNARIKRHNRVVSAVVDKVGKLGWKAMIEPHLRNSKGELRKPDIIFIKGDTAVVVDVTVRWEDNAGSLEQAHSEKVAYYLELEEEIKNLTGGKNIHFFGFVLGARGKWSEGNNDLLQLLGMDRSKNFKESICRLVLYSTIGMMAIFSDR

SEQ ID NO: 9204 - protein, 1148 aa, Terrapene carolina
MDKMVWTIMKSHEHESENQVLPVEHGEEVEENVCDDHGEEILSILPMVFTRDTFNDLTMESFNPDFKYLSTFDDPYVSESGYLNAHLVNGSSLLNSFRPSTDFNRDRNKDLNSTGSNINILESSSWKDGVFYLEYPVDSFNCPICPQILPTFGKWAKHINVVHKSKAIRVVCSKCGKSSQYHNIACHYPKCIPKKADTPMKSHTCSVCGLGFHTRSGLSQHCRHRHPAVRNEQRKEDMAAKSKIKEESTRSRIWTKDEVAQLIQLERKYIGKRNINKCIESEMRTKTNKQISDKRRELAKKKLVVTGDREEVTEVEDIRVNILEIPPPRERIFPLKGHPEVDLVEKICKRGKQSREGREIINSLGEIEGLLKEDLTKALGWAMLEKLCYSLVEGKDPRNESQIELRNKGKGKMRKEGRRKQFNAIRRYATKKAKYKFYQQLFDKDRRRLTRIIMGEPDKAKCAIPMKEIEEYYVNILGTIGHGNMIGWPSSTENADNDILMSSISVDEIRIALREIRKDSAPGPDKVKVSNLWDIFNLDSLILTKIFNIWFLNRQVPDEFKKNRTILIPKTQDEEEMKKLTSWRPLTIGSVWIRIYTKILAKRLVETVKICSRQKGFISAPGCEENIAILDNLIKGAKRNGNEIAIVFVDLAKAFDSVGHGHIIAGLRRFGIDEHFIDIIRDLYDNCTTRVWVGDEATESILIRRGVKQGDPLSPILFNIAMDPLLTRLEVEGSGFYVKGNGVTSLAFADDVAILSSSYKGMIKNLGILEEFCKNTNLSVNVKKTKGFHILTKHKTYVVNPKDNWQIGSEEIEYVQPGDFEKYLGARIDPWIGVGGPVLKEKLKDWSENLIKAPLKPAQKILILQTYILPKLFYNLLLIEPPFNLLDDLDVLVRKIVKEILHLPQCTTDGIFYSRGRDGGLALTKFSVQIPNMLICKWRRHIVSRDDWMDLSYLYAGENLVDKILSFSAVTSHPKKWREEEFLRWSELRCQGIGIKYFKNDLISNSIFRNSSKVKSSAYIAALQLRANIYPTRETLARGRGGVNALCRWCGKVRETVPHISGQCYKTKNARIKRHNRVVSAVVDKVGKLGWKAMIEPHLRNSKGELRKPDIIFIKGDTAVVVDVTVRREDNAGSLEQAHSEKVAYYLE

SEQ ID NO: 9205 - protein, 1260 aa, Terrapene carolina
MEKSNLYFYTGLALDRVNNAPAVGFDAPADSVKYIRGVIRVAGPMDKMVWTIMKSHEHESENEVLPVEHGEEVEENVCDDHGEEILSILPMLFTRDTFNDLTMESFNPDFKYLSTFDDPYVSESGYLNAHLVNGSSLLNSFRPSTDFNRDRNKDLNSTGSNINILESSSWKDGVFYLEYPVDSFNCPICPQILPTFGKWAKHINVVHKSKAIRVVCSKCGKSSQYHNIACHYPKCIPKKADTPMKSHTCSVCGLGFHTRSGLSQHCRHRHPAVRNEQRKEDMAAKSKIKEGSTRSRIWTKDEVAQLIQLERKYIGKRNINKCIESEMRTKTNKQISDKRRELAKKKLVVTGDREEVTEVEDIRVNILEIPPPRERIFPLKGHPEVDLVEKICKRGKQSREGREIINSLGEIEGLLKEDLTKALGWAMLEKLCYSLVEGKDPRNESQIELRNKGKGKMRKEGRRKQFNAIRRYATKKAKYKFYQQLFDKDRRRLTRIIMGEPDKAKCAIPMKEIEEYYVNILGTIGHGNMIGWPSSTENADNDILMSPISVDEIRIALREIRKDSAPGPDKVKVSNLWDIFNLDSLILTKIFNIWFLNRQVPDEFKKNRTILIPKTQDEEEMKKLTSWRPLTIGSVWIRIYTKILAKRLVETVKICSRQKGFISAPGCEENIAILDNLIKGAKRNGNEIAIVFVDLAKAFDSVGHGHIIAGLRRFGIDEHFIDIIRDLYDNCTTRVWVGDEATESILIRRGVKQGDPLSPILFNIAMDPLLTRLEVEGSGFYVKGNGVTSLAFADDVAILSSSYKGMIKNLGILEEFCKNTNLSVNVKKTKGFHILTKHKTYVVNPKDNWQIGSEEIEYVQPGDFEKYLGARIDPWIGVGGPVLKEKLKDWSENLIKAPLKPAQKILILQTYILPKLFYNLLLIEPPFNLLDDLDVLVRKIVKEILHLPQCTTDGIFYSRGRDGGLALTKFSVQIPNMLIRKWRRHIVSRDDWMDLSYLYAGENLVDKILSFSAVTSHPRKWREEEFLRWSELRCQGIGIKYFKNDLISNSIFRNSIKVKSSAYIAALQLRANIYPTRETLARGRGGVNALCRWCGKVRETVPHISGQCYKTKNARIKRHNRVVSAVVDKVGKLGWKAMIEPHLRNSKGELRKPDIIFIKGDTAVVVDVTVRWEDNAGSLEQAHSEKVAYYLELEEEIKNLTGGKNIHFFGFVLGARGKWSEGNNDLLQLLGMDRSKNFKESICRLVLYSTIGMMAIFSDR

SEQ ID NO: 9206 - protein, 1031 aa, Terrapene carolina
MGEGSQEGAVRGQEAGRLTCSVCGLGFHTRSGLSQHCRHRHPAVRNEQRKEDMAAKSKIKEGSTRSHIWTKDEVAQLIQLERKYIGKRNINKCIESEMRTKTNKQISDKRRELAKKKLVVTGEREEVTEVEDIRVNILEIPPPRERIFPLKGHPEVDLVEKICKRGKQSREGREIINSLGEIEGLLKEDLTKALGWAMLEKLCYSLVEGKDPRNESQIELRNKGKGKMRKEGRRKQFNAIRRYATKKAKYKFYQQLFDKDRRRLTRIIMGEPDKVKCAIPMKEIEEYYVNILGTIGHGNMIGWPSSTENADNDILMSPISVDEIRIALREIRKDSAPGPDKVKVSNLWDIFNLDSLILTKIFNIWFLNRQVPDEFKKNRTILIPKTQDEEEMKKLTSWRPLTIGSVWIRIYTKILAKRLVETVKICSRQKGFISAPGCEENIAILDNLIKGAKRNGNEIAIVFVDLAKAFDSVGHGHIIAGLRRFGIDEHFIDIIRDLYDNCTTRVWVGDEATESILIRRGVKQGDPLSPILFNIAMDPLLTRLEVEGSGFYVKGNGVTSLAFADDVAILSSSYKGMIKNLGILEEFCKNTNLSVNVKKTKGFHILTKHKTYVVNPKDNWQIGSEEIEYVQPGDFEKYLGARIDPWIGVGGPVLKEKLKDWSENLIKAPLKPAQKILILQTYILPKLFYNLLLIEPPFNLLDDLDVLVRKIVKEILHLPQCTTDGIFYSRGRDGGLALTKFSVQIPNMLIRKWRRHIVSRDDWMDLSYLYAGENLVDKILSFSAVTSHPKKWREEEFLRWSELRCQGIGIKYFKNDLISNSIFRNSSKVKSSAYIAALQLRANIYPTRETLARGRGGVNALCRWCGKVRETVPHISGQCYKTKNARIKRHNRVVSAVVDKVGKLGWKAMIEPHLRNSKGELRKPDIIFIKGDTAVVVDVTVRWEDNARSLEQAHSEKVAYYLELEEEIKNLTGGKNIHFFGFVLGARGKWSEGNNDLLQLLGMDRSKNFKESICRLVLYSTIGMMAIFSDR

SEQ ID NO: 9207 - protein, 1258 aa, Trachemys scripta
MEKSNLYFYTGLALDRVNNAPAVGFDAPADSVKYIRGVIRVAGPMDKMVWTIMKSHESENQVLPVEHGEEVEENVCDDHGEEILSILPMVFTRDTFNDLTMDSFNPDFKYLSTFDDPYVRESGYLNAHLVNGSSLLNSFRPSTDFNRDRNKDLNSTGSNINILESSSWKDGVFYLEYPVDSFNCPICPQILPTFGKWAKHINVVHKSKAIRVVCSKCGKSSQYHNIACHYPKCIPKKADTPMKSHTCSVCGLGFHTRSGLSQHCRHRHPAVRNEQRKEDMAAKSKIKAGSTRSRIWTKDEVAQLIQLERKYIGKRNINKCIESEMRTKTNKQISDKRRELAKKKLVVTGDREEVTEVEDIRVNILEIPPPRERIFPLKGHPEVDLVEKICKRGKQSREGREIINSLGEIEGLLKEDLTKALGWAMLEKLCYSLVEGKDPRNESQIELRNKGKGKMRKEGRRKQFNAIRRYATKKAKYKFYQQLFDKDRRRLTRIIMGEPDKAKCAIPMKEIEEYYVNILGTIGHGNMIGWPSSTENADNDILMSPISVDEIRIALREIRKDSAPGPDKVKVSNLWDIFNLDSLILTKIFNIWFLNRQVPDEFKKNRTILIPKTQDEEEMKKLTSWRPLTIGSVWIRIYTKILAKRLVETVKICSRQKGFISAPGCEENIAILDNLIKGAKRNGNEIAIVFVDLAKAFDSVGHGHIIAGLRRFGIDEHFIDIIRDLYDNCTTRVWVGDEATESILIRRGVKQGDPLSPILFNIAMDPLLTRLEVEGSGFYVKGNSVTSLAFADDVAILSSSYKGMIKNLGILEDFCKNTNLSVNVKKTKGFHILAKHKTYVVNPKDNWQIGSEEIEYVQPGDFEKYLGARIDPWIGVGGPVLKEKLKDWSENLIKAPLKPAQKILILQTYILPKLFYNLLLIEPPFNLLDDLDVLVRKIVKEILHLPQCTTDGIFYSRGRDGGLALTKFSVQIPNMLIRKWRRHIVSRDDWMDLSYLYAGENLVDKILSFSAVTSHPRKWREEEFLRWSELRCQGIGIKYFKNDLISNSIFRNSSKVKSSAYIAALQLRANIYPTRETLARGRGGVNALCRWCGKVRETVPHISGQCYKTKNARIKRHNRVVSAVVDKVGKLGWKAMIEPHLRNSKGELRKPDIIFIKGDTAVVVDVTVRWEDNAGSLEQAHSEKVAYYLELEEEIKNLTGGKNIHFFGFVLGARGKWSEGNNDLLQLLGMDRSKNFKESICRLVLYSTIGMMPIFSDR

SEQ ID NO: 9208 - protein, 1235 aa, Actinemys marmorata
MEKSNLYFYTGLALDRVNNDPAVGFDAPADSVKYIRGVIRVAGPMDKMVWTIMKSHEHESENQVLPVEHGEEVEENVCDDHGEEILSILPMVFTRDTFNDLTMESFNPDFKYLSTFDDPYVRESGYLNAHLVNGSSLLNSFRPSTDFNRDRNKDLNSTGSNINILESSSWKDGVFYLEYPVDSFNCPICPQILPTFGKWAKHINVVHKSKAIRVVCSKCGKSSQYHNIACHYPKCIPKKADTPMKSHTCSVCGLGFHTRSGLSQHCRHRHPAVRNEQRKEDMAAKSKIKEGSTRSRIWTKDEVAQLIQLERKYIGKRNINKCIESEMRTKTNKQISDKRRELAKKKLVVTGDREEVTEVEDIRVNILEIPPPRERIFPLKGHPEVDLVEKICKRGKQSREGREIINSLGEIEGLLKEDLTKALGWAMLEKLCYSLVEGKDPRNESQIELRNKGKGKMRKEGRRKQFNAIRRYATKKAKYKFYQQLFDKDRRRLTRIIMGEPDKAKCAIPMKEIEEYYVNILGTIGHGNMIGWPSSTENADNDILMSPISVDEIRIALREIRKDSAPGPDKVKVSNLWDIFNLDSLILTKIFNIWFLNRQVPDEFKKNRTILIPKTQDEEEMKKLTSWRPLTIGSVWIRIYTKILAKRLVETVKICNRQKGFISAPGCEENIAILDNLIKGAKRNGNEIAIVFVDLAKAFDSVGHGHIIAGLRRFGIDEHFIDIIRDLYDNCTTRVWVGDEATESILIRRGVKQGDPLSPILFNIAMDPLLTRLEVEGSGFYVKGNSVTSLAFADDVAILSSSYKGMIKNLGILEEFCKNTNLSVNVKKTKGFHILTKHKTYVVNPKDNWQIGSEEIEYVQPGDFEKYLGARIDPWIGVGGPVLKEKLKDWSENLIKAPLKPAQKILILQTYILPKLFYNLLLIEPPFNLLDDLDVLVRKIVKEILHLPQCTTDGIFYSRGRDGGLALTKFSVQIPNILIRKWRRHIVSRDDWMDLSYLYAGENLVDKILSFSAVTSHPKKWREEEFLRWSELRCQGIGIKYFKNDLISNSIFRNSSKVKSSAYIAALQLRANIYPTRETLARGRGGVNALCRWCGKVRETVPHISGQCYKTKNARIKRHNRVVSAVVDKVGKLGWKAMIEPHLRNSKGELRKPDIIFIKGDTAVVVDVTVRWEDNAGSLEQAHSEKVAYYLELEEEIKNLTGGKNIHFFGFVLGACGKWSEGNNDLLHFIGNGQK

SEQ ID NO: 9209 - protein, 1300 aa, Actinemys marmorata
MDAPLERVSFPLERVSFPQVRVSFPLERVSFPLRRVNLLAMEKSNLYFYTGLALDRVNNAPAVGFDAPADSVKYIRGVIRVAGPMDKMVWTIMKSHEHESENQVLPVEHGEEVEENVCDDHGEEILSILPMVFTRDTFNDLTMESFYPDFKYLSTFDDPYVRESGYLNAHLVNGCSLLNSFRPSTDFNRDRNKDLNSTGSNINILESSSWKDGVFYLEYPVDSFNCPICPQILPTFGKWAKHINVVHKSKAIRVVCSKCGKSSQYHNIACHYPKCIPKKADTPMKSHTCSVCGLGFHTRSGLSQHCRHRHPAVRNEQRKEDMAAKSKIKEGSTRSRIWTKDEVAQLIQLERKYIGKRNINKCIESEMRTKTNKQISDKRRELAKKKLVVTGDREEVTEVEDIRVNILEIPPPRERIFPLKGHPEVDLVEKICKRGKQSREGREIINSLGEIEGLLKEDLTKALGWAMLEKLCYSLVEGKDPRNESQIELRNKGKGKMRKEGRRKQFNAIRRYATKKAKYKFYQQLFDKDRRRLTRIIMGEPDKAKCAIPMKEIEEYYVNILGTIGHGNMIGWPSSTENADNDILMSPISVDEIRIALREIRKDSAPGPDKVKVSNLWDIFNLDSLILTKNFNIWFLNRQVPDEFKKNRTILIPKTQDEEEMKKLISWRPLTIGSVWIRIYTKILAKRLVETVKICSRQKGFISAPGCEENIAILDNLIKGAKRNGNEIAIVFVDLAKAFDSVGHGHIIAGLRRFGIDEHFIDIIRDLYDNCTTRVWVGDEATESILIRRGVKQGDPLSPILFNIAMDPLLTRLEVEGSGFYVKGNSVTSLAFADDVAILSSSYKGMIKNLGILEEFCKNTNLSVNVKKTKGFHILTKHKTYVVNPKDNWQIGSEEIEYVQPGDFEKYLGARIDPWIGVGGPVLKEKLKDWSENLIKAPLKPAQKILILQTYILPKLFYNLLLIEPPFNLLDDLDVLVRKIVKEILHLPQCTTDGIFYSRGRDGGLALTKFSVQIPNMLIRKWRRHIVSRDDWMDLSYLYAGENLVDKILSFSAVTSHPKKWREEEFLRWSELRCQGIGIKYFKNDLISNSIFRNSSKVKSSAYIAALQLRANIYPTRETLARGRGGVNALCRWCGKVRETVPHISGQCYKTKNARIKRHNRVVSAVVDKVGKLGWKAMIEPHLRNSKGELRKPDIIFIKGDTAVVVDVTVRWEDNAGSLEQAHSEKVAYYLELEEEIKNLTGGKNIHFFGFVLGARGKWSEGNNDLLQLLGMDRSKNFKESICRLVLYSTIGMMAIFSDR

SEQ ID NO: 9210 - protein, 1241 aa, Chrysemys picta
MEKSNLYFYTGLALDRVNNAPAVGFDAPADSVKYIRGVIRVAGPMDKMVWTIMKSHENESENQVLPVEHGEEVEENVCDDHGEEILSILPMVFTRDTFNDLTMDSFNPDFKYLSTFDDPYVRESSTDFNRDRNKDLNSIGSNINILESSSWKDGVFYLEYPVDSFNCPICPQILPTFGKWAKHINVVHKSKAIRVVCSKCGKSSQYPNIACHYPKCIPKKADTPMKSHTCSVCGLGFHTRSGLSQHCRHRHPAVRNEQRKEDMAAKSKIKEGSTRSRIWTKDEVAQLIQLERKYIGKRNINKCIESEMRTKTNKQISDKRRELAKKKLVVTGDREEVTEVEDIRVNILEIPPPRERIFPLKGHPEVDLVEKICKRGKQSREGREIIKSLGEIEGLLKEDLTKALGWAMLEKLCYSLVEGQDPRNESQIELRNKGKGKIRKEGRRKQFNAIRRYATKKAKYKFYQQLFDKDRRRLTRIIMGEPDKAKCAIPMKEIEEYYVNILGTIGHGNMIGWPSSTENADNDILMSPISVDEIRIALTEIRKDSAPGPDKVKVSNLWDIFNLDSLILTKIFNIWFLNRQVPDEFKKNRTILIPKTQDEEEMKKLTSWRPLTIGSVWIRIYTKILAKRLVETVKICSRQKGFISAPGCEENIAILDNLIKGAKRNGNEIAIVFVDLAKAFDSVGHGHIIAGLRRFGIDEHFIDIIRDLYDNCTTRVWVGDEATESILIRRGVKQGDPLSPILFNIAMDPLLTRLEVEGSGFYVKGNSVTSLAFADDVAILSSSYKGMIKNLGILEEFCKNTNLSVNVKKTKGFHILTKHKTYVVNPKDNWQIGSEKIEYVQPGDFEKYLGARIDPWIGVGGPVLKEKLKDWSENLIKAPLKPAQKILILQTYILPKLFYNLLLIEPPFNLLDDLDVLVRKIVKEILHLPQCTTDGIFYSRGRDGGLALTKFSVQIPNNLIRKWRRHIVSRDDWMDLSYLYAGENLVDKILSFSAVTSHPKKWREEEFLRWSELRCQGIGIKYFKNDLISNSIFRNSSKVKSSAYIAALQLRANIYPTRETLARGRGGVNALCRWCGKVRETVPHISGQCYKTKNARIKRHNRVVSAVVDKVGKLGWKAMIEPHLRNSKGELRKPDIIFIKGDTAVVVDVTVRWEDNAGSLEQAHSEKVAYYLELEEEIKNLTGGKNIHFFGFVLGARGKWSEGNNDLLQLLGMDRSKNFKESICRLVLYSTIGMMAIFSDR

SEQ ID NO: 9211 - protein, 1241 aa, Chrysemys picta
MEKSNLYFYTGLALDRVNNAPAVGFDAPADSVKYIRGVIRVAGPMDKMVWTIMKSHENESENQVLPVEHGEEVEENVCDDHGEEILSILPMVFTRDTFNDLTMDSFNPDFKYLSTFDDPYVRESSTDFNRDRNKDLNSIGSNINILESSSWKDGVFYLEYPVDSFNCPICPQILPTFGKWAKHINVVHKSKAIRVVCSKCGKSSQYHNIACHYPKCIPKKADTPMKSHTCSVCGLGFHTRSGLSQHCRHRHPAVRNEQRKEDMAAKSKIKEGSTRSRIWTKDEVAQLIQLERKYIGKRNINKCIESEMRTKTNKQISDKRRELAKKKLVVTGDREEVTEVEDIRVNILEILPPRERIFPLKGHPEVDLVEKICKRGKQSREGGEIINSLGEIEGLLKEDLTKALGWAMLEKLCYSLVEGQDPRNESQIELRNKGKGKIRKEGRRKQFNAIRRYATKKAKYKFYQQLFDKDRRRLTRIIMGEPDKAKCAIPMKEIEEYYVNILGTIGHGNMIGWPSSTENADNDILMSPISVDEIRIALTEIRKDSALGPDKVKVSNLWDIFNLDSLILTKIFNIWFLNRQVPDEFKKNRTILIPKTQDEEEMKKLTSWRPLTIGSVWIRIYTKILAKRLVETVKICSRQKGFISAPGCEENIAILDNLIKGAKRNGNEIAIVFVDLAKAFDSVGHGHIIAGLRRFGIDKHFIDIIRDLYDNCTTRVWVGDEATESILIRRGVKQGDPLSPILFNIAMDPLLTRLEVEGSGFYVKGNSVTSLAFADDVAILSSSYKGMIKNLGILEEFCKNTNLSVNVKKTKGFHILTKHKTYVVNPKDNWQIGSEKIEYVQPGDFEKYLGARIDPWIGVGGPVLKEKLKDWSENLIKAPLKPAQKILILQTYILPKLFYNLLLIEPPFNLLDDLDVLVRKIVKEILHLPQCTTDGIFYSRGRDGGLALTKFSVQIPNMLIRKWRRHIVSRDDWMDLSYLYAGENLVDKILSFSAVTSHPKKWREEEFLRWSELRCQGIGIKYFKNDLISNSIFRNSSKVKSSAYIAALQLRANIYPTRETLARGRGGVNALCRWCGKVRETVPHISGQCYKTKNARIKRHNRVVSAVVDKVGKLGWKAMIEPHLRNSKGELRKPDIIFIKGDTAVVVDVTVRWEDNAGSLEQAHSEKVAYYLELEEEIKNLTGGKNIHFFGFVLGARGKWSEGNNDLLQLLGMDRSKNFKESICRLVLYSTIGMMAIFSDR

SEQ ID NO: 9212 - protein, 1017 aa, Chrysemys picta
MKSHTCSVCGLGFHTRSGLSQHCRHRHPAVRNEQRKEDMAAKSKIKEGSTRSRIWTKDEVAQLIQLERKYIGKRNINKCIESEMRTKTNKQISDKRRELAKKKLVVTGDREEVTEVEDIRVNILEIPPPRERIFPLKGHPEVDLVEKICKRGKQSSEGREIINSLGEIEGLLKEDLTKALGWAMLEKLCYSLVEGQDPRNESQIELRNKGKGKIRKEGRRKQFNAIRRYATKKAKYKFYQQLFDKDRRRLTRIIMGEPDKAKCAIPMKEIEEYYVNILGTIGHGNMIGWPSSTENADNDILMSPISVDEIRIALTEIRKYSAPGPDKVKVSNLWDIFNLDSLILTKIFNIWFLNRQVPDEFKKNRTILIPKTQDEEEMKKLTSWRPLTIGSVWIRIYTKILAKRLVETVKICSRQKGFMSAPGCEENIAILDNLIKGAKRNGNEIAIVFVDLAKAFDSVGHGHIIAGLRRFDIDEHFIDIIRDLYDNCTTRVWVGDEATESILIRRGVKQGDPLSPILFNIAMDPLLTRLEVEGSGFYVKGNSVTSLAFADDVAILSSSYKGMIKNLGILEEFCKNTNLSVNVKKTKGFHILTKHKTYVVNPKDNWQIGSEKIEYVQPGDFEKYLGARIDPWIGVGGPVLKEKLKDWSENLIKAPLKPAPKILILQTYILPKLFYNLLLIEPPFNLLDDLDVLVRKIVKEILHLPQCTTDGIFYSRGRDGGLALTKFSVQIPNMLIRKWRRHIVSRDDWMDLSYLYAGENLVDKILSFSAVTSHPKKWREEEFLRWSELRCQGIGIKYFKNDLISNSIFRNSSKVKSSAYIAALQLRANIYPTRETLARGRGGVNALCRWCGKVRETVPHISGQCYKTKNARIKRHNRVVSAVVDKVGKLGWKAMIEPHLRNSKGELRKPDIIFIKGDTAVVVDVTVRWEDNAGSLEQAHSEKVAYYLELEEEIKNLTGGKNIHFFGFVLGARGKWSEGNNDLLQLLGMDRSKNFKESICRLVLYSTIGMMAIFSDR

SEQ ID NO: 9213 - protein, 1241 aa, Chrysemys picta
MEKSNLYFYTGLALDRVNNAPAVGFDAPADSVKYIRGVIRVAGPMDKMVWTIMKSHENESENQVLPVEHGEEVEENVCDDHGEEILSILPMVFTRDTFNDLTMDSFNPDFKYLSTFDDPYVRESSTDFNRDRNKDLNSIGSNINILESSSWKDGVFYLEYPIDSFNCPICPQILPTFGKWAKHINVVHKSKAIRVVCSKCGKSSQYHNIACHYPKCIPKKADTPMKSHTCSVCGLGFHTRSGLSQHCRHRHPAVRNEQRKEDMAAKSKIKEGSTRSHIWTKDEVAQLIQLERKYIGKRNINKCIESEMRTKTNKQISDKRRELAKKKLVVTGDREEVTEVEDIRVNILEIPPPRERIFPLKGHPEVDLVEKMCKRGKQSREGREIINSLGEIEGLLKEDLTKALGWAMLEKLCYSLVEGQDPRNESQIELRNKGKGKIRKEGRRKQFNAIRRYATKKAKYKFYQQLFDKDRRRLTRIIMGEPDKAKCAIPMKEIEEYYVNILGTIGHGNMIGWPSSTENADNDILMSPISVDEIRIALTEIRKDSAPGPDKVKVSNLWDIFNLDSLILTKIFNIWFLNRQVPDEFKKNRTILIPKTQDEEEMKKLTSWRPLTIGSVWIRIYTKILAKRLVETVKICSRQKGFISAPGCEENIAILDNLIKGAKRNGNEIAIVFVDLAKAFDSVGHGHIIAGLRRFGIDEHFIDIIRDLYDNCTTRVWVGDEATESILIRRGVKQGDPLSPILFNIAMDPLLTRLEVEGSGFYVKGNSVTSLAFADDVAILSSSYKGMIKNLGILEEFCKNTNLSVNVKKTKGFHILTKHKTYVVNPKDNWQIGSEKIEYVQPGDFEKYLGARIDPWIGVGGPVLKEKLKDWSENLIKAPLKPAQKILILQTYILPKLFYNLLLIEPPFNLLDDLDVLVRKIVKEILHLPQCTTDGIFYSRGRDGGLALTKFSVQIPNMLIRKWRRHIVSRDDWMDLSYLYAGENLVDKILSFSAVTSHPKKWREEEFLRWSELRCQGIGIKYFKNDLISNSIFRNSSKVKSSAYIAALQLRANIYPTRETLARGRGGVNALCRWCGKVRETVPHISGQCYKTKNARIKRHNRVVSAVVDKVGKLGWKAMIEPHLRNSKGELRKPDIIFIKGDTAVVVDVTVRWEDNAGSLEQAHSEKVAYYLELEEEIKNLTGGKNIHFFGFVLGARGKWSEGNNDLLQLLGMDRSKNFKESICRLVLYSTIGMMAIFSDR

SEQ ID NO: 9214 - protein, 1260 aa, Terrapene carolina
MEKSNLYFYTGLALDRVNNAPAVGFDAPADSVKYIRGVIRVAGPMDKMVWTIMKSHEHESENQVLPVEHGEEVEENVCDDHGEEILSILPMVFTRDTFNDLTMESFNPDFKYLSTFDDPYVSESGYLNAHLVNGSSLLNSFRPSTDFNRDRNKDLNSTGSNINILESSSWKDGVFYLEYPVDSFNCPICPQILPTFGKWAKHINVVHKSKAIRVVCSKCGKSSQYHNIACHYPKCIPKKADTPMKSHTCSVCGLGFHTRSGLSQHCRHRHPAVRNEQRKEDMAAKSKIKEGSTRSRIWTKDEVAQLIQLERKYIGKRNINKCIESEMRTKTNKQISDKRRELAKKKLVVTGDREEVTEVEDIRVNILEIPPPRERIFPLKGHPEVDLVEKICKRGKQSREGREIINSLGEIEGLLKEDLTKALGWAMLEKLCYSLVEGKDPRNESQIELRNKGKGKMRKEGRRKQFNAIRRYATKKAKYKFYQQLFDKDRRRLTRIIMGEPDNAKCAIPMKEIEEYYVNILGTIGHGNMIGWPSSTENADNDILMSPISVDEIRIALREIRKDSAPGPDKVKVSNLWDIFNLDSLILTKIFNIWFLNRQVPDEFKKNRTILIPKTQDEEEMKKLTSWRPLTIGSVWIRIYTKILAKRLVETVKICSRQKGFISAPGCEENIAILDNLIKGAKRNGNEIAIVFVDLAKAFDSVGHGHIIAGLRRFGIDEHFIDIIRDLYDNCTTRVWVGDEATESILIRRGVKQGDPLSPILFNIAMDPLLTRLEVEGSGFYVKGNGVTSLAFADDVAILSSSYKGMIKNLGILEEFCKNTNLSVNVKKMKGFHILTKHKTYVVNPKDNWQIGSEEIEYVQPGDFEKYLGARIDPWIGVGGPVLKKKLKDWSENLIKAPLKPAQKILILQTYILPKLFYNLLLIEPPFNLLDDLDVLVRKIVKEILHLPQCTTDGIFYSRGRDGGLALTKFSVQIPNMLIRKWRRHIVSRDDWMDLSYLYAGENLVDKILLFSAVTSHPKKWREEEFLRWSELRCQGIGIKYFKNDLISNSIFRNSSKVKSSAYIAALQLRANIYPTSETLARGRGGVNALCRWCGKVRETVPHISGQCYKTKNARIKRHNRVVSAVVDKVGKLGWKAMIEPHLRNSKGELRKPDIIFIKGDTAVVVDVTVRWEDNAGSLEQAHTEKVAYYLELEEEIKNLTGGKNIHFFGFVLGARGKWSEGNNDLLQLLGMDRSKNFKESICRLVLYSTIGMMAIFSDR

SEQ ID NO: 9215 - protein, 1260 aa, Terrapene carolina
MEKSNLYFYTGLALDRVNNAPAVGFDAPADSVKYIRGVIRVAGPMDKMVWTIMKSHEHESENQVLPVEHGEEVEENVCDDHGEEILSILPMVFTRDTFNDLTMESFNPDFKYLSTFDDPYVSESGYLNAHLVNGSSLLNSFRPSTDFNRDRNKDLNSTGSNINILESSSWKDGVFYLEYPVDSFNCPICPQILPTFGKWAKHINVVHKSKAIRVVCSKCGKSSQYHNIACHYPKCIPKKVDTPMKSHTCSVCGLGFHTRSGLSQHCRHRHPAVRNEQRKEDMAAKSKIKEGSTRSRIWTKDEVAQLIQLERKYIGKRNINKCIESEMRTKTNKQISDKRRELAKKKLVVTGDREEVTEVEDIRVNILEIPPPRERIFPLKGHPEVDLVEKICKRGKQSREGREIINSLGEIEGLLKEDLTKALGWAMLEKLCYSLVEGKDPRNESQIELRNKGKGKMRKEGRRKQFNAIRRYATKKAKYKFYQQLFDKDRRRLTRIIMGEPDKAKCAIPMKEIEEYYVNILGTIGHGNMIGWPSSTENADNDILMSPISVDEIRIALREIRKDSAPGPDKVKVSNLWDIFNLDSLILTKIFNIWFLNRQVPDEFKKNRTILIPKTQDEEEMKKLTSWRPLTIGSVWIRIYTKILAKRLVETVKICSRQKGFISAPGCEENIAILDNLIKGAKRNGNEIAIVFVDLAKAFDSVGHGHIIAGLRRFGIDEHFIDIIRDLYDNCTTRVWVGDEATESILIRRGVKQGDPLSPILFNIAMDPLLTRLEVEGSGFYVKGNGVTSLAFADDVAILSSSYKGMIKNLGILEEFCKNTNLSVNVKKTKGFHILTKHKTYVVNPKDNWQIGSEEIEYVQPGDFEKYLGARIDPWIGVGGPVLKEKLKDWSENLIKAPLKPAQKILILQTYILPKLFYNLLLIEPPFNLLDDLDVLVRKIVKEILHLPQCTTDGIFYSRGRDGGLALTKFSVQIPNMLIRKWRRHIVSRDDWMDLSYLYAGENLVDKILSFSAVTSHPKKWREEEFLRWSELRCQGIGIKYFKNDLISNSIFRNSSKVKSSAYIAALQLRANIYPTRETLARGRGGVNALCRWCGKVRETVPHISGKCYKTKNARIKRHNRVVSAVVDKVGKLGWKAMIEPHLRNSKGELRKPDIIFIKGDTAVVVDVTVRWEDNAGSLEQAHSEKVAYYLELEEEIKNLTGGKNIHFFGFVLGARGKWSEGNNDLLQLLGMDRSKNFKESICRLVLYSTIGMMAIFSDR

SEQ ID NO: 9216 - protein, 1260 aa, Terrapene carolina
MEKSNLYFYTGLALDRVNNAPAVGFDAPADSVKYIRGVIRVAGPMDKMVWTIMKSHEHESENQVLPVEHGEEVEENVCDDHGEEILSILPMVFTRDTFNDLTMESFNPDFKYLSTFDDPYVSESGYLNAHLVNGSSLLNSFRPSTDFNRDRNKDLNSTGSNINILESSSWKDGVFYLEYPVDSFNCPICPQILPTFGKWAKHINVVHKSKAIRVVCSKCGKSSQYHNIACHYPKCIPKKADTPMKSHTCSVCGLGFHTRSGLSQHCRHRHPAVRNEQRKEDMAAKSKIKEGSTRSRIWTKDEVAQLIQLERKYIGKRNINKCIESEMRTKTNKQISDKRRELAKKKLVVTGDREEVTEVEDIRVNILEIPPPRERIFPLKGHPEVDLVEKICKRGKQSREGREIINSLGEIEGLLKEDLTKALGWAMLEKLCYSLVEGKDPRNESQIELRNKGKGKMRKEGRRKQFNAIRRYATKKAKYKFYQQLFDKDRRRLTRIIMGEPDKAKCAIPMKEIEEYYVNILGTIGQDNMIGWPSSTENADNDILMSPISVDEIRIALREIRKDSAPGPDKVKVSNLWDIFNLDSLILTKIFNIWFLNRQVPDEFKKNRTILIPKTQDEEEMKKLTSWRPLTIGSVWIRIYTKILAKRLVETVKICSRQKGFISAPGCEENIAILDNLIKGAKRNGNEIAIVFVDLAKAFDSVGHGHIIAGLRRFGIDEHFIDIIRDLYDNCTTRVWVGDEATESILIRRGVKQGDPLSPILFNIAMDPLLTRLEVEGSGFYVKGNGVTSLAFADDVAILSSSYKGMIKNLGILEEFCKNTNLSVNVKKTKGFHILTKHKTYVVNPKDNWQIGSEEIEYVQPGDFEKYLGARIDPWIGVGGPVLKEKLKDWSENLIKAPLKPAQKILILQTYILPKLFYNLLLIEPPFNLLDDLDVLVRKIVKEILHLPQCITDGIFYSRGRDGGLALTKFSVQIPNMLIRKWRRHIVSRDDWMDLSYLYAGENLVDKILSFSAVTSHPKKWREEEFLRWSELRCQGIGIKYFKNDLISNSIFRNSSKVKSSAYIAALQLRANIYPTRETLARGRGGVNALCRWCGKVRETVPHISGQCYKTKNARIKRHNRVVSAVVDKVGKLGWKAMIEPHLRNSKGELRKPDIIFIKGDTAVVVDVTVRWEDNAGSLEQAHSEKVAYYLELEEEIKNLTGGKNIHFFGFVLGARGKWSEGNNDLLQLLGMDRSKNFKESICRLVLYSTIGMMAIFSDR

SEQ ID NO: 9217 - protein, 1235 aa, Terrapene carolina
MPPADSVKYIRGVIRVAGPMDKMVWTIMKSHEHESENQVLPVEHGEEVEENVCDDHGEEILSILPMVFTRDTFNDLTMESFNPDFKYLSTFDDPYVSESGYLNAHLVNGSSLLNSFRPSTDFNRDRNKDLNSTGSNINILESSRWKDGFFYLEYPVDSFNCPICPQILPTFGKWAKHINVVHKSKAIRVVCSKCGKSSQYHNIACHYPKCIPKKADTPMKSHTCSVCGLGFHTRSGLSQHCRHRHPAVRNEQRKEDMAAKSKIKEGSTRSRIWTKDEVAQLIQLERKYTGKRNINKCIESEMRTKTNKQISDKRRELAKKKLVVTGDREEVTEVEDIRVNILEIPPPRERIFPLKGHPEVDLVEKICKRGKQSREGREIINSLGEIEGLLKEDLTKALGWAMLEKLCYSLVEGKDPRNESQIELRNKGKGKMRKEGRRKQFNAIRRYATKKAKYKFYQQLFDKDRRRLTRIIMGEPDKAKCAIPMKEIEEYYVNILGTIGHGNMIGWPSSTENADNDILMSPISVDEIRIALREIRKDSAPGSDKVKVSNLWDIFNLDSLILTKIFNIWFLNRQVPDEFKKNRTILIPKTQDEEEMKKLTSWRPLTIGSVWIRIYTKILAKRLVETVKICSRQKGFISAPGCEENIAILDNLIKGAKRNGNEIAIVFVDLAKAFDSVGHGHIIAGLRRFGIDEHFIDIIRDLYDNCTTRVWVGDEATESILIRRGVKQGDPLSPILFNIAMDPLLTRLEVEGSGFYVKGNGVTSLAFADDVAILSSSYKGMIKNLGILEEFCKNTNLSVNVKKTKGFHILTKHKTYVVNPKDNWQIGSEEIEYVQPGDFEKYLGARIDPWIGVGGPVLKEKLKDWSENLIKAPLKPAQKILILQTYILPKLFYNLLLIEPPFNLLDDLDVLVRKIVKEILHLPQCTTDGIFYSKGRDGGLALTKFSVQIPNMLIHKWRRHIVSRDDWMDLSYLYAGENLVDKILSFSAVTSHPKKGREEEFLRWSALRCQGIGIKYFKNDLISNSIFRNSSKVKSSAYIAALQLRANIYPTRETLARGRGGVNALCRWCGKVRETVPHISGQCYKTKNARIKRHNRVVSAVVDKVGKLGWKAMIEPHLRNSKGELRKPDIIFIKGDTAVVVDVTVRWEDNAGSLEQAHSEKVAYYLELEEEIKNLTGGKNIHFFGFVLGARGKWSEGNNDLLQLLGMDRSKNFKESICRLVLYSTIGMMAIFSDR

SEQ ID NO: 9218 - protein, 1306 aa, Trachemys scripta
MDAPLVRVASPRYGLIPPGKGSLPQARVSFPQVRVSFPLRRVNLLAMEKSNLYFYTGLALDRVNNAPAVGFDAPADSVKYIRGVIRVAGPMDKMVWTIMKSHENESENQVLPVEHGEEVEENVCDDHGEEILSILPMVFTRDTFNDLTMDSFNPDFKYLSTFDDPYVRESGYLNAHLVNGSSLLNSFRPSTDFNRDRNKDLNSTSSNTNILESSSWKDGVFYLEYPVDSFNCPICPQILPTFGKWAKHINVVHKSKAIRVVCSKCGKSSQYHNIACHYPKCIPKKADTPMKSHMCSVCGLGFHTRSGLSQHCRHRHPAVRNEQRKEDMAAKSKIKEGSTRSRIWTKDEVAQLIQLERKYIGKRNINKCIESERRTKTNKQISDKRRELAKKKLVVTGDREEVTEVEDIKVNILEIPPPRERIFPLKGHPEVDLVEKICKRGKQSREGREIINSLGEIEGLLKEDLTKALGWAMLEKLCYSLIEGKDPRNESQIELRNKGNGKMRKEGRRKQFNAIRRYATKKAKYKFYQQLFDKDRRRLTRIIMGEPDKAKCAIPMKEIEEYYVNILGTIGHGNMIGWPSTTENADNDILMSPISVDEIRIALREIRKDSAPGPDKVKVSNLWDIFNLDSLILTKIFNIWFLNRQVPDEFKKNRTILIPKTQDEEEMKKLTSWRPLTIGSVWIRIYTKILAKRLVETVKICSRQKGFISAPGCEENIAILGNLIKGAKRNGNEIAIVFVDLAKAFDSVGHGHIIAGLRRFGIDEHFIDIIRDLYDNCTTRVWVGDEATESILIRRGVKQGDPLSPILFNIAMDPLLTRLEVEGSGFYVKGNSVTSLAFADDVAILSSSYKGMIKNLGILEEFCKNTNLSVNVKKTKGFHILTKYKTYVVNPKDNWQIGSEEIEYVQPGDFEKYLGTRIDPWIGVGGPVLKEKLKDWSENLIKAPLKPAQKILILQTYILPKLFYNLLLIEPPFNLLDDLDVLVRKIVQEILHLPQCTTDGIFYSRGRDGGLALTKFSVQIPNMLIRKWRRHIVSRDDWMDLSYLYAGENLVDKILSFSAVTSHPKKWREEEFLRWSELRCQGVGIKYFKNDLISNSIFRNSSKVKSSAYIAALQLRANIYPTRETLARGRGGVNALCRWCGKVRETVPHISGQCYKTKNARIKRHNRVVSAVVDKVGKLGWKAIIETHLRNSKGELRKPDIIFIKGDTAMVVDVTVRWEDNAGSLEQAHSEKVAYYLELEEEIKNLTGGKNIHFFGFVLGARGKWSEGNNDLLQLLGMDRSKNFKESICRLVLYSTIGMMAIFSDR

SEQ ID NO: 9219 - protein, 1158 aa, Malaclemys terrapin
MDSFNPDFKYLSTFDDPYVRESGYLNAHLVNGSSLLNSFRPSTDFNRDRNKDLNSTGSNINILESSSWKDGVFYLEYPVDSFNCPICPQILPTFGKWAKHINVVHKSKAIRVVCSKCGKSSQYHNIACHYPKCIPKKADTPMKSHTCSVCGLGFHTRSGLSQHCRHRHPAVRNEQRKEDMAAKSKIKEGSTRSRIWTKDEVAQLIQLERKYIGKRNINKCIESEMRTKTNKQISDKRRELAKKKLVVTGDREEVTEVEDIRVNILEIPPPRERIFPLKGHPEVDLVEKICKRGKQSREGREIINSLGEIEGLLKEDLTKALGWAMLEKLCYSLVEGKDPRNESQIELRNKGKGKMRKEGRRKQFNAIRRYATKKAKYKFYQQLFDKDRRRLTRIIMGEPDKAKCAIPMKEIEEYYVNILGTIGHGNMIGWPSSTENADNDILMSPISVDEIRIALREIRKDSAPGPDKVKVSNLWDIFNLDSLILTKIFNIWFLNRQVPDEFKKNRTILIPKTQDEEEMKKLTSWRPLTIGSVWIRIYTKILAKRLVETVKICSRQKGFISAPGCEENIAILDNLIKGAKRNGNEIAIVFVDLAKAFDSVGHGHIIAGLRRFGIDEHFIDIIRDLYDNCTTRVWVGDEATESILIRRGVKQGDPLSPILFNIAMDPLLTRLEVEGSGFYVKGNSVTSLAFADDVAILSSSYKGMIKNLGILEEFCKNTNLSVNVKKTKGFHILTKHKTYVVNPKDNWQIGSEEIEYVQPGDFEKYLGARIDPWIGVGGPVLKEKLKDWSENLIKAPLKPAQKILILQTYILPKLFYNLLLIEPPFNLLDDLDVLVRKIVKEILHLPQCTTDGIFYSRGRDGGLALTKFSVQIPNMLIRKWRRHIVSRDDWMDLSYLYAGENLVDKILSFSAVTSHPKKWREEEFLRWSELRCQGIGIKYFKNDLISNSIFRNSSKVKSSAYIAALQLRANIYPTRETLARGRGGVNALCRWCGKVRETVPHISGQCYKTKNARIKRHNRVVSAVVDKVGKLGWKAMIEPHLRNSKGELRKPDIIFIKGDTAVVVDVTVRWEDNAGSLEQAHSEKVAYYLELEEEIKNLTGGKNIHFFGFVLGARGKWSEGNNDLLQLLGMDRSKNFKESICRLVLYSTIGMMAIFSDR

SEQ ID NO: 9220 - protein, 1260 aa, Actinemys marmorata
MEKSNLYFYTGLALDRVNNAPAVGFDAPADSVKYIRGVIRVAGPMDKMVWTIMKSHEHESENQVLPVEHGEEVEENVCDDHGEEILSILPMVFTRDTFNDLTMESFNPDFKYLSTFDDPYVRESGYLNAHLVNGSSLLNSFRPSTDFNRDRNKDLNSTGSNINILESSSWKDGVFYLEYPVDSFNCPICPQILPTFGKWAKHINVVHKSKAIRVVCSKCGKSSQYHNIACHYPKCIPKKADTPMKSHTCSVCGLGFHTRSGLSQHCRHRHPAVRNEQRKEDMAAKSKIKEGTTRSRIWTKDEVAQLIQLERKYIGKRNINKCIESEMRTKTNKQISDKRRELAKKKLVVTGDREEVTEVEDIRVNILEIPPPRERIFPLKGHPEVDLVEKICKRGKQSREGREIINSLGEIEGLLKEDLTKALGWAMLEKLCYSLVEGKDPRNESQIELRNKGKGKMRKEGRRKQFNAIRRYATKKAKYKFYQQLFDKDRRRLTRIIMGEPDKAKCAIPMKEIEEYYVNILGTIGHGNMIGWPSSTENADNDILMSPISVDEIRIALREIRKDSAPGPDKVKVSNLWDIFNLDSLILTKIFNIWFLNRQVPDEFKKNRTILIPKTQDEEEMKKLTSWRPLTIGSVWIRIYTKILAKRLVETVKICSRQKGFISAPGCEENIAILDNLIKGAKRNGNEIAIVFVDLAKAFDSVGHGHIIAGLRRFGIDEHFIDIIRDLYDNCTTRVWVGDEATESILIRRGVKQGDPLSPILFNIAMDPLLTRLEVEGSGFYVKGNSVTSLAFADDVAILSSSYKGMIKNLGILEEFCKNTNLCVNVKKTKGFHILTKHKTYVVNPKDNWQIGSEEIEYVQPGDFEKYLGARIDPWIGVGGPVLKEKLKDWSENLIKAPLKPAQKILILQTYILPKLFYNLLLIEPPFNLLDDLDVLVRKIVKEILHLPQCTTDGIFYSRGRDGGLALTKFSVQIPNMLIRKWRRHIVSRDDWMDLSYLYAGENLVDKILSFSAVTSHPKKWREEEFLRWSELRCQGIGIKYFKNDLISNSIFRNSSKVKSSAYIAALQLRANIYPTRETLARGRGGVNALCRWCGKVRETVPHISGQCYKTKNARIKRHNRVVSAVVDKVGKLGWKAMIEPHLRNSKGELRKPDIIFIKGDTAVVVDVTVRWEDNAGSLEQAHSEKVAYYLELEEEIKNLTGGKNIHFFGFVLGARGKWSEGNNDLLQLLGMDRSKNFKESICRLVLYSTIGMMAIFSDR

SEQ ID NO: 9221 - protein, 1260 aa, Actinemys marmorata
MEKSNLYFYTGLALDRVNNAPAVGFDAPADSVKYIRGVIRVAGPMDKMVWTIMKSHEHESENQVLPVEHGEEVEENVCDDHGEEILSILPMVFTRDTFNDLTMESFNPDFKYLSTFDDPYVRESGYLNAHLVNGSSLLNSFRPSTDFNRDRNKDLNSTGSNINILESSSWKDGVFYLEYPVDSFNCPICPQISPTFGKWAKHINVVHKSKAIRVVCSKCGKSSQYHNIACHYPKCIPKKADTPMKSHTCSVCGLGFHTRSGLSQHCRHRHPAVRNEQRKEDMAAKSKIKEGSTRSRIWTKDEVAQLIQLERKYIGKRNINKCIESEMRTKTNKQISDKRRELAKKKLVVTGDREEVTEVEDIRVNILEILPPRERIFPLKGHPEVDLVEKICKWGKQSREGREIINSLGEIEGLLKEDLTKALGWAMLEKLCYSLVEGKDPRNESQIELRNKGKGKMRKEGRRKQFNAIRRYATKKAKYKFYQQLFDKDRRRLTRIIMGEPDKAKCAIPMKEIEEYYVNILGTIGHGNMIGWPSSTENADNDILMSPISVDEIRIALREIRKDSAPGPDKVKVSNLWDIFNLDSLILTKNFNIWFLNRQVPDEFKKNRTILIPKTQDEEEMKKLTSWRPLTIGSVWIRIYTKILAKRLVETVKICSRQNGFISAPGCEENIAILDNLIKGAKRNGNEIAIVFVDLAKAFDSVGHGHIIAGLRRFGIDEHFIDIIRDLYDNCTTRVWVGDEATESILIRRGVKQGDPLSPILFNIAMDPLLTRLEVEGSGFYVKGNSVTSLAFADDVAILSSSYKGMIKNLGILEEFCKNTNLSVNVKKTKGFHILTKHKTYVVNPKDNWQIGSEEIEYVQPGDFEKYLGVGIDPWIGVGGPVLKEKLKDWSENLIKAPLKPAQKILILQTYILPKLFYNLLLIEPPFNLLDDLDVLVRKIVKEILHLPQCTTDGIFYSRGRDGGLALTKFSVQIPNMLIRKWRRHIVSRDDWMDLSYLYAGENLVDKILSFSAVTTHPKKWREEEFLRWSELRCQGIGIKYFKNDLISNSIFRNSSKVKSSAYIAALQLRANIYPTRETLARGRGGVNALCRWCGKVRETVPHISGQCYKTKNARIKRHNRVVSAVVDKVGKLGWKAMIEPHLRNSKGELRKPDIIFIKGDTAVVVDVTVRWEDNAGSLEQAHSEKVAYYLELEEEIKNLTGGKNIHFFGFVLGARGKWSEGNNDLLQLLGMDRSKNFKESICRLVLYSTIGMMAIFSDR

SEQ ID NO: 9222 - protein, 1241 aa, Chrysemys picta
MEKSNLYFYTGLALDRVNNAPAVGFDAPADSVKYIRGVIRVAGPMDKMVWTIMKSHENESENQVLPVEHGEEVEENVCDDHGEEILSILPMVFTRDTFNDLTMDSFNPDFKYLSTFDDPYVRESSTDFNRDRNKDLNSIGSNINILESSSWKDGVFYLEYPVDSFNCPICPQILPTFGKWAKHINVVHKSKAIRVVCSKCGKSSQYHNIACHYPKCIPKKADTPMKSHTCSVCGLGFHTRSGLSQHCRHRHPAVRNEQRKEDMAAKSKIKEGSTRSRIWTKDEVAQLIQLERKYIGKRNINKCIESEMRTKTNKQISDKRRELAKKKLVVTGDREEVTEVEDIRVNILEIPPPRERIFPLKGHPEVDLVEKICKRGKQSREGREIINSLGEIEGLLKEDLTKALGWAMLEKLCYSLVEGQDPRNESQIELKNKGKGKIRKEGRRKQFNAIRRYATKKAKYKFYQQLFDKDRRRLTRIIMGEPDKAKCAIPMKEIEEYYVNILGTIGHGNMIGWPSSTENADNDILMSPISVDEIRIALTEIRKDSAPGPDKVKVSNLWDIFNLDSLILTKIFNIWFLNRQVPDEFKKNRTILIPKTQDEEEMKKLTSWRPLTIGSVWIRIYTKILAKRLVETVKICSRQKGFISAPGCEENIAILANLIKGAKRNGNEIAIVFVDLAKAFDSVGHGHIIAGLRRFGIDEHFIDIIRDLYDNCTTRVWVGDEATESILIRRGVKQGDPLSPILFNIAMDPLLTRLEVEGSGFYVKGNSVTSLAFADDVAILSSSYKGMIKNLGILEEFCKNTNLSVNVKKTKGFHILTKHKTYVVNPKDNWQIGSEKIEYVQPGDFEKYLGARIDPWIGVGGPVLKEKLKDWSENLIKAPLKPAQKILILQTYILPKLFYNLLLIEPPFNLLDDLDVLVRKIVKEILHLPQCTTDGIFYSRGRDGGLALTKFSVQIPNMLIRKWRRHIVSRDDWMDLSYLYAGENLVDKILSFSAVTSHPKKWREEEFLRWSELRCQGIGIKYFKNDLISNSIFRNSSKVKSSAYIAALQLRANIYPTRETLARGRGGVNALCRWCGKVRETVPHISGQCYKTKNARIKRHNRVVSAVVDKVGKLGWKAMIEPHLRNSKGELRKPDIIFIKGDTAVVVDVTVRWEDNAGSLEQAHSEKVAYYLELEEEIKNLTGGKNIHFFGFVLGARGKWSEGNNDLLQLLGMDRSKNFKESICRLVLYSTIGMMAIFSDR

SEQ ID NO: 9223 - protein, 1216 aa, Chrysemys picta
MDKKVWTIMKSHENESENQVLPVEHGEEVEENVCDDHGEEILSILPMVFTRDTFNDLTMDSFNPDFKYLSTFDDPYVRESGYLNAHLVNGSSLLNSFRPSTDFNRDRNKDLNSTGSNINILESSSWKDGVFYLEYPVDSFNCPICPQILPTFGKWAKHINVVHKSKAIRVVCSKCGKSSQYHNIACHYPKCIPKKADTPMKSHTCAVCGLGFHTRSGLSQHCRHGHPAVRNEQRKEDMAAKSKIKEGSTRSRIWTKDEVAQLIQLERKYIGKRNINKCIESEMRTKTNKQISDKRRELAKKKLVVTGDREEVTEVEDIRVNILEIPPPRERIFPLKGHPEVDLVEKICKRGKQSREGREIINSLGEIEGLLKEDLTKALGWAMLEKLCYSLVEGKDPRNESQIELRNKGKGKMRKEGRRKQFNAIRRYATKKAKYKFYQQLFDKDRRRLTRIIMGEPDKAKCAIPMKEIEEYYVNILGTIGHGNMIGWPSSTENADNDILMSPISVDEIRIALREIRKDSAPGPDKVKVSNLWDIFNLDSLILTKFFNIWFLNRQVPDEFKKNRTILIPKTQDEEEMKKLTSWRPLTIGSVWIRIYTKILAKRLVETVKICSRQKGFISAPGCEENIAILDNLIKGAKRNGNEIAIVFVDLAKAFDSVGHGHIIAGLRRFGVDEHFIDIIRDLYDNCTTRVWVGDEATESILIRRGVKQGDPLSPILFNIAMDPLLTRLEVEGSGFYVKGNSVMSLAFADDVAILSSSYKGMIKNLGILEEFCKNTNLSVNVKKTKGFHILTKHKTYVVNPKDNWQIGSEEIEYVQPGDFEKYLGARIDPWIGVGGPVLKEKLKDWSENLIKAPLKPAQKILILQTYILPKLFYNLLLIEPPFNLLDDLDVLVRKIVKEILHLPQCTTDGIFYSRGRDGGLALTKFSVQIPHMLICKWRRHIVSRDDWMDLSYLYAGENLVDKILSFSAVTSHPKKWREEEFLRWSELRCQGIGIKYFKNDLISNSIFRNSSKVKSSAYIAALQLRANIYPTRETLARGRGGVNALCRWCGKVRETVPHISGQCYKTKNARIKRHNRVVSAVVDKVGKLGWKAMIEPHLRNSKGELRKPDIIFIKGDTAVVVDVTVRWEDNAGSLEQAHSEKVAYYLELEEEIKNLTGGKNIHFFGFVLGVRGKWSEGNNDLLQLLGMDRSKNFKESICRLVLYSTIGMMAIFSDR

SEQ ID NO: 9224 - protein, 1310 aa, Chrysemys picta
MVPHGCPPGKGSLPQARVSFPLERVSFPQVRVSFPLERVSFPLRRVNLLAMEKSNLYFYTGLALDRVNNAPAVGFDAPADSVKYIRGVIRVAGPMDKMVWTIMKSHENESENQVLPVEHGEEVEENICDDRGEEILSILPMVFTRDTFNDLTMDSFNPDFKYLSTFDDPYVRELGYLNAHLVNGSSLLNSFRPSTDFNRDRNKDLNSTGSNINILESSSWKDGVFYLEYPVDSFNCPICPQILPTFGKWAKHINVVHKSKAIRVVCSKCGKSSQYRNIACHYPKCIPKKVDTPMKSHTCSVCGLGFHTRSGLSQHCRHRHPAVRNEQRKEDMAAKSKIKEGSIRSRIWTKDEVAQLIQLERKYIGKRNINKCIESEMRTKTNKQISDKRRELAKKKLVVTGDREEVTEVEDIRVNILEIPPPRERIFPLKGYPEVDLVEKICKRGKQSREGREIINSLGEIEGLLKEDLAKALGWAMLEKLCYSLVEGKDPRNESQIELRNKGKGKMRKEGRRKQFNASRRYATKKAKYKFYQQLFDKDRRRLTRIIMGEPDKAKCAIPMKEIEEYYVNILGTIGHGNMIGWPSSTENADNDILMSPISVDEIRIALREIRKDSAPGPDKVKVSNLWDIFNLDSLILTKNFNIWFLNRQVPDEFKKNRTILIPKTQDEEEMKKLTSWRPLTIGSVWIRIYTKILAKRLVETVKICSRQKGFISAPGCEENIAILDNLIKGAKRNGNEIAIVFVDLAKAFDSVGHGHIIAGLRRFGIDEHFIDIIRDLYDNCTTRVWVGDEATESILIRRGVKQGDPLSPILFNIAMDPLLTRLEVEGSGFYVKGNSVTSLAFADDVAILSSSYKGMIKNLGILEEFCKNTNLSVNVKKTKGFHILTKHKTYVVNPKDNWQIGSEEIEYVQPGDFEKYLGDRIDPWIGVGGPVLKEKLKDWSENLIKAPLKPAQKILILQTYILPKLFYNLLLIEPPFNLLDDLDVLVRKIVKEILHLPQCTTDGIFYSRGRDGGLALTKFSVQIPNMLIRKWRRHIVSRDDWMDLSYLYAGENLVDKILLFSAVTSHPKKWREEEFLRWSELRCQGIGIKYFKNDLISNSIFRNSSKVKSSAYIAALQLRANIYPTRETLARGRGGVNALCRWCGKVRETVPHISGQCYKTKNARIKRHNRVVSAVVDKVGKLGWKAIIEPHLRNSKGELRKPDIIFIKGDTAVVVDVTVRWEDNAGSLEQAHSEKVAYYLELEEEIKNLTGGKNIHFFGFVLGARGKWSEGDNDLLQLLGMDRSKNFKESICRLVLYSTIGMMAIFSDR

SEQ ID NO: 9225 - protein, 1260 aa, Terrapene carolina
MEKSNLYFYTGLALDRVNNAPAVGFDAPADSVKYIRGVIRVAGPMDKMVWTIMKSHEHESENQVLPVEHGEEVEENVCDDHGEEILSILPMVFTRDTFNDLTMESFNPDFKYLSTFDDPYVSESGYLNAHLVNESSLLNSFRPSTDFNRDRNKDLNSTGSNINILESSSWKDGVFYLEYPVDSFNCPICPQILPTFGKWAKHINVVHKSKAIRVVCSKCGKSSQYHNIACHYPKCIPKKADTPMKSHTCSVCGLGFHTRSGLSQHCRHRHPAVRNEQRKEDMAAKSKIKEGSTRSRIWTKDEVAQLIQLERKYIGKRNINKCIESEMRTKTNKQISDKRRELAKKKLVVTGDREEVTEVEDIRVNILEIPPPRERIFPLKGHPEVDLVEKICKRGKQSREGREIINSLGEIEGLLKEDLTKALGWAMLEKLCYSLVEGKDPRNESQIELRNKGKGKMRKEGRRKQFNAIRRYATKKAKYKFYQQLFDKDRRRLTRIIMGEPDNAKCAIPMKEIEEYYVNILGTIGHGNMIGWPSSTENADNDILMSPISVDEIRIALREIRKDSAPGPDKVKVSNLWDIFNLDSLILTKIFNIWFLNRQVPDEFKKNRTILIPKTQDEEEMKKLTSWRPLTIGSVWIRIYTKILAKRLVETVKICSRQKGFISAPGCEENIAILDNLIKGAKRNGNEIAIVFVDLAKAFDSVGHGHIIAGLRRFGIDEHFIDIIRDLYDNCTTRVWVGDEATESILIRRGVKQGDPLFPILFNIAMDPLLTRLEVEGSGFYVKGNGVTSLAFADDVAILSSSYKGMIKNLGILEEFCKNTNLSVNVKKTKGFHILTKHKTYVVNPKDNWQIGSEEIEYVQPGDFEKYLGARIDPWIGVGGPVLKKKLKDWSENLIKAPLKPAQKILILQTYILPKLFYNLLLIEPPFNLLDDLDVLVRKIVKEILHLPQCTTDGIFYSRGRDGGLALTKFSVQIPNMLIRKWRRHIVSRDDWMDLSYLYAGENLVDKILLFSAVTSHPKKWREEEFLRWSELRCQGIGIKYFKNDLISNSIFRNSSKVKSSAYIAALQLRANIYPTRETLARGRGGVNALCRWCGKVRETVPHISGQCYKTKNARIKRHNRVVSAVVDKVGKLGWKAMIEPHLRNSKGELRKPDIIFIKGDTAVVVDVTVRWEDNAGSLEQAHSEKVAYYLELEEEIKNLTGGKNIHFFGFVLGARGKWSEGNNDLLQLLGMDRSKNFKESICRLVLYSTISMMAIFSDR

SEQ ID NO: 9226 - protein, 1260 aa, Terrapene carolina
MEKSNLYFYTGLALDRVNNAPAVGFDAPADSVKYIRGVIRVAGPMDKMVWTIMKSHEHESENQVLPVEHGEEVEENVCDDHSEEILSILPMVFTRDTFNDLTMESFNPDFKYLSTFDDPYVSESGYLNAHLVNGSSLLNSFRPSTDFNRDRNKDLNSTGSNINILESSSWKDGVFYLEYPVDSFNCPICPQILPTFGKWAKHINVVHKSKAIRVVCSKCGKSSQYHNIACHYPKCIPKKADTPMKSHTCSVCGLGFHTRSGLSQHCRHRHPAVRNEQRKEDMAAKSKIKEGSTRSRIWTKDEVTQLIQLERKYIGKRNINKCIESEMRTKTNKQISDKRRELAKKKLVVTGDREEVTEVEDIRVNILEIPPPRERIFPLKGHPEVDLVEKICKRGKQSREGREIINSLGEIEGLLKEDLTKALGWAMLEKLCYSLVEGKDPRNESQIELRNKGKGKMRKEGRRKQFNAIRRYATKKAKYKFYQQLFDKDRRRLTRIIMGEPDKAKCAIPMKEIEEYYVNILGTIGHGNMIGWPSSTENADNDILMSPISVDEIRIALREIRKDSAPGPDKVKVSNLWDIFNLDSLILTKIFNIWFLNRQVPDEFKKNRTILIPKTQDEEEMKKLTSWRPLTIGSVWIRIYTKILAKRLVETVKICSRQKGFISAPGCEENIAILDNLIKGAKRNGNEIAIVFVDLAKAFDSVGHGHIIAGLRRFGIDEHFIDIIRDLYDNCTTRVWVGDEATESILIRRGVKQGDPLSPILFNIAMDPLLTRLEVEGSGFYVKGNGVTSLAFADDVAILSSSYKGMIKNLGILEEFCKNTNLSVNVKKTKGFHILTKHKTYVVNPKDNWQIGSEEIEYVQPGDFEKYLGARIDPWIGVGGPVLKEKLKDWSENLIKAPLKPAQKILILQTYILPKLFYNLLLIEPPFNLLDDLDVLVRKIVKEILHLPQCTTDGIFYSRGRDGGLALTKFSVQIPNMLIRKWRRHIVSRDDWMDLSYLYAGENLVDKILSFSAVTSHPKKWREEEFLRWSELRCQGIGIKYFKNDLISNSIFRNSSKVKSSAYIAALQLRANIYPTRETLARGRGGVNALCRWCGKVRETVPHISGQCYKTKNARIKRHNRVVSAVVDKVGKLGWKAMIEPHLRNSKGELRKPDIIFIKGDTAVVVDVTVRWEDNAGSLEQAHSEKVAYYLELEEEIKNLTGGKNIHFFGFVLGARGKWSEGNNDLLQLLGMDRSKNFKESICRLVLYSTIGMMAIFSDR

SEQ ID NO: 9227 - protein, 1017 aa, Terrapene carolina
MKSHTCSVCGLGFHTRSGLSQHCRHRHPAVRNEQRKEDMAAKSKIKEGSTRSRIWTKDEVAQLIQLERKYIGKRNINKCIESEMRTKTNKQISDKRRELAKKKLVVTGDREEVTEVEDIRVNILEIPPPRERIFPLKGHPEVDLVEKICKRGKQSREGREIINSLGEIEGLLKEDLTKALGWAMLEKLCYSLVEGKDPRNESQIELRNKGKGKMRKEGRRKQFNAIRRYATKKAKYKFYQQLFDKDRRRLTRIIMGEPDKAKCAIPMKEIEEYYVNILGTIGHGNMIGWPSSTENADNDILMSPISVDEIRIALREIRKDSAPGPDKVKVSNLWDIFNLDSLILTKIFNIWFLNRQVPDEFKKNRTILIPKTQDEEEMKKLTSWRPLTIGSVWIRIYTKILAKRLVETVKICSRQKGFISAPGCEENIAILDNLIKGAKRNGNEIAIVFVDLAKAFDSVGHGHIIAGLRRFGIDEHFIDIIRDLYDNCTTRVWVGDEATESILIRRGVKQGDPLSPVLFNIAMDPLLTRLEVEGSGFYVKGNGVTSLAFADDVAILSSSYKGMIKNLGILEEFCKNTNLSVNVKKTKGFHILTKHKTYVVNPKDNWQIGSEEIEYVQPGDFEKYLGARIDPWIGVGGPVLKEKLKDWSENLIKAPLKPAQKILILQTYILPKLFYNLLLIEPPFNLLDDLDVLVRKIVKEILHLPQCTTDGIFYSRGRDGGLALTKFSVQIPNMLIRKWRRHIVSRDDWMDLSYLYAGENLVDKILSFSAVTSHPKKWREEEFLRWSELRCQGIGIKYFKNDLISNSIFRNSSKVKSSAYIAALQLRANIYPTRETLARGRGGVNALCRWCGKVRETVPHISGQCYKTKNARIKRHNRVVSAVVDKVGKLGWKAMIEPHLRNSKGELRKPDIIFIKGDTAVVVDVTVRWEDNAGSLEQAHSEKVAYYLELEEEIKNLTGGKNIHFFGFVLGARGKWSEGNNDLLQLLGMDRSKNFKESICRLVLYSTIGMMAIFSDR

SEQ ID NO: 9228 - protein, 1320 aa, Terrapene carolina
MDAPLVRVASPRYGLTPPGKGSFPQARVSFPLERVSFPQVRVSFPLERVSFPLRRVNLLAMEKSNLYFYTGLALDRVNNAPAVGFDAPADSVKYIRGVIRVAGPMDKMVWTIMKSHEYESENQVLPVEHGEEVEENVCDDHGEEILSILPMVFTRDTFNDLTMESFNPDFKYLSTFDDPYVSESGYLNAHLVNGSSLLNSFRPSTDFNRDRNKDLNSTGSNINILESSSWKDGVFYLEYPVDSFNCPICPQILPTFGKWAKHINVVHKSKAIRVVCSKCGKSSQYHNIACHYPKCIPKKADTPMKSHTCSVCGLGFHTRSGLSQHCRHRHPAVRNEQRKEDMAAKSKIKEGSTRSRIWTKDEVAQLIQLERKYIGKRNINKCIESEMRTKTNKQISDKRRELAKKKLVVTRDREEVTEVEDIRVNILEIPPPRERIFPLKGHPEVDLVEKICKRGKQSREGREIINSLGEIEGLLKEDLTKALGWAMLEKLCYSLVEGKDPRNESQIELRNKGKGKMRKEGRRKQFNAIRRYATKKAKYKFYQQLFDKDRRRLTRIIMGEPDKAKCAIPMKEIEEYYVNILGTIGHGNMIGWPSSTENVDNDILMSPISVDEIRIALREIRKDSAPGPDKIKVSNLWDIFNLDSLILTKIFNIWFLNRQVPDEFKKNRTILIPKTQDEEEMKKLTSWRPLTIGSVWIRIYTKILAKRLVETVKICSRQKGFISAPGCEENIAILDNLIKGAKRNGNEIAIVFVDLAKAFDSVGHGHIIAGLRRFGIDEHFIDIIRDLYDNCTTRVWVGDEATESILIRRGVKQGDPLSPILFNIAMDPLLIRLEVEGSGFYVKGNGVTSLAFADDVAILSSSYKGMIKNLGILEEFCKNTNLSVNVKKTKGFHILTKHKTYVVNPKDNWQIGSEEIEYVQPGDFEKYLGARIDPWIGVGGPVLKEKLKDWSENLIKAPLKPAQKILILQTYILPKLFYNLLLIEPPFNLLDDLDVLVRKIVKEILHLPQCTTDGIFYSRGRDGGLALTKFSVQIPNMLIRKWRRHIVSRDDWMDLSYLYAGENLVDKILSFSAVTSHPKKWREEEFLRWSELRCQGIGIKYFKNDLISNSIFRNSSKVKSSAYIAALQLRANIYPTRETLARGRGGVNALCRWCGKVRETVPHISGQCYKTKNARIKRHNRVVSAVVDKVGKLGWKAMIEPHLRNSKGELRKPDIIFIKGDTAVVVDVTVRWEDNARSLEQAHSEKVAYYLELEEEIKNLTGGKNIHFFGFVLGARGKWSEGNNDLLQLLGMDRSKNFKESICRLVLYSTIGMMAIFSDR

SEQ ID NO: 9229 - protein, 1216 aa, Trachemys scripta
MDKMVWTIMKSPENESENQVLPVEHGEEVEENVCDDHGEEILSILPMVFTRDTFNDLTMDSFNPDFKYLSTFDDPYVRESGYLNAHLVNGFSLLNSFRPSTDFNRDRNKDLNSTGSNINILESSSWKDGVFYLEYPVDSFNCPICPQILPTFGKWAKHINVVHKSKAIRVVCSKCGKSSQYHNIACHYPKCISKKADTPMKSHTCSVCGLGFHTRSGLSQHCRHRHPAVRNEQRKENMAAKSKIKEGSTRSRIWTKDEVAQLIQLERKYIGKRNINKCIESEMRTKTNKQISDKRRELAKKKLVVTGDREEVTEVEDIRVNILEIPPPRERIFPLKGHPEVDLVEKICKRGKQSREGREIINSLGEIEGLLKEDLTKALGWAMLEKLCYSLVEGKDPKNESQIELRNKGQGKMRKEGRRKQFNAIRRYATKKAKYKFYQQLFDKDRRRLTRIIMGEPDKAKCAIPMKEIEEYYVNILGTIGHGNMIGWPSSTENADNDILMSPISVDEIRIALREIRKDSAPGPDKVKVSNLWDIFNLDSLILTKIFNIWFLNRQVSDEFKKNRMILIPKTQDEEEMKKLTSWRPLTIGSVWIRIYTKILAKRLVETVKICSRQKGFISAPGCEENIAILDNLIKGAKRNGNEIAIVFVDLAKAFDSVGHGHIIAGLRRFGIDEHFIDIIRDLYDNCTTRVWVGDEATESILIRRGVKQGDPLSPILFNIAMYPLLTRLEVEGSGFYVKGNSVTSLAFADDVAILSSSYKGMIKNLGILEEFCKNTNLSVNVKKTKGFHILTKHKTYVVNPKDNWQIGSEEIEYVQPGDFEKYLGARIDPWIGVGGPVLKEKLKDWSENLIKAPLKPAQKILILQTYILPKLFYNLLLVEPPFNLLDDLDVLVRKIVKEILHLPQCTTDGIFYSRGRDGGLALTKFSVQIPNMLIRKWRRHIVSRDDWMDLSYLYAGENLVDKILSFSAVTSHPKKWREEEFLRWSELRCQGIGIKYFKNDLISNSIFRNSSKVKSSAYIAALQLRANIYPTRETLARGRGGVNALCRWCGKVRETVPHISGQCYKTKNARIKRHNRVVSAVVDKVGKLGWKAMIEPHLRNSKGELRKPDIIFIKGDTAVVVDVTVRWEDNAGSLEQAHSEKVAYYLELEEEIKNLTGGKNIHFFGFVLGARGKWSEGNNDLLQLLGMDRSKNFKESICRLVLYSTIGMMAIFSDR

SEQ ID NO: 9230 - protein, 1260 aa, Actinemys marmorata
MEKSNLYFYTGLALDRVNNAPAVGFDAPADSVKYIRGVIRVAGPMDKMVWTIMKSHEHESENQVLPVEHGEEVEENVCDDHGEEILSILPMVFTRDTFNDLTMESFNSDFKYLSTFDDPYVRESGYLNAHLVNGSSLLNSFRPSTDFNRDRNKDLNSTGSNINILESSSWKDGVFYLEYPVDSFNCPICPQILPTFGKWAKHINVVHKSKAMRVVCSKCGKSSQYHNIACHYPKCIPKKADTPMKSHTCSVCGLGFHTRSGLSQHCRHRHPAVRNEQRKEDMAAKSKIKEGSTRSRIWTKDEVAQLIQLERKYIGKRNINKCIESEMRTKTNKQISDKRRELAKKKLVVTGDREEVTEVEDIRVNILEIPPPRERIFPLKGHPEVDLVEKICKRGKQSREGREIINSLGEIEGLLKEDLTKALGWAMLEKLCYSLVEGKDPRNESQIELRNKGKGKMRKEGRRKQFNAIRRYATKKAKYKFYQQLFDKDRRRLTRIIMGEPDKAKCAIPMKEIEEYYVNILGTIGHGNMIGWPSSTENADNDILMSPISVDEIRIALREIRKDSAPGPDKVKVSNLWDIFNLDSLILTKIFNIWFLNRQVPDEFKKNRTILIPKTQDEEEMKKLTSWRPLTIGSVWIRIYTKILAKRLVETVKICSRQKGFISAPGCEENIAILDNLIKGAKRNGNEIAIVFVDLAKAFDSVGHGHIIAGLRRFGIDEHFIDIIRDLYDNCTTRVWVGDEATESILIRRGVKQGDPLSPILFNIAMDPLLTRLEVEGSGFYVKGNSVTSLAFADDVAILSSSYKGMIKNLGILEEFCKNTNLSVNVKKTKGFHILTKHKTYVVNPKDNWQIGSEEIEYVQPGDFEKYLGARIDPWIGVGGPVLKEKLKDWSENLIKAPLKPAQKILILQTHILPKLFYNLLLIEPPFNLLDDLDVLVRKIVKEILHLPQCTTDGIFYSRGRDGGLALTKFSVQIPNMLIRKWRRHIVSRDDWMDLSYLYAGENLVDKILSFSAVTSHPKKWREEEFLRWSELRCQGIGIKYFKNDLISNLIFRNSSKVKSSAYIAALQLRANIYPTRETLARGRGGVNALCRWCGKVRETVPHISGQCYKTKNARIKRHNRVVSAVVDKVGKLGWKAMIEPHLRNSKGELRKPDIIFIKGDTAVVVDVTVRWEDNAGSLEQAHSEKVAYYLELEEEIKNLTGGKNIHFFGFVLGARGKWSEGNNDLLQLLGMDRSKNFKESICRLVLYSTIGMMAIFSDR

SEQ ID NO: 9231 - protein, 1260 aa, Actinemys marmorata
MEKSNLYFYTGLALDRVNNAPAVGFDAPADSVKYIRGVIRVAGPMDKMVWTIMKSHEHESENQVLPVEHGEEVEENVCDDHGEEILSILPLVFTRDTFNDLTMESFNPDFKYLSTFDDPYVRESGYLNAHLVNGSSLLNSFRPSTDFNRDRNKDLNSTGSNINILESSSWKDGVFYLEYPVDSFNCPICPQILPTFGKWAKHINVVHKSKAIRVVCSKCGKSSQYHNIACHYPKCIPKKADTPMKSHTCSVCGLGFHTRSGLSQHCRHRHPAVRNEQRKEDMAAKSKIKEGSTRSRIWTKDEVAQLIQLERKYIGKRNINKCIESEMRTKTNKQISDKRRELAKKKLVVTGDREEVTEVEDIRVNILEIPPPRERIFPLKGHPEVDLVEKICKRGKQSREGREIINSLGEIEGLLKEDLTKALGWAMLEKLCYSLVEGKDPRNESQIELRNKGKGKMRKEGRRKQFNAIRRYATKKAKYKFYQQLFDKDRRRLTRIIMGEPDKAKCAIPMKEIEEYYVNILGTIGHGNMIGWPSSTENADNDILMSPISVDEIRIALREIRKDSAPGPDKVKVSNLWDIFNLDSLILTKIFNIWFLNRQVPDEFKKNRTILIPKTQDEEEMKKLTSWRPLTIGSVWIRIYTKILAKRLVETVKICSRQKGFISAPGCEENIAILDNLIKGAKRNGNEIAIVFVDLAKAFDSVGHGHIIAGLRRFGIDEHFIDIIRDLYDNCTTRVWVGDEATESILIRRGVKQGDPLSPILFNIAMDPLLTRLEVEGSGFYVKGNSVTSLAFADDVAILSSSYKGMIKNLGILEEFCKNTNLSVNVKKTKGFHILTKHKTYVVNPKDNWQIGSEEIEYVQPGDFEKYLGARIDPWIGVGGPVLKEKLKDWSENLIKAPLKPAQKILILQTYILPKLFYNLLLIEPPFNLLDDLDVLVRKIVKKILHLPQCTTDGIFYSRGRDGGLALTKFSVQIPNMLIRKWRRHIVSRDDWMDLSYLYAGENLVDKILSFSAVTSHPKKWREEEFLRWSELRCQGIGIKYFKNDLISNSIFRNSSKVKSSAYIAALQLRANIYPTRETLARGRGGVNALCRWCGKVRETVPHISGQCYKTKNARIKRHNRVVSAVVDKVGKLGWKAMIEPHLRNSKGELRKPDIIFIKGDTAVVVDVTVRWEDNAGSLEQAHSEKVAYYLELEEEIKNLTGGKNIHFFGFVLGVRGKWSEGNNDLLQLLGMDRSKNFKESICRLVLYSTIGMMAIFSDR

SEQ ID NO: 9232 - protein, 1260 aa, Chrysemys picta
MEKSNLYFYTGLALDRVNNAPAVGFDAPADSVKYIRGVIRVAGPMDKMVWTIMKSHENESENQVLPVEHGEEVEENICDDRGEEILSILPMVFTRDTFNDLTMDSFNPDFKYLSTFDDPYVRESGYLNAHLVNGSSLLNSFRPSTDFNRDRNKDLNSTGSNINILESSSWKDEVFYLEYPVDSFNCPICPQILPTFGKWAKHINVVHKSKAIRVVCSKCGKSSQYRNIACHYPKCIPKKVDTPMKSHTCSVCGLGFHTRSGLSQHCRHRHPAVRNEQRKEDMAAKGEIKEGSIRSRIWTKDEVAQLIQLERKYIGKRNINKCIESEMRTKTNKQISDKRRELAKKKLVVTGDREEVTEVEDIRVNILEIPPPRERIFPLKGYPEVDLVEKICKRGKQSREGREIINSLGEIEGLLKEDLTKALGWAMLEKLCYSLVEGKDPRNESQIELRNKGKGKMRKEGRRKQFNASRRYATKKAKYKFYQQLFDKDRRRLTRIIMGEPDKAKCAIPMKEIEEYYVNILGTIGHGNMIGWPSSTENADNDILMSPISVDEIRIALREIRKDSAPGPDKVKVSNLWDIFNLDSLILTKIFNIWFLNGQVPDEFKKNRTILIPKTQDEEEMKKLTSWRPLTIGSVWIRIYTKILAKRLVETVKICSRQKGFISAPGCEENIAILDNLIKGAKRNGNEIAIVFVDLAKAFDSVGHGHIIAGLRRFGIDEHFIDIIRDLYDNCTTRVWVGDEATESILIRKGVKQGDPLSPILFNIAMDPLLTRLEVEGSGFYVKGNSVTSLAFADDVAILSSSYKGMIKNLGILEEFCKNTNLSVNVKKTKGFRILTKHKTYVVNPKDNWQIGSEEIEHIQPGDFEKYLGARIDPWIGVGGPVLKEKLKDWSENLIKAPLKPAQKILILQTYILPKLFYNLLLIEPPFNLLDDLDVLVRKIVKEILHLPQCTTDGIFYSRGRDGGLALTKFSVQIPNMLIRKWRRHIVSRDDWMDLSYLYAGENLVDKILLFSAVTSHPKKWREEEFLRWSELRCQGIGIKYFKNDLISNSIFRNSSKVKSSAYIAALQLRANIYPTRETLARGRGGVNALCRWCGKVRETVPHISGQCYKTKNARIKRHNRVVSAAVDKVGKLGWKAIIEPHLRNSKDELREPDIIFIKGDTAVVVDVTVRWEDNAGSLEQAHSEKVAYYLELEEEIKNLTGGKNIHFFGFVLGARGKWSEGNNDLLQLLGMDRSKNFKESICRLVLYSTIGMMAIFSDR

SEQ ID NO: 9233 - protein, 1017 aa, Chrysemys picta
MKSHTCSVCGLGFHTRSGLSQHCRHRHPAVRNEQRKEDMAAKSKIKEGSTRSRIWTKDEVAQLIQLERKYIGKRNINKCIESEMRTKTNKQISDKRRELAKKKLVVTGDREEVTEVEDIRVNILEIPPPRERIFPLKGHPEVDLVEKICKRGKQSREGREIINSLGEIEGLLKEDLTKALGWAMLEKLGYSLVEGQDPRNESQIELRNKGKGKIRKEGRRKQFNAIRRYATKKAKYKFYQQLFDKDRRRLTRIIMGEPDKAKCAIPMKEIEEYYVNILGTIGHGNMIGWPSSTENADNDILMSPISVDEIRIALREIRKDSAPGPDKVKVSNLWDIFNLDSLILTKIFNIWFLNRQVPDEFKKNRTILIPKTQDEEEMKKLTSWRPLTIGSVWIRIYTKILAKRLVETVKICSRQKGFISAPGCEENIAILDNLIKGAKRNGNEIAIVFVDLAKAFDSVGRGHIIAGLRRFGIDEHFIDIIRDLYDNCTTRVWVGDEATESILIRRGVKQGDPLSPILFNIAMDPLLTRLEVEGSGFYVKGNSVTSLAFADDVAILSSSYKGMIKNLGILEEFCKHTNLSVNVKKTKGFHILTKHKTYVVNPKDNWQIGSEKIEYVQPGDFEKYLGARIDPWIGVGGPVLKEKLKDWSENLIKAPLKPAQKILILQTYILPKLFYNLLLIEPPFNLLDDLDVLVRKIVKEILHLPQCTTDGIFYSRGRDGGLALTKFSVQIPNMLIRKWRRHIVSRDDWMDLSYLYAGENLVDKILSFSAVTSHPKKWREEEFLRWSELRCQGIGIKYFKNDLISNSIFRNSSKVKSSAYIAALQLRANIYPTRETLARGRGGVNALCRWCGKVRETVPHISGQCYKTKNARIKRHNRVVAAVVDKVGKLGWKAMIEPHLRNSKGELRKPDIIFIKGDTAVVVDVTVRWEDNAGSLEQAHSEKVAYYLELEEEIKNLTGGKNIHFFGFVLGARGKWSEGNNDLLQLLGMDRSKNFKESICRLVLYSTIGMMAIFSDR

SEQ ID NO: 9234 - protein, 1261 aa, Chrysemys picta
MEKSNLYFYTGLALDRVNNAPAVGFDAPADSVKYIRGVIRVAGPMDKMVWTIMKSHENESENQVLPVEHGEEVEENVCDDHCDEEILSILPMVFTRDTFNDLTMDSFNPDFKYLSTFDDPYVRESGYLNAHLVNGSSLLNSFRPSTDFNRDRSKDLNSTGSNINILESSSWKDGVFYLEYPVDSFNCPICPQILPTFGKWAKHINVVHKSKAIRVVCSKCGKSSQYHNIACHYPKCIPKKADTPMKSHTCSVCGLGFHTRAGLSQHCRHRHPAVRNEQRQEDMAAKSKIKEGSTRSRIWTKDEVAQLIQLERKYIGKRNINKCIESEMRTKTNKQISDKRRELAKKKLVVTGDREEVTEVEDIRVNILETPPPRERIFPLKGHPEVDLVEKICKQGKQSREGREIINSLGEIEGLLKEDLTKALGWAMLEKLCYSLVEGKDPRNESQIELRNKGKGKMRKEGRRKQFNAIRRYATKKAKYKFYQQLFDKDRRRLTRIIMGEPDKAKCAIPMKEIEEYYVNILGTIGHGNMIGWPSSTENADNDILMSPISVDEIRIALREIRKDSAPGPDKVKVSNLWDIFNLDSLILTKKFNIWFLNRQVPDEFKKNRTILIPKTQDEEEMKKLTSWRPLTIGSVWIRIYTKILAKRLVETVKICSRQKGFISAPGCEENIAILDNLIKGAKRNGNEIAIVFVDLAKAFDSVGHGHIIAGLRRFGIDEHFIDIIRDLYDNCTTRVWVGDEATESILIRRGVKQGDPLSPILFNIAMDPLLTRLEVEGSGFYVKGNSVTSLAFADDVAILSSSYKGMIKNLGILEEFCKNTNLSVNVKKTKGFHILTKHKTYVVNPKDNWQIGSEEIEYVQPGDFEKYLGARIDPWIGVGGPVLKEKLKDWSENLIKAPLKPAQKILILQTYILPKLFYNLLLIEPPFNLLDDLDVLVRKIVKEILHLPQCTTDGIFYSRGRDGGLALTKFSVQIPNMLIRKWRRHIVSRDDWMDLSYLYAGENLVDKILSFSAVTFHPKKWREEEFLRWSELRCQGIGIKYFLNDLISNSIFRNSSKVKSSAYIAALQLRANIYPTRETLARGRGGVNALCRWCGKVRETVPHISGQCYKTKNARIKRHNRVVSAVVDKVGKLGWKAMIEPHLRNSKGELRKPDIIFIKGDTAVVVDVTVRWEDNAGSLEQAHSEKVAYYLELEEEIKNLTGGKNIHFFGFVLGARGKWSEGNNDLLQLLGMDRSKNFKESICRLVLYSTIGMMAIFSDR

SEQ ID NO: 9235 - protein, 1313 aa, Terrapene carolina
MDAPLVRVASPRYGLTPPGKGSLPQARVSFPLERVSFPQVRVSFPLERVNLLAMEKSNLYFYTGLALDRVNNAPAVGFDAPADSVKYIRGVIRVAGPMDKMVWTIMKSHEHESENQVLPVEHGEEVEENVCDDHGEEILSVLPMVFTRDTFNDLTMESFNPDFKYLSTFDDPYVSESGYLNAHLVNGSSLLNSFRPSTDFNRDRNKDLNSTGSNINILESSSWKDGVFYLEYPVDSFNCPICPQILPTFGKWAKHINVVHKSKAIRVVCSKCGKSSQYHNIACHYPKCIPKKADTPMKSHTCSVCGLGFHTRSGLSQHCRHRHSAVRNEQRKEDMAAKSKIKEGSTRSRIWTKDEVAQLIQLERKYIGKRNINKCIESEMRTKTNKQISDKRRELAKKKLVVTGDREEVTEVEDIRVNILEIPPPRERIFPLKGHPEVDLVEKICKRGKQSREGREIINSLGEIEGLLKEDLTKALGWAMLEKVCYSLVEGKDPRNESQIELRNKGKGKMRKEGRRKQFNAIRRYATKKAKYKFYQQLFDKDRRRLTRIIMGEPDKAKCAIPMKEIEEYYVNILGTIGHGNMIGWPSSTENADNDILMSPISVDEIRIALREIRKDSAPGPDKVKVSNLWDIFNLDSLILTKIFNIWFLNRQVPDEFKKNRTILIPKTQDEEEMKKLTSWRPLTIGSVWIRIYTKILAKRLVETVKICSRQKGFISAPGCEENIAILDNLIKGAKRNGNEIAIVFVDLAKAFDSVGHGHIIAGLRRFGIDEHFIDIIRDLYDNCTTRVWVGDEATESILIRRGVKQGDPLSPILFNIAMDPLLTRLEVEGSGFYVKGNGVTSLAFADDVAILSSSYKGMIKNLGILEEFCKNTNLSVNVKKTKGFHILTKHKTYVVNPKDNWQIGSEEIEYVQPGDFEKYLGARIDPWIGVGGPVLKEKLKDWSENLIKAPLKPAQKILILQTYILPKLFYNLLLIEPLFNLLDDLDVLVRKIVKEILHLPQCTTDGIFYSRGRDGGLALTKFSVQIPNMLIRKWRRHIVSRDDWMDLSYLYAGENLVDKILSFSAVTSHPKKWREEEFLRWSELRCQGIGIKYFKNDLISNSIFRNSSKVKSSAYIAALQLRANIYPTRETLARGRGGVNALCRWCGKVRETVPHISGQCYKTKNARIKRHNRVVSAVVDKVGKLGWKAMIEPHLRNSKGELRKPDIIFIKGDTAVVVDVTVRWEDNAGSLEQAHSEKVAYYLELEEEIKNLTGGKNIHFFGFVLGARGKWSEGNNDLLQLLGMDRSKNFKESICRLVLYSTIGMMAIFSDR

SEQ ID NO: 9236 - protein, 1239 aa, Terrapene carolina
MEKSNLYFYTGLALDRVNNAPAVGFDAPADSVKYIRGVIRVAGPMDKMVWTIMKSHEHESENQVLPVEHGEEVEENVCDDHGEEILSILPMVFTRDTFNDLTMESFNPDFKYLSTFDDPYVSESGYLNAHLVNGSSLLNSFRPSTGFNRDRNKDLNSTGSNINILESSSWKDGVFYLEYPVDSFNCPICPQILPTFGKWAKHINVVHKSKAIRVVCSKCGKSSQYHNIACHYPKCIPKKADTPMKSHTCSVCGLGFHTRSGLSQHCRHRHPAVRNEQRKEDMAAKSKIKEGSTRSRIWTKDEVAQLIQLERKYIGKRNINKCIESEMRTKTNKQISDKRRELAKKKLVVTGDREEVTEVEDIRVNILEIPPPRERIFPLKGHPEVDLVEKICKRGKQSREGREIINSLGEIEGLLKEDLTKALGWAMLEKLCYSLVEGKDTRNESQIELRNKGKGKMRKEGRRKQFNAIRRYATKKAKYKFYQQLFDKDRRRLTRIIMGEPDKAKCAIPMKEIEEYYVNILGTIGHGNMIGWPSSTENADNDILMSPISVDEIRIALREIRKDSAPGADKVKVSNLWDIFNLDSLILTKIFNIWFLNRQVPDEFKKNRTILIPKTQDEEEMKKLTSWRPLTIGSVWIRIYTKILAKRLVETVKICSRQKGFISAPGCEENIAILDNLIKGAKRNGNEIAIVFVDLAKAFDSVGHGHIIAGLRRFGIDEHFIDIIRDLYDNCTTRVWVGDEATESILIRRGVKQGDPLSPILFNIAMDPLLTRLEVEGSGFYVKGNGVTSLAFADDVAILSSSYKGMIKNLGILEEFCKNTNLSVNVKKTKGFHILTKHKTYVVNPKDNWQIGSEEIEYVQPGDFEKYLGARIDPWIGVGGPVLKEKLKDWSENLIKAPLKPAQKILILQTYILPKLFYNLLLIEPPFNLLDDLDVLVRKIVKEILHLPQCTTDGIFYSRGRDGGLALTKFSVQIPNMLIRKWRRHIVSRDDWVDLSYLYAGENLVDKILSFSAVTSHPKKWREEEFLRWSELRCQGIGIKYFKNDLISNSIFRNSSKVKSSAYIAALQLRANIYPTRETVPHISGQCYKTKNARIKRHNRVVSAVVDKVGKLGWKAMIEPHLRNSKGELRKPDIIFIKGDTAVVVDVTVRWEDNARSLELAHSEKVAYYLKLEEEIKNLTGGKNIHFFGFVLGARGKWSEGNNDLLQLLGMDRSKNFKESICRLVLYSTIGMMAIFSDR

SEQ ID NO: 9237 - protein, 1260 aa, Terrapene carolina
MEKRNLYFYTGLALDRVNNAPAVGFDAPADSVKYIRGVIRVAGPMDKMVWTIMKSHEHESENQVLPVEHGEEVEENVCDDHGEEILSILPMVFTGDTFNDLTMESFNPDFKYLSTFDDPYVSESGYLNAHLVNGSSLLNSFRPSTDFNRDRNKDLNSTGSNINILESSSWKDGVFYLEYPVDSFNCPICPQILPTFGKWAKHINVVHKSKAIRVVCSKCGKSSQYHNIACHYPKCIPKKADTPMKSHTCSVCGLGFHTRSGLSQHCRHRHPAVRNEQRKEDMAAKSKIKEGSTRSRIWTKDEVAQLIQLERKYIGKRNINKCIESEMRTKTNKQISDKRRELAKKKLVVTGDREEVTEVEDIRVNILEIPPPRERIFPLKGHPEVDLVEKICKRGKQSREGREIINSLGEIEGLLKEDLTKALGWAMLEKLCYSLVEGKDPRNESQIELRNKGKGKMRKEGRRKQFNAIRRYATKKAKYKFYQQLFDKDRRRLTRIIMGEPDKAKCAIPMKEIEEYYVNILGTIGHGNMIGWPSSTENADNDILMSPISVDEIRIALREIRKDSAPGPDKVKVSNLWDIFNLDSLILTKIFNIWFLNRQVPDEFKKNRTILIPKTQDEEEMKKLTSWRPLTIGSVWIRIYTKILAKRLVETVKICSRQKGFISAPGCEENIAILDNLIKGAKRNGNEIAIVFVDLAKAFDSVGHEHIIAGLRRFGIDEHFIDIIRDLYDNCTTRVWVGDEATESILIRRGVKQGDPLSPVLFNMAMDPLLTRLEVEGSGFYVKGNGVTSLAFADDVAILSSSYKGMIKNLGILEEFCKNTNLSVNVKKTKGFHILTKHKTYVVNPKDNWQIGSEEIEYVQPGDFEKYLGARIDPWIGVGGPVLKEKLKDWSENLIKAPLKPAQKILILQTYILPKLFYNLLLIEPPFNLLDDLDVLVRKIVKEILHLPQCITDGIFYSRGRDGGLALTKFSVQIPNMLIRKWRRHIVSRDDWMDLSYLYAGENLVDKILSFSAVTSHPKKWREEEFLRWSELRCQGIGIKYFKNDLISNSIFRNSSKVKSSAYIAALQLRANIYPTRETLARGRGGVNALCRWCGKVRETVPHISGQCYKTKNARIKRHNRVVSAVVDKVGKLGRKAMIEPHLRNSKGELRKPDIIFIKGDTAVVVDVTVRWEDNAGSLEQAHSEKVAYYLELEEEIKNLTGGKNIHFFGFVLGARGKWSEGNNDLLQLLGMDRSKNFKESICRLVLYSTIGMMAIFSDR

SEQ ID NO: 9238 - protein, 1260 aa, Terrapene carolina
MEKSNLYFYTGLALDRVNNAPAVGFDAPADSVKYIRGVIRGAGPMDKMVWTIMKSHEHESENQVLPVEHGEEVEENVCDDHGEEILSILPMVFTRDTFNDLTMESFNPDFKYLSTFDDPYVSESGYLNAHLVNGSSLLNSFRPSTDFNRDRNKDLNSTGSNINILESSSWKDGVFYLEYPVDSFNCPICPQILPTFGKWAKHINVVHKSKAIRVVCSKCGKSSQYHNIACHYPTCIPKKADTPMKSHTCSVCGLGFHTRSGLSQHCRHRHPAVRNEQRKEDMAAKSKIKEGSTRSRIWTKDEVAQLIQLERKYIGKRNINKCIESEMRTKTNKQISDKRRELAKKKLVVTGDREEVTEVEDIRVNILEIPPPRERIFPLKGHPEVDLVEKICKRGKQSREGREIINSLGEIEGLLKEDLTKALGWAMLEKLCYSLVEGKDPRNESQIELRNKGKGKMRKEGRRKQFNAIRRYATKKAKYKFYQQLFDKDRRRLTRIIMGEPDKAKCAIPMKEIEEYYVNILGTIGHGNMIGWPSSTENADNDILMSPISVDEIRIALREIRKDSAPGPDKVKVSNLWDIFNLDSLILTKIFNIWFLNRQVPDEFKKNRTILIPKTQDEEEMKKLTSWRPLTIGSVWIRIYTKILAKRLVETVKICSRQKGFISAPGCEENIAILDNLIKGAKRNGNEIAIVFVDLAKAFDSVGHGHIIAGLRRFGIDEHFIDIIRDLYDNCTTRVWVGDEATESILIRRGVKQGDPLSPILFNIAMDPLLTRLEVEGSGFYVKSNGVTSLAFADDVAILSSSYKGMIKNLGILEEFCKNTNLSVNVKKTKGFHILTKHKTYVVNPKDNWQIGSEEIEYVQPGDFEKYLGARIDPWIGVGGPVLKEKLKDWSENLIKAPLKPAQKILILQTYILPKLFYNLLLIEPPFNLLDDLDVLVRKIVKEILHLPQCTTDGIFYSRGRDGGLALTKFSVQIPNMLIRKWRRHIVSRDDWMDLSYLYAGENLVDKILSFSAVTSHPKKWREEEFLRWSELRCQGIGIKYFKNDLISNSIFRNSSKVKSSAYIAALQLRANIYPTRETLARGRGGVNALCRWCGKVRETVPHISGQCYKTKNARIKRHNRVVSAVVDKVGKLGWKAMIEPHLRNSKGELRKPDIIFIKGDTAVVVDVTVRWEDNAGSLEQAHSEKVAYYLELEEEIKNLTGGKNIHFFGFVLGARGKWSEGNNDLLQLLGMDRSKNFKESICRLVLYSTIGMMAIFSDR

SEQ ID NO: 9239 - protein, 1208 aa, Malaclemys terrapin
MKSHEHESENQVLPVEHGEEVEENVCDDHGEEILSILPMVFTRDTFNDLTMDSFNPDFKYLSTFDDPYVRESGYLNAHLVNGSSLLNSFRPSTDFNRDRNKDLNSTGSNINILESSSWKDGVFYLEYPVDSFNCPICPQILPTFGKWAKHINVVHKSKAIRVVCSKCGKSSQYHNIACHYPKCIPKKADTPMKSHTCSVCGLGFHTRSGLSQHCRHRHPAVRNEQRKEDMAAKSKIKEGSTRSRIWTKDEVAQLIQLERKYIGKRNINKCIESEMRTKTNKQISDKRRELAKKKLVVTGDREEVTEVEDIRVNILEIPPPRERIFPLKGHPEVDLVEKICKRGKQSREGREIINSLGEIEGLLKEDLTKALGWAMLEKLCYSLVEGKDPRNESQIELRNKGKGKMRKEGRRKQFNAIRRYATKKAKYKFYQQLFDKDRRRLTRIIMGEPDKAKCAIPMKEIEEYYVNILGTIGHGNMIGWPSSTENADNDILMSPISVDEIRIALREIRKDSAPGPDKVKVSNLWDIFNLDSLILTKIFNIWFLNRQVPDEFKKNRTILIPKTQDEEEMKKLTSWRPLTIGSVWIRIYTKILAKRLVETVKICSRQKGFISAPGCEENIAILDNLIKGAKRNGNEIAIVFVDLAKAFDSVGHGHIIAGLRRFGIDEHFIDIIRDLYDNCTTRVWVGDEATESILIRRGVKQGDPLSPILFNIAMDPLLTRLEVEGSGFYVKGNSVTSLAFADDVAILSSSYKGMIKNLGILEEFCKNTNLSVNVKKTKGFHILTKHKTYVVNPKDNWQIGSEEIEYVQPGDFEKYLGARIDPWIGVGGPVLKEKLKDWSENLIKAPLKPAQKILILQTYILPKLFYNLLLIEPPFNLLDDLDVLVRKIVKEILHLPQCTTDGIFYSRGRDGGLALTKFSVQIPNMLIRKWRRHIVSRDDWMDLSYLYAGENLVDKILSFSAVTSHPKKWREEEFLRWSELRCQGIGIKYFKNDLISNSIFRNSSKVKSSAYIAALQLRANIYPTRETLARGRGGVNALCRWCGKVRETVPHISGQCYKTKNARIKRHNRVVSAVVDKVGKLGWKAMIEPHLRNSKGELRKPDIIFIKGDTAVVVDVTVRWEDNAGSLEQAHSEKVAYYLELEEEIKNLTGGKNIHFFGFVLGARGKWSEGNNDLLQLLGMDRSKNFKESICRLVLYSTIGMMAIFSDR

SEQ ID NO: 9240 - protein, 1260 aa, Actinemys marmorata
MEKSNLYFYTGLALDRVNNAPTVGFDASADSVKYIRGVIRVAGPMDKMVWTIMKSHEHESENQVLPVEHGEEVEKNVCDDHGEEILSILPMVFTRDTFNDLTMESFNPDFKYLSTFDDPYVRESGYLNAHLVNGSSLLNSFRPSTDFNRDRNKDLNSTGSNINILESSSWKDGVFYLEYPVDSFNCPICPQILPTFGKWAKHINVVHKSKAIRVVCSKCGKSSQYHNIACHYPKCIPKKADTPMKSHTCSVCGLGFHTRSGLSQHCRHRHPAVRNEQRKEDMAAKSKIKEGSTRSRIWTKDEVAQLIQLERKYIGKRNINKCIESEMRTKTNKQISDKRRELAKKKLVVTGDREEVTEVEDIRVNILEILPPRERIFPLKGHPEVDLVEKICKRGKQSREGREIINSLGEIEGLLKEDLTKALGWAMLEKLCYSLVEGKDPRNESQIELRNKGKGKMRKEGRRKQFNAIRRYATKKAKYKFYQQLFDKDRRRLTRIIMGEPDKAKCAIPMKEIEEYYVNILGTIGHGNMIGWPSSTENADNDILMSPISVDEIRIALREIRKDSAPGPDKVKVSNLWDIFNLDSLILTKIFNIWFLNRQVPDEFKKNRTILIPKTQDEEEMKKLTSWRPLTIGSVWIRIYTKILAKRLVETVKICSRQKGFISAPGCEENIAILDNLIKGAKRNGNEIAIVFVDLAKAFDSVGHGHIIAGLRRFGIDEHFIDIIRDLYDNCTTRVWVGDEATESILIRRGVKQGDPLSPILFNIAMDPLLTRLEVEGSGFYVKGNSVTSLAFADDVAILSSSYKGMIKNLGILEEFCKNTNLSVNVKKTKGFHILTKHKTYVVNPKDNWQIGSEEIEYVQPGDFEKYLGARIDPWIGVGGPVLKEKLKDWSENLIKAPLKPAQKILILQTYILPKLFYNLLLIEPPFNLLDDLDVLVRKIVKEILHLPQCTTDGIFYSRGRDGGLALTKFSVQIPNMLIRKWRRHIVSRDDWMDLSYLYAGENLVDKILLFSAVTSHPKKWREEEFLRWSELRCQGIGIKYFKNDLISNSIFRNSSKVKSSAYIAALQLRANIYPTRETLARGRGGVNALCRWCGKVRETVPHISGQCYKTKNARIKRHNRVVSAVVDKVGKLGWKAMIEPHLRNSKGELRKPDIIFIKGDTAVVVDVTVRWEDNAGSLEQAHSEKVAYYLELEEEIKNLTGGKNIHFFGFVLGARGKWSEGNNDLLQLLGMDRSKNFKESICRLVLYSTIGMMAIFSDR

SEQ ID NO: 9241 - protein, 1260 aa, Actinemys marmorata
MEKSNLYFYTGLALDRVNNAPAVGFDAPADSVKYIRGVIRVAGPMDKMVWTIMKSHEHESENQVLPVEHGEEVEENVCDDHGEEILSILPMVFTRDTFNDLTMESFNPDFKYLSTFDDPYVRESGYLNAHFVNGSSLLNSFRPSTDFNRDRNKDLNSTGSNINILESSSWKDGVFYLEYPVDSFNCPICPQILPTFGKWAKHINVVHKSKAIRVVCSKCGKSSQYHNIACHYPKCIPKKADTPMKSHTCSVCGLGFHTRSGLSQHCRHRHPAVRNEQRKEDMAAKSKIKEGSTRSRIWTKDEVAQLIQLERKYIGKRNINKCIESEMRTKTNKQISDKRRELAKKKLVVTGDREEVTEVEDIRVNILEIPPPRERIFPLKGHPEVDLVEKICKRGKQSREGREIINSLGEIEGLLKEDLTKALGWAMLEKLCYSLVGGKDPRNESQIELRNKGKGKMRKEGRRKQFNAIRRYATKKAKYKFYQQLFDKDRRRLTRIIMGEPDKAKCAIPMKEIEEYYVNILGTIGHGNMIGWPSSTENADNDILMSPISVDEIRIALREIRKDSAPGPDKVKVSNLWDIFNLDSLILTKIFNIWFLNRQVPDEFKKNRTILIPKTQDEEEMKKLTSWRPLTIGSVWIRIYTKILAKRLVETVKICSRQKGFISAPGCEENIAILDNLIKGAKRNGNEIAIVFVDLAKAFDSVGHGHIIAGLRRFGIDEHFIDIIRDLYDNCTTRVWVGDEATESILIRRGVKQGDPLSPILFNIAMDPLLTRLEVEGSGFYVKGNSVTSLAFADDVAILSSSYKGMIKNLGILEEFCKNTNLSVNVKKTKGFHILTKHKTYVVNPKDNWQIGSEEIEYVQPGDFEKYLGARIDPWIGVGGPVLKEKLKDWSENLIKAPLKPAQKILILQTYILPKLFYNLLLIEPPFNLLDDLDVLVRKIVKEILHLPQCTTDGIFYSRGRDGGLALTKFSVQIPNMLIRNWRRHIVSRDDWMDLSYLYAGENLVDKILSFSAVTSHPKKWREEEFLRWSELRCQGIGIKYFKNDLISNSMFRNSSKVKSSAYIAALQLRANIYPTRETLARGRGGVNALCRWCGKVRETVPHISGQCYKTKNARIKRHNRVVSAVVDKVGKLGWKAMIEPHLRNSKGELRKPDIIFIKGDTAVVVDVTVRWEDNAGSLEQAHSEKVAYYLELEEEIKNLTGGKNIHFFGFVLGARGKWSEGNNDLLQLLGMDRSKNFKESICRLVLYSTIGMMAIFSDR

SEQ ID NO: 9242 - protein, 1240 aa, Chrysemys picta
MEKSNLYFYTGLALDRVNNAPAVGFDAPADSVKYIRGVIRVAGPMDKMVWTIMKSHENESENQVLPVEHGEEVEENVCDDHGEEILSILPMVFTRDTFNDLTMDSFNPDFKYLSTFDDPYVRESSTDFNRDRNKDLNSIGSNINILESSSWKDGVFYLEYPVDSFNCPICPQILPTFGKWAKHINVVHKSKAIRVVCSKCGKSSQYHNIACHYPKCIPKKADTPMSHTCSVCGLGFHTRSGLSQHCRHRHPAVRNEQRKEDMAAKSKIKEGSTRSRIWTKDEVAQLIQLERKYIGKRNINKCIESEMRTKTNKQISDKRRELAKKKLVVTGDREEVTEVEDIRVNILEIPPPRERIFPLKGHPEVDLVEKICKRGKQSREGREIINSLGEIEGLLKEDLTKALGWAMLEKLCYSLVEGQDPRNESQIQLRNKGKGKIRKEGRRKQFNAIRRYATKKAKYKFYQQLFDKDRRRLTRIIMGEPDKAKCAIPMKEIEEYYVNILGTIGHGNMIGWPSSTENADNDILMSPISVDEIRIALTEIRKDSAPGPDKVKVSNLWDIFNLDSLILTKIFNIWFLNRQVPDEFKKNRTILIPKTQDEEEMKKLTSWRPLTIGSVWIRIYTKILAKRLVETVKICSRQKGFISAPGCEENIAILDNLIKGAKRNGNEIAIVFVDLAKAFDSVGHGHIIAGLRRFGIDEHFIDIIRDLYDNCTTRVWVGDEATESILIRRGVKQGDPLSPILFNIAMDPLLTRLEVEGSGFYVKGNSVTSLAFADDVAILSSSYKGMIKNLGILEEFCKNTNLSVNVKKTKGFHILTKHKTYVVNPKDDWQIGSEKIEYVQPGDFEKYLGARIDPWIGVGGPVLKEKLKDWSENLIKAPLKPAQKILILQTYILPKLFYNLLLIEPPFNLLDDLDVLVRKIVKEILHLPQCTTDGIFYSRGRDGGLALTKFSVQIPNMLIRKWRRHIVSRDDWMDLSYLYAGENLVDKILSFSAVTSHPKKWREEEFLRWSELRCQGIGIKYFKNDLISNSIFRNSSKVKSSAYIAALQLRANIYPTRETLARGRGGVNALCRWCGKVRETVPHISGQCYKTKNARIKRHNRVVSAVVDKVGKLGWKAMIEPHLRNSKGELRKPDIIFIKGDTAVVVDVTVRWEDNAGSLEQAHSEKVAYYLELEEEIKNLTGGKNIHFFGFVLGARGKWSEGNNDLLQLLGMDRSKNFKESICRLVLYSTIGMMAIFSDR

SEQ ID NO: 9243 - protein, 1241 aa, Chrysemys picta
MEKSNLYFYTGLALDRVNNAPAVGFDAPADSVKYIRGVIRVAGPMDKMVWTIMKSHENESENQVLPVEHGEEVEENVCDDHGEEILSILPMVFTRDTFNDLTMDSFNPDFKYLGTFDDPYVRESSTDFNRDRNKDLNSIGSNINILESSSWKDGVFYLEYPVDSFNCPICPQILPTFGKWAKHINVVHKSKAIRVVCSKCGKSSQYHNIACHYPKCIPKKADTPMKSHTCSVCGLGFHTRSGLSQHCRHRHPAVRNEQRKEDMAAKSKIKEGSTRSRIWTKDEVAQLIQLERKYIGKRNINKCIESEMRTKTNKQISDKRRELAKKKLVVTGDREEVTEVEDIRVNILEIPPPRERIFPLKGHPEVDLVEKICKRGKQSREGREIINSLGEIEGLLKEDLTKALGWAMLEKLCYSLVEGQDPRNESQIELRNKGKGKIRKEGRRKQFNAIRRYATKKAKYKFYQQLFDKDRRRLTRIIMGEPDKAKCAIPMKEIEEYYVNILGTIGHGNMIGWPSSTENADNDILMSPISVDEIRIALTEIRKDSAPGPDKVKVSNLWDIFNLDSLILTKIFNIWFLNRQVPDEFKKNRTILIPKTQDEEEMKKLTSWRPLTIGSVWIRIYTKILAKRLVETVKICSRQKGFISAPGCEENIAILDNLIKGAKRNGNEIAIVFVDLAKAFDSVGHGHIIAGLRRFGIDEHFIDIIRDLYDNCTTRVWVGDEATESILIRRGVKQGDPLSPILFNIAMDPLLTRLEVEGSGFYVKGNSVTSLAFADDVAILSSSYKGMIKNLGILEEFCKNTNLSVNVKKTKGFHILTKHKTYVVNPKDNWQIGSEKIEYVQPGDFEKYLGARIDPWIGVGGPVLKEKLKDWSENLIKAPLKPAQKILILQTYILPKLFYNLLLIEPPFNLLDDLDVLVRKIVKEILHLPQCTTDGIFYSRGRDGGLALTKFSVQIPNMLIRKWRRHIVSRDDWMDLSYLYAGENLVDKILSFSAVTSHPKKWREEEFLRWSELRCQGIGIKYFKNDLISNSIFRNSSKVKSSAYIAALQLRANIYPTRETLARGRGGVNALCRWCGKVRETVPHISGQCYKTKNARIKRHNRVVSAVVDKVGKLGWKAMIEPHLRNSKGELRKPDIIFIKGDTAVVVDVTVRWEDNAGSLEQAHSEKVAYYLELEEEIKNLTGGKNIHFFGFVLGARGKWSEGNNDLLQLLGMDRSKNFKESICRLVLYSTIGMMAIFSDR

SEQ ID NO: 9244 - protein, 1241 aa, Chrysemys picta
MEKSNLYFYTGLALDRVNNAPAVGFDAPADSVKYIRGVIRVAGPMDKMVWTIMKSHENESENQVLPVEHGEEVEENVCDDHGEEILSILPMVFTRDTFNDLTMDSFNPDFKYLSTFDDPYVRESSTDFNRDRNKDLNSIGSNINILESSSWKDGVFYLEYPVDSFNCPICPQILPTFGKWAKHINVVHKSKAIRVVCSKCGKSSQYHNIACHYPKCIPKKADTPMKSHTCSVCGLGFHTRSGLSQHCRHRHPAVRNEQRKEDMAAKSKIKEGSTRSRIWTKDEVAQLIQLERKYIGKRNINKCIESEMRTKTNKQISDKRRELAKKKLVVTGDREEVTEVEDIRVNILEIPPPRERIFPLKGHPEVDLVEKICKRGKQSREGREIINSLGEIEGLLKEDLTKALGWAMLEKLCYSLVEGQDPRNESQIELKNKGKGKIRKEGRRKQFNAIRRYATKKAKYKFYQQLFDKDRRRLTRIIMGEPDKAKCAIPMKEIEEYYVNILGTIGHGNMIGWPSSTENADNDILMSPISVDEIRIALTEIRKDSAPGPDKVKVSNLWDIFNLDSLILTKIFNIWFLNRQVPDEFKKNRTILIPKTQDEEEMKKLTSWRPLTIGSVWIRIYTKILAKRLVETVKICSRQKGFISAPGCEENIAILDNLIKGAKRNGNEIAIVFVDLAKAFDSVGHGHIIAGLRRFGIDEHFIDIIRDLYDNCTTRVWVGDEATESILIRRGVKQGDPLSPILFNIAMDPLLTRLEVEGSGFYVKGNSVTSLAFADDVAILSSSYKGMIKNLGILEEFCKNTNLSVNVKKTKGFHILTKHKTYVVNPKDNWQIGSEKIEYVQPGDFEKYLGARIDPWIGVGGPVLKEKLKDWSENLIKAPLKPAQKILILQTYILPKLFYNLLLIEPPFNLLDDLDVLVRKIVKEILHLPQCTTDGIFYSRGRDGGLALTKFSVQIPNMLIRKWRRHIVSRDDWMDLSYLYAGENLVDKILSFSAVTSHPKKWREEEFLRWSELRCQGIGIKYFKNDLISNSIFRNSSKVKSSAYIAALQLRANIYPTRETLARGRGGVNALCRWCGKVRETVPHISGQCYKTKNARIKRHNRVVSAVVDKVGKLGWKAMIEPHLRNSKGELRKPDIIFIKGDTAVVVDVTVRWEDNAGSLEQAHSEKVAYYLELEEEIKNLTGGKNIHFFGFVLGARGKWSEGNNDLLQLLGMDRSKNFKESICRLVLYSTIGMMAIFSDR

SEQ ID NO: 9245 - protein, 1260 aa, Terrapene carolina
MEKSNLYFYTGLALDRVNNAPAVGFDAPADSVKYIRGVIRVAGPMDKMVWTIMKSHEHESENQVLPVEHGEEVEENVCDDHGEEILSILPMVFTRDTFNDLTMESFNPDFKYLSTFDDPYVSESGYLNAHLVNGSSLLNSFRPSTDFNRDRNKDLNSTGSNINILESSSWKDGVFYLEYPVDSFNCPICPQILPTFGKWAKHINVVHKSKAIRDVCSKCGKSSQYHNIACHYPKCIPKKADTPMKSHTCSVCGLGFHTRSGLSQHCRHRHPAVRNEQRKEDMAAKSKIKEGSTRSRIWTKDEVAQLIQLERKYIGKRNINKCIESEMRTKTNKQISDKRRELAKKKLVVTGDREEVTEVEDIRVNILEIPPPRERIFPLKGHPEVDLVEKICKRGKQSREGREIINSLGEIEGLLKEDLTKALGWAMLEKLCYSLVEGKDPRNESQIELRNKGKGKMRKEGRRKQFNAIRRYATKKAKYKFYQQLFDKDRRRLTRIIMGEPDKAKCAIPMKEIEEYYVNILGTIGHGNMIGWPSSTENADNDILMSPISVDEIRIALREIRKDSAPGPDKVKVSNLWDIFNLDSLILTKIFNIWFLNRQVPDEFKKNRTILIPKTQDEEEMKKLTSWRPLTIGTVWIRIYTKILAKRLVETVKICSRQKGFISAPGCEENIAILDNLIKGAKRNGNEIAIVFVDLAKAFDSVGHGHIIAGLRRFGIDEHFIDIIRDLYDNCTTRVWVGDEATESILIRRGVKQGDPLSPILFNIAMDPLLTRLEVEGSGFYVKGNGVTSLAFADDVAILSSSYKGMIKNLGILEEFCKNTNLSVNVKKTKGFHILTKHKTYVVNPKDNWQIGSEEIEYVQPGDFEKYLGARIDPWIGVEGPVLKEKLKDWSENLIKAPLKPAQKILILQTYILPKLFYNLLLIEPPFNLLDDLDVLVRKIVKEILHLPQCTTDGIFYSRGRDGGLALTKFSVQIPNMLIRKWRRHIVSRDDWMDLSYLYAGENLVDKILSFSAVTSHPKKWREEEFLRWSELRCQGIGIKYFKNDLISNSIFRNSSKVKSSAYIAALQLRANIYPTRETLARGRGGVNALCRWCGKVRETVPHISGQCYKTKNARIKRHNRVVSAVVDKVGKLGWKAMIEPHLRNSKGELRKPDIIFIKGDTAVVVDVTVRWEDNAGSLEQAHSEKVAYYLELEEEIKNLTGGKNIPFFGFVLGARGKWSEGNNDLLQLLGMDRSKNFKESICRLVLYSTIGMMAIFSDR

SEQ ID NO: 9246 - protein, 1260 aa, Terrapene carolina
MEKSNLYFYTGLALDRVNNAPAVGFDAPADSVKYIRGVIRVAGPMDKMVWTIMKSHEHESENQVLPVEHGEEVEENVCDDHGEEILSILPMVFTRDTFNDLTMESFNPDFKYLSTFDDPYVSESGYLNAHLVNGSSLLNSFRPSTDFNRDRNKDLNSTGSNINILESSSWKDGVFYLEYPVDSFNCPICPQILPTFGKWAKHINVVHKSKAIRVVCSKCGKSSQYHNIACHYPKCIPKKADTPMKSHTCSVCGLGFHTRSGLSQHCRHRHPAVRNEQRKEDMAAKSKIKEGSTRSRIWTKDEVAQLIQLERKYIGKRNINKCIESEMRTKTNKQISDKRRELAKKKLVVTGDREEVTEVEDIRVNILEIPPPRERIFPLKGHPEVDLVEKICKRGKQSREGREIINSLGEIEGLLKEDLTKALGWAMLEKLCYSLVEGKDPRNESQIELRNKGKGKMRKEGRRKQFNAIRRYATKKAKYKFYQQLFDKDRRRLTRIIMGEPDKAKCAIPMKEIEEYYVNILGTIGHGNMIGWPSSTENADNDILMSPISVDEIRIALREIRKDSAPGPDKVKVSNLWDIFNLDSLILTKIFNIWFLNRQVPDEFKKNRTILIPKTQDEEEMKKLTSWRPLTIGSVWIRIYTKILAKRLVETVKICSRQKGFISAPGCEENIAILDNLIKGAKRNGNEIAIVFVDLAKAFDSVGHGHIIAGLRRFGIDEHFIDIIRDLYDNCTTRVWVGDEATESILIRRGVKQGDPLSPILFNIAMDPLLTRLEVEGSGFYVKGNGVTSLAFADDVAILSSSYKGMIKNLGILEEFCKNTNLSVNVKKTKGFHILTKHKTYVVNPKDNWQIGSEEIEYVQPGDFEKYLGARIDPWIGVGGPVLKEKLKDWSENLIKAPLKPAQKILILQTYILPKLFYNLLLIEPPFNLLDDLDVLVRKIVKEILHLPQCITDGIFYSRGRDGGLALTKFSVQIPNMLIRKWRRHIVSRDDWMDLSYLYAGENLVDKILSFSAVTSHPKKWREEEFLRWSELRCQGIGIKYFKNDLISNSIFRNSSKVKSSAYIAALQLRANIYPTRETLARGRGGVNALCRWCGKVRETVPHISGQCYKTKNARIKRHNRVVSAVVDKVGKLGWKAMIEPYLRNSKGELRKPDIIFIKGDTAVVVDVTVRWEDNAGSLEQAHSEKVAYYLELEEEIKNLTGGKNIHFFGFVLGARGKWSEGNNDLLQLLGMDRSKNFKESICRLVLYSTIGMMAIFSDR

SEQ ID NO: 9247 - protein, 934 aa, Terrapene carolina
MRTKTNKQISDKRRELAKKKLVVTGDREEVTEVEDIRVNILEIPPPRERIFPLKGHPEVDLVEKICKRGKQSREGREIINSLGEIEGLLKEDLTKALGWAMLEKLCYSLVEGKDPRNESQIELRNKGKRKMRKEGRRKQFNAIRRYATKKAKYKFYQQLFDKDRRRLTRIIMGEPDKAKCAIPMKEIEEYYVNILGTIGHGNMIGWPSSTENADNDILMSPISVDEIRIALREIRKDSAPGPDKVKVSNLWDIFNLDSLILTKIFNIWFLNRQVPDEFKKNRTILIPKTQDEEEMKKLTSWRPLTIGSVWIRIYTKILAKRLVETVKICSRQKGFISAPGCEENIAILDNLIKEAKRNGNEIAIVFVDLAKAFDSVGHGHIIAGLRRFGIDEHFIDIIRDLYDNCTTRVWVGDEATESILIRRGVKQGDLLSPILFNIAMDPLLTRLEVEGSGFYVKGNGVTSLAFADDVAILSSSYKGMIKNLGILEEFCKNTNLSVNVKKMKGFHILTKHKTYVVNPKDNWQIGSEEIEYVRPGDFEKYLGARIDPWIGVGGPVLKEKLKDWSENLIKAPLKPAQKILILQTYILPKLFYNLLLIEPPFNLLDDLDVLVRKIVKEILHLPQCITDGIFYSRGRDGGLALTKFSVQIPNMLIRKWRRHIVSRDDWMDLSYLYAGENLVDKILSFSAVTSHPKKWREEEFLRWSELRCQGIGIKYFKNDLISNSIFRNSSKVKSSAYIAALQLRANIYPTKETLARGRGGVNALCRWCGKVRETVPHISGQCYKTKNARIKRHNRVVSAVVDKVGKLGWKAMIEPHLRNSKGELRKPDIIFIKGDTAVVVDVTVRWEDNAGSLEQAHSEKVAYYLELEEEIKNLTGGKNIHFFGFVLGARGKWSEGNNDLLQLLGMDRSKNFKESICRLVLYSTIGMMAIFSDR

SEQ ID NO: 9248 - protein, 979 aa, Trachemys scripta
MAAKSKIKEGSTRSRIWTKDEVAQLIQLERKYIGKRNINKCIESEMRTKTNKQISDKRRELAKKKLVVTGDREEVTEVEDIRVNILEIPPPRERIFPLKGHPEVDLVEKICKRGKQSREGREIINSLGEIEGLLKEDLTKALGWAMLEKLCYSLVEGQDPRNESQIELRNKGKGKIRKEGRRKQFNAIRRYATKKAKYKFYQQLFDKDRRRLTRIIMGEPDKAKCAIPMKEIEEYYVNILGTIGHGNMIGWPSSTENADNDILMSPISVDEIRIALTEIRKDSAPGPDKVKVSNLWDIFNLDSLILTKIFNIWFLNRQVPDEFKKNRTILIPKTQDEEEMKKLTSWRPLTIGSVWIRLYTKILAKRLVETVKICSRQKGFISAPGCEENIAILDNLIKGAKRNGNEIAIVFVDLAKAFDSVGHGHIIAGLRRFGIDEHFIDIIRDLYDNCTTRVWVGDEATESILIRRGVKQGDPLSPILFNIAMDPLLTRLEVEGSGFYVKGNSVTSLAFADDVAILSSSYKGMIKNLGILEEFCKNTNLSVNVKKTKGFHILTKHKTYVVNPKDNWQIVSEKIEYVQPGDFEKYLGARIDPWIGVGGPVLKEKLKDWSENLIKAPLKPAQKILILQTYILPKLFYNLLLIEPPFNLLDDLDVLVRKIVKEILHLPQCTTDGIFYSRGRDGGLALTKFSVQIPNMLIRKWRRHIVSRDDWMDLSYLYAGENLVDKILSFSAVTSHPKKWREEDFLRWSELRCQGIGIKYFKNDLISNSIFRNSSKVKSSAYIAALQLRANIYPTRETLARGRGGVNALCRWCGKVRETVPHISGQCYKTKNARIKRHNRVVAAVVDKVGKLGWKAMIEPHLRNSKGELRKPDIIFIKGDTAVVVDVTVRWEDNAGSLEQAHSEKVAYYLELEEEIKNLTGGKNIHFFGFVLGARGKWSEGNNDLLQLLGMDRSKNFKESICRLVLYSTIGMMAIFSDR

SEQ ID NO: 9249 - protein, 1259 aa, Actinemys marmorata
MEKSNLYFYTGLALDRVNNAPAVGFDAPADSVKYIRGVIRVAGPMDKRVWTIMKSHEHESENQVLPVEHGEEVEENVCDDHGEEILSILPMVFTRDTFNDLTMESFNPDFKYLSTFDPYVRESGYLNAHLVNGSSLLNSFRPSTDFNRDRNKDLNSTGSNINILESSSWKDGVFYLEYPVDSFNCPICPQILPTFGKWAKHINVVHKSKAIRVVCSKCGKSSQYHNIACHYPKCIPKKADTPMKSHTCSVCGLGFHTRSGLSQHCRHRHPAVRNEQRKEDMAAKSKIKEGSTRSRIWTKDEVAQLIQLERKYIGKRNINKCIESEMRTKTNKQISDKRRELAKKKLVVTGDREEVTEVEDIRVNILEIPPPRERIFPLKGHPEVDLVEKICKRGKQSREGREIINSLGEIEGLLKEDLTKALGWAMLEKLCYSLVEGKDPRNESQIELRNKGKGKMRKEGRRKQFNAIRRYATKKAKYKFYQQLFDKDRRRLTRIIMGEPDKAKCAIPMKEIEEYYVNILGTIGHGNMIGWPSSTENADNDILMSPISVDEIRIALREIRKDSAPGPDKVKVSNLWDIFNLDSLILTKIFNIWFLNRQVPDEFKKNRTILIPKTQDEEEMKKLTSWRPLTIGSVWIRIYTKILAKRLVETVKICSRQKGFIFAPGCEENIAILDNLIKGAKRNGNEIAIVFVDLAKAFDSVGHGHIIAGLRRFGIDEHFIDIIRDLYDNCTTRVWVGDEATESILIRRGVKQGDPLSPILFNIAMDPLLTRLEVEGSGFYVKGNSVTSLVFADDVAILSSSYKGMIKNLGILEEFCKNTNLSVNVKKTKGFHILTKHKTYVVNPKDNWQIGSEEIEYVQPGDFEKYLGARIDPWIGVGGPVLKEKLKDWSENLIKAPLKPAQKILILQTYILPKLFYNLLLIEPPFNLLDDLDVLVRKIVKEILHLPQCTTDGIFYSRGRDGGLALTKFSVQIPNMLIRKWRRHIVSRDDWMDLSYLYAGENLVDKILSFSAVTSHPKKWREEEFLRWSELRCQGIGIKYFKNDLISNSIFRNSSKVKSSAYIAALQLRANIYPTRETLARGRGGLNALCRWCGKVRETVPHISGQCYKTKNAGIKRHNRVVSAVVDKVGKLGWKAMIEPHLRNSKGELRKPDIIFIKGDTAVVVDVTVRWEDNAGSLEQAHSEKVAYYLELEEEIKNLTGGKNIHFFGFVLGARGKWSEGNYDLLQLLGMDRSKNFKESICRLVLYSTIGMMAIFSDR

SEQ ID NO: 9250 - protein, 1216 aa, Actinemys marmorata
MDKMVWTIMKSHEHESENQVLPVEHGEEVEENVCDDHGEEILSILPMVFTRDTFNDLTMESFNPDFKYLSTFDDPYVRESGYLNAHLVNGSSLLNSFRPSTDFNRDRNKDLNSTGSNINILESSSWKDGVFYLEYPVDSFNCPICPQILPTFGKWAKHINVVHKSKAMRVVCSKCGKSSQYHNIACHYPKCIPKKADTPMKSHTCSVCGLGFHTRSGLSQHCRHRHPAVRNEQRKEDMAAKSKIKEGSTRSRIWTKDEVAQLIQLERKYIGERNINKCIESEMRTKTNKQISDKRRELAKKKIVVTGDREEVTEVEDIRVNILEIPPPRERIFPLKGHPEVDLVEKICKRGKQSREGREIINSLGEIEGLLKEDLTKALGWAMLEKLCYSLVEGKDPRNESQIELRNKGKGKMRKEGRRKQFNAIRRYATKKAKYKFYQQLFDKDRRRLTRIIMGEPDKAKCAIPMKEIEEYYVNILGTIGHGNMIGWPSSTENADNDILMSPISVDEIRIALREIRKDSAPGPDKVKVSNLWDIFNLDSLILTKFFNIWFLNRQVPDEFKKNRTILIPKTQDEEEMKKLTSWRPLTIGSVWIRIYTKILAKRLVETVKLCSRQKGFISAPGCEENIAILDNLIKGAKRNGNEIAIVFVDLAKAFDSVGHGHIIAGLRRFGIDEHFIDIIRDLYDNCTTRVWVSDEATESILIRRGVKQGDPLSPILFNIAMDPLLTRLEVEGSGFYVKGNSVTSWAFADDVAILSSSYKGMIKNFGILEEFCKNTNLSVNVKKTKGFHILTKHKTYVVNPKDNWQIGSEEIEYVQPGDFEKYLGARIDPWIGVGGPVLKEKLKDWSENLIKAPLKPAQKILILQTYILPKLFYNLLLIEPPFNLLDDLDVLVRKIVKEILHLPQCTTDGIFYSRGRDGGLALTKFSVQIPNMLIRKWRRHIVSRDDWMDLSYLYAGENLVDKILSFSAVTSHPKKWREEEFLRWSELRCQGIGIKYFKNDLISNSIFRNSSKVKSSAYIAALQLRANIYPTRETLARGRGGVNALCRWCGKVRETVPHISGQCYKTKNARIKRHNRVVSAVVDKVGKLGWKAMIEPHLRNSKGELRKPDIIFIKGDTAVVVDVTVRWEDNAGSLEQAHSEKVAYYLELEEEIKNVTGGKNIHFFGFVLGARGKWSEGNNDLLQLLGMDRSKNFKESICRLVLYSTIGMMAIFSDR

SEQ ID NO: 9251 - protein, 1107 aa, Chrysemys picta
MEKSNLYFYTGLALDRVNNAPAVGFDAPADSVKYIRGVIRVAGPMDKMVWTIMKSHENESENQVLPVEHGEEVEENVCDDHGEEILSILPMVFTRDTFNDLTMDSFNPDFKYLSTFDDPYVRESSTDFNRDRNKDLNSIGSNINILESSSWKDGVFYLEYPVDSFNCPICPQILPTFGKWAKHINVVHKSKAIRVVCSKCGKSSQYHNIACHYPKCIPKKADTPMKSHTCSVCELGFHTRSGLSQHCRHRHPAVRNEQRKEDMAAKSKIKEGSTRSRIWTKDEVAQLIQLERKYIGKRNINKCIESEMRTKTNKQISDKRRELAKKKLVVTGDREEVTEVEDIRVNILEIPPPRERIFPLKGHPEVDLVEKICKRGKQSREGRDIINSLGEIEGLLKEDLTKALGWAMLEKLCYSLVEGQDPRNESQIELRNKGKGKIRKEGRRKQFNAIRRYATKKAKYKFYQQLFDKDRRRLTRIIMGEPDKAKCAIPMKEIEEYYVNILGTIGHGNMRGWPSSTENADNDILMSPISVDEIRIALTEIRKDSAPGPDKVKVSNLWDIFNLDSLILTKIFNIWFLNRQVPDEFKKNRTILIPKTQDEEEMKKLTSWRPLTIGSVWIRIYTKILAKRLVETVKICSRQKGFISAPGCEENIAILDNLIKGAKRNGNEIAIVFVDLAKAFDSVGHGHIIAGLRRFGIDEHFIDIIRDLYDNCTTRVWVGDEATESILIRRGVKQGDPLSPILFNIAMDPLLTRLEVEGSGFYVKGNSVTSLAFADDVAILSSSYKGMIKNLGILEEFCKNTNLSVNVKKTKGFHILTKHKTYVVNPKDNWQIGSEKIEYVQPGDFEKYLGARIDPWIGVGGPVLKEKLKDWSENLIKAPLKPAPKILILQTYILPKLFYNLLLIEPPFNLLDDLDVLVRKIVKEILHLPQCTTDGIFYSRGRDGGLALTKFSVQIPNMLIRKWRRHIVSRDDWMDLSYLYAGENLVDKILSFSAVTSHPKKWREEEFLRWSELRCQGIGIKYFKNDLISNSIFRNSSKVKSSAYIAALQLRANIYPTRETLARGRGGVNALCRWCGKVRETVPHISGQCYKTKNARIKRHNRVVSAV

SEQ ID NO: 9252 - protein, 1241 aa, Chrysemys picta
MEKGNLYFYTGLALDRVNNAPAVGFDAPADSVKYIRGVIRVAGPMDKMVWTIMKSHENESENQVLPVEHGEEVEENVCDDHGEEILSILPMVFTRDTFNDLTMDSFNPDFKYLSTFDDPYVRESSTDFNRDCNKDLNSIGSNINILESSSWKDGVFYLEYPVDSFNCPICPQILPTFGKWAKHINVVHKSKAIRVVCSKCGKSSQYHNIACHYPKCIPKKADTPMKSHTCSVCGLGFHTRSGLSQHCRHRHPAVRNEQRKEDMDAKSKIKEGSTRSRIWTKDEVAQLIQLERKYIGKRNINKCIESEMRTKTNKQISDKRRELAKKKLVVTGDREEVTEVEDIRVNILEIPPPRERIFPLKGHPEVDLVEKICKRGKQSREGREIINSLGEIEGLLKEDLTKALGWAMLEKLCYSLVEGQDPRNESQIELRNKGKGKIRKEGRRKQFNAIRRYATKKAKYKFYQQLFDKDRRRLTRIIMGEPDKAKCAIPMKEIEEYYVNILGTIGHGNMRGWPSSTENADNDILMSPISVDEIRIALTEIRKDSAPGPDKVKVSNLWDIFNLDSLILTKIFNIWFLNRQVPDEFKKNRTILIPKTQDEEEMKKLTSWRPLTIGSVWIRIYTKILAKRLVETVKICSRQKGFISAPGCEENIAILDNLIKGAKRNGNEIAIVFVDLAKAFDSVGHGHIIAGLRRFGIDEHFIDIIRDLYDNCTTRVWVGDEATESILIRRGVKQGDPLSPILFNIAMDPLLTRLEVEGSGFYVKGNSVTSLAFADDVAILSSSYKGMIKNLGILEEFCKNTNLSVNVKKTKGFHILTKHKTYVVNPKDNWQIGSEKIEYVQPGDFEKYLGARIDPWIGVGGPVLKEKLKDWSENLIKAPLKPAQKILILQTYILPKLFYNLLLIEPPFNLLDDLDVLVRKIVKEILHLPQCTTDGIFYSRGRDGGLALTKFSVQIPNMLIRKWRRHIVSRDDWMDLSYLYAGENLVDKILSFSAVTSHPKKWREEEFLRWSELRCQGIGIKYFKNDLISNSIFRNSSKVKSSAYIAALQLRANIYPTRETLARGRGGVNALCRWCGKVRETVPHISGQCYKTKNARIKRHNRVVSAVVDKVGKLGWKAMIEPHLRNSKGELRKPDIIFIKGDTAVVVDVTVRWEDNAGSLEQAHSEKVAYYLELEEEIKNLTGGKNIHFFGFVLGARGKWSEGNNDLLQLLGMDRSKNFKESICRLVLYSTIGMMAIFSDR

SEQ ID NO: 9253 - protein, 1241 aa, Chrysemys picta
MEKSNLYFYTGLALDRVNNAPAVGFDAPADSVKYIRGVIRVAGPMDKMVWTIMKSHENESENQVLPVEHGEEVEENVCDDHGEEILSILPMVFTRDTFNDLTMDSFNPDFKYLSTFDDPYVRESSTDFNRDRNKDLNSIGSNINILESSSWKDGVFYLEYPVDSFNCPICPQILPTFGKWAKHINVVHKSKAIRVVCSKCGKSSQYHNIACHYPKCIPKKADTPMKSHTCSVCGLGFHTRSGLSQHCRHRHPAVRNEQRKEDMAAKSKIKEGSTRSRIWTKDEVAQLIQLERKYIGKRNINKCIESEMRTKTNKQISDKRRELAKKKLVVTGDREEVTEVEDIRVNILEIPPPRERIFPLKGHPEVDLVEKICKRGKQSREGREIIKSLGEIEGLLKEDLTKALGWAMLEKLCYSLVEGQDPRNESQIELRNKGKGKIRKEGRRKQFNAIRRYATKKAKYKFYQQLFDKDRRRLTRIIMGEPDKAKCAIPMKEIEEYYVNILGTIGHGNMIGWPSSTENADNDILMSPISVDEIRIALTEIRKDSAPGPDKVKVSNLWDIFNLDSLILTKIFNIWFLNRQVPDEFKKNRTILIPKTQDEEEMKKLTSWRPLTIGSVWIRIYTKILAKRLVETVKICSRQKGFISAPGCEENIAILDNLIKGAKRNGNEIAIVFVDLAKAFDSVGHGHIIAGLRRFGIDEHFIDIIRDLYDNCTTRVWVGDEATESILIRRGVKQGDPLSPILFNIAMDPHLTRLEVEGSGFYVKGNSVTSLAFADDVAILSSSYKGMIKNLGILEEFCKNTNLSVNVKKTKGFHILTKHKTYVVNPKDNWQIGSEKIEYVQPGDFEKYLGARIDPWIGVGGPVLKEKLKDWSENLIKAPLKPAQKILILQTYILPKLFYNLLLIEPPFNLLDDLDVLVRKIVKEILHLPQCTTDGIFYSRGRDGGLALTKFSVQIPNMLIRKWRRHIVSRDDWMDLSYLYAGENLVDKILSFSAVTSHPKKWREEEFLRWSELRCQGIGIKYFKNDLISNSIFRNSSKVKSSAYIAALQLRANIYPTRETLARGRGGVNALCRWCGKVRETVPHISGQCYKTKNARIKRHNRVVSAVVDKVGKLGWKAMIEPHLRNSKGELRKPDIIFIKGDTAVVVDVTVRWEDNAGSLEQAHSEKVAYYLELEEEIKNLTGGKNIHFFGFVLGARGKWSEGNNDLLQLLGMDRSKNFKESICRLVLYSTIGMMAIFSDR

SEQ ID NO: 9254 - protein, 1260 aa, Terrapene carolina
MEKSNLYFYTGLALDRVNNAPAVGFDAPADSVKYIRGVIRVAGPMDKMVWTIMKSHEHESENQVLPVEHGEEVEENVCDDHGEEILSILPMVFTRDTFNDLTMESFNPDFKYLSTFDDPYVSESGYLNAHLVNGSSLLNSFRPSTDFNRDRNKDLNSTGSNINILESSSWKDGVFYLEYPVDSFNCPICPQILPTFGKWAKHINVVHKSKAIRVVCSKCGKSSQYHNIACHYPKCIPKKADTPMKSHTCSVCGLGFHTRSGLSQHCRHRHPAVRNEQRKEDMAAKSKIKEGSTRSRIWTKDEVAQLIQLERKYIGKRNINKCIESEMRTKTNKQISDKRRELAKKKLVVTGDREEVTEVEDIRVNILEIPPPRERIFPLKGHPEVDLVEKICKWGKQSREGREIINSLGEIEGLLKEDLTKALGWAMLEKVCYSLVEGKDPRNESQIELRNKGKGKMRKEGRRKQFNAIRRYATKKAKYKFYQQLFDKDRRRLTRIIMGEPDKAKCAIPMKEIEEYYVNILGTIGHGNMIGWPSSTENADNDILMSPISVDEIRIALREIRKDSAPGPDKVKVSNLWDIFNLDSLILTKIFNIWFLNRQVPDEFKKNRTILIPKTQDEEEMKKLTSWRPLTIGSVWIRIYTKILAKRLVETVKICSRQKGFISAPGCEENIAILDNLIKGAKRNGNEIAIVFVDLAKAFDSVGHGHIIAGLRRFGIDEHFIDIIRDLYDNCTTRVWVGDEATESILIRRGVKQGDPLSPILFNIAMDPLLTRLEVEGSGFYVKGNGVTSLAFADDVAILSSSYKGMIKNLGILEEFCKNTNLSVNVKKTKGFHILTKHKTYVVNPKDNWQIGSEEIEYVQPGDFEKYLGARIDPWIGVGGPVLKEKLKDWSENLIKAPLKPAQKILILQTYILPKLFYNLLLIEPPFNLLDDLDVLVRKIVKEILHLPQCTTDGIFYSRGRDGGLALTKFSVQIPNMLIRKWRRHIVSRDDWMDLSYLYAGENLVDKILSFSAVTSHPKKWREEEFLRWSELRCQGIGIKYFKNDLISNSIFRNSTKVKSSAYIAALQLRANIYPTRETLARGRGGVNALCRWCGKVRETVPHISGQCYKTKNARIKRHNRVVSAVVDKIGKLGWKAMIEPHLRNSKGELRKPDIIFIKGDTAVVVDVTVRWEDNAGSLEQAHSEKVAYYLELEEEIKNLTGGKNIHFFGFVLGARGKWSEGNNDLLQLLGMDRSKNFKESICRLVLYSTIGMMAIFSDR

SEQ ID NO: 9255 - protein, 1017 aa, Terrapene carolina
MKSHTCSVCGLGFHTRSGLSQHCRHRHPAVRNEQRKEDMAAKSKIKEGSTRSRIWTKDEVAQLIQLERKYIGKRNINKCIESEMRTKTNKQISDKRRELAKKKLVVTGDREEVTEVEDIRVNILEIPPPRERIFPLKGHPEVDLVEKICKRGKQSREGREIINSLGEIEGLLKEDLTKALGWAMLEKLCYSLVEGKDPRNESQIELRNKGKGKMRKEGRRKQFNAIRRYATKKAKYKFYQQLFDKDRRRLTRIIMGEPDKAKCAIPMKEIEEYYVNILGTIGHGNMIGWPSSTENADNDILMSPISVDEIRIALREIRKDSAPGPDKVKVSNLWDIFNLDSLILTKIFNIWFLNRQVPDEFKKNRTILIPKTQDEEEMKKLTSWRPLTIGSVWIRIYTKILAKRLVETVKICSRQKGFISAPGCEENIAILDNLIKGAKRNGNEIAIVFVDLAKAFDSVGHGHIIAGLRRFGIDEHFIDIIRDLYDNCTTRVWVGDEATESILIRRGVKQGDPLSPILFNIAMDPLLTRLEVEGSGFYVKGNGVTSLAFADDVAILSSSYKGMIKNLGILEEFCKNTNLSVNVKKTKGFHILTKHKTYVVNPKDNWQIGSEEIEYVQPGDFEKYLGARIDPWIGVGGPVLKEKLKDWSENLIKAPLKPAPKILILQTYILPKLFYNLLLIEPPFNLLDDLDVLVRKIVKEILHLPQCTTDGIFYSRGRDGGLALTKFSVQIPNMLIRKWRRHIVSRDDWMDLSYLYARENLVDKILSFSAVTSHPKKWREEEFLRWSELRCQGIGIKYFKNDLISNSIFRNSSKVKSSAYIAALQLRANIYPTRETLARGRGGVNALCRWCGKVRETVPHISGQCYKTKNARIKRHNRVVSAVVDKVGKLGWKAMIEPHLRNSKGELRKPDIIFIKGDTAVVVDVTVRWEDNAGSLEQAHSEKVAYYLELEEEIKNLTGGKNIHFFGFVLGARGKWSEGNNDLLQLLGMDRSKNFKESICRLVLYSTIGMMAIFSDR

SEQ ID NO: 9256 - protein, 1017 aa, Terrapene carolina
MKSHTCSVCGLGFHTRSGLSQHCRHRHPAVRNEQRKEDMAAKSKIKEGSTRSRIWTKDEVAQLIQLERKYIGKRNIIKCIESEMRTKTNKQISDKRRELAKKKLVVTGDREEVTEVEDIRVNILEIPPPRERIFPLKGHPEVDLVEKICKQGKQSREGREIINSLGEIEGLLKEDLTKALGWAMLEKLCYSLVEGKDPRNESQIELRNKGKGKMRKEGRRKQFNAIRRYATKKAKYKFYQQLFDKDRRRLTRIIMGEPDKAKCAIPMKEIEEYYVNILGTIGHGNMIGWLSSTENADNDILMSPISVDEIRIALREKRKDSALGPDKVKVSNLWDIFNLDSLILTKIFNIWFLNRQVPDEFKKNRTILIPKTQDEEEMKKLTSWRPLTIGSVWIRIYTKILAKRLVETVKICSRQKGFISAPGCEENIAILDNLIKGAKRNGNEIAIVFVDLAKAFDSVGHGHIIAGLRRFGIDEHFIDIIRDLYDNCTTRVWVGDEATESILIRRGVKQGDPLSPILFNIAMDPLLTRLEVEGSGFYVKGNGVTSLAFADDVAILSSSYKGMIKNLGILEEFCKNTNLSVNVKKTKGFHILTKHKTYVVNPKDNWQIGSEEIEYVQPGDFEKYLGARIDPWIGVGGPVLKEKLKDWSENLIKAPLKPAQKILILQTYILPKLFYNLLLIEPPFNLLDDLDVLVRKIVKEILHLPQCTTDGIFYSRGRDGGLALTKFSVQIPNMLIRKWRRHIVSRDDWMDLSYLYAEENLVDKILSFSAVTSHPKKWREEEFLRWSELRCQGIGIKYFKNDLISNSIFRNSSKVKSSAYIAALQLRANIYPTRETLARGRGGVNALCRWCGKVRETVPHISGQCYKTKNARIKRHNRVVSAVVDKVGKLGWKAMIEPHLRNSKGELRKPDIIFIKGDTAVVVDVTVRWEDNAGSLEQAHSEKVAYYLELEEEIKNLTGGKNIHFFGFVLGARGKWSEGNNDLLQLLGMDRSKNFKESICRLVLYSTIGMMAIFSDR

SEQ ID NO: 9257 - protein, 940 aa, Cuora amboinensis
MGKRNINKCIESELKTKTNKQISDKRRELAKKRQETAQIEEIEVEKIVDSILEVPPPRERILPLRRDSEVDPRGLVSRWGKQSREGKDILNGLRVVEELLQEDSTKRLGWAELEKICISLVDGRKLGEGEQVEIGIDGRRRKGIGNGRKKQSNALRRYATQKAKYRFYQQLFDKDRRRLARIIMGEPDKVNCEIPMEEIERYFKDILGTIGHGHIVGWPSSMERADNDLLMSPISVDEVRSVLREIKKDSAPGPDKVKVSDLRDIFNIDSLIITRIFNIWFLNGQVPDVFKENRTILLPKTDDVEELRKLTSWRPLTIGSVWVRLYTKILAKRLSEAVRICDRQKGFIAAPGCEENIAILDNLIKRAKRKGDEIAIVFIDLAKAFDSVGHGHIIAGLKRFDIDERFIGIVRDLYFNCTTRVWVGDKFTESILIRRGVKQGDPLSPILFNTALDPFLTRLELEGSGFYVQGQSVTSLAFADDMAILSGSYLGMIKNLSILQNFCRNTNLRINVSKTKGFHIWPKHKTYLVNPKSRWTIGNEEIQYVQPGEFEKYLGARIDPWIGVGGSLLKEKLVVWSESLSRAPLKPAQKLLILQTYVLPRLFYNLLLMEPPFYILDYLDVLVRKIVKEILHLPQCTTDGLFYSRRRDGGLALTKFSVQIPNMLLRKWRRHIVSKDSWVDLSYVYAGENLVDKIIVFSAATPHPRKWREEELLRWTELRCQGIGVKYFRNDVISNSIFRNSDKVKSSAYIAALQLRANIYPTRETLARGRGGVTALCRWCGKVKETIPHISGQCYKTKEMRIKRHNRVVSALVDRVVKVGWKAVVEPHLRNEKGELRKPDIVFTKGDTAVVVDVTVRWEDNDGSLEQAHREKVTYYLELENKIKDLTGVNNIHFFGFVVGVRGKWSEGNDELLQVLGIDRGKNFKESICRLVFYSTQGRL

SEQ ID NO: 9258 - protein, 1260 aa, Actinemys marmorata
MEKSNLYFYTGLALDRVNNAPAVGFDAPADSVKYIRGVIRVAGPMDKMVWTIMKSHEHESENQVLPVEHGEEVEENVCDDHGEEILSILPMVFTRDSFNDLTMESFNPDFKYLSTFDDPYVRESGYLNAHLVNGSSLLNSFRPSTDFNRDRNKDLNSTGSNINILESSSWKDGFFYLEYPVDSFNCPVCPQILPTFGKWAKHINVVHKSKTIRVVCSKCGKSSQYHNIACHYPKCIPKKADTPMKSHTCSVCGLGFHTRSGLSQHCRHRHPAVRNEQRKEDMAAKSKIKEESTRSRIWTKDEIAQLIQLERKYIGKRNINKCIESEMRTKTNKQISDKRRELAKKKLVVTGDREEVTEVEDIRVNILEIPPPRERIFPLKGHPEVDLVEKICKRGKQSREGREIINSLGEIEGLLKEDLTKARGWAMLEKLCYSLVEGKDPRNESQIELRNKGKGKMRKEGRRKQFNAIRRYATKKAKYKFYQQLFDKDRRRLTRIIMGEPDKAKCAIPMKEIEEYYVNILGTIGHGNMIGWPSSTENADNDILMSPISVDEIRIALREIRKDSAPGPDKVKVSNLWDIFNLDSLILTKIFNIWFLNRQVPDEFKKNRTILIPKTQDEEEMKKLTSWRPLTIGSVWIRIYSKILAKRLVETVKICSRQKGFISAPGCEENIAILDNLIKGAKRNGNEIAIVFVDLAKAFDSVGHGHIIAGLRRFGIDEHFIDIIRDLYDNCTTRVWVGDEATESILIRRGVKQGDPLSPILFNIAMDPLLTRLEVEGSGFYVKGNSVTSLAFADDVAILSSSYKGMIKNLGILEEFCKNTNLSVNVKKTKGFHILTKHKTYVVNPKDNWQIGSEEIEYVQPGDFEKYLGARIDPWIGVGGPVLKEKLKDWSENLIKAPLKPAQKILILQTYILPKLFYNLLLIEPPFNLLDDLDVLVRKIVKEILHLSQCTTDGIFYSRGRDGGLALTKFSVQIPNMLIRKWRRHIVSRDDWMDLSYLYAGENLVDKILSFSAVTSHPKKWREEEFLRWSELRCQGIGIKYFKNDLISNSIFRNSSKVKSSAYIAALQLRANIYPTRETLARGRGDVNALCRWCGKVRETVPHISGQCYKTKNARIKRHNRVVSAVVDKVGKLGWKAMIEPHLRNSKGELRKPDIIFIKGDTAVVVDVTVRWEDNAGSLEQAHSEKVAYYLELEEEIKNLTGGKNIHFFGFVLGARGKWSEGNNDLLQLLGMDRSKNFKESICRLVLYSTIGMMAIFSDR

SEQ ID NO: 9259 - protein, 1017 aa, Actinemys marmorata
MKSHTCSVCGLGFHTRSGLSQHCRHRHPAVRNEQRKEDMAAKSKIKEGSTRSRIWTKDEVAQLIQLERKYIGKRNINKCIESEMRTKTNKQISDKRRELAKKKLVVTGDREEVTEVEDIRVNILEIPPPRERIFPLKGHPEVDLVEKICKRGKQSREGREIINSLGEIEGLLKEDLTKALGWAMLEKLCYSLVEGKDPRNESQIELRNKGKGKMRKEGRRKQFNAIRRYATKKAKYKFYQQLFDKDRRRLTRIIMGEPDKAKCAIPMKEIEEYYVNILGTIGHGNMIGWPSSTENADNDILMSPISVDEIRIALREIRKDSAPGPDKVKVSNLWDIFNLDSLILTKIFNIWFLNRQVPDEFKKNRTILIPKTQDEEEMKKLTSRRPLTIGSVWIRIYTKILAKRLVETVKICSRQKGFISAPGCEENIAILDNLIKGAKRNGNEIAIVFVDLAKAFDSVGHGHIIAGLRRFGIDEHFIDIIRDLYDNCTTRVWVGDEATESILIRRGVKQGDPLSPILFNIAMDPLLTRLEVEGSGFYVKGNSVTSLAFADDVAILSSSYKGMIKNLGILEEFCKNTNLSVNVKKTKGFHILTKHKTYVVNPKDNWQIGSEEIEYVQPGDFEKYLGARIDPWIGVGGPVLKEKLKDWSENLIKAPLKPAQKILILQTYILPKLFYNLLLIEPPFNLLDDLDVLVRKIVKEILHLPQCTTNGIFYSRGRDGGLALTKFSVQIPNMLIRKWRRHIVSRDDWMDLSYLYAGENLVDKILSFSAVTSHPKKWREEEFLRWSELRCQGIGIKYFKNDLISNSIFRNSSKVKSSAYIAALQLRANIYPTRETLARGRGGVNALCRWCGKVRETVPHISGQCYKTKNARIKRHNRVVSAVVDKVGKLGWKAMIEPHLRNSKGELRKPDIIFIKGDTAVVVDVTVRWEDNAGSLEQAHSEKVAYYLELEEEIKNLTGGKNIHFFGFVLGARGKWSEGNNDLLQLLGMDRSKNFKESICRLVLYSTIGMMAIFSDR

SEQ ID NO: 9260 - protein, 1238 aa, Chrysemys picta
MEKSNLYFYTGLALDRVNNAPAVGFDAPADSVKYIRGVIRVAGPMDKMVWTIMKSHENESENQVLPVEHGEENVCDDHGEEILSILPMVFTRDTFNDLTMDSFNPDFKYLSTFDDPYVRESSTDFNRDRNKDLNSIGSNINILESSSWKDGVFYLEYPVDSFNCPICPQILPTFGKWAKHINVVHKSKAIRVVCSKCGKSSQYHNIACHYPKCIPKKADTPMKSHTCSVCGLGFHTRSGLSQHCRHRHPAVRNEQRKEDMAAKSKIKEGSTRSRIWTKDEVAQLIQLERKYIGKRNINKCIESEMRTKTNKQISDKRRELAKKKLVVTGDREEVTEVEDIRVNILEIPPPRERIFPLKGHPEVDLVEKICKRGKQSREGREIINSLGEIEGLLKEDLTKALGWAMLEKLCYSLVEGQDPRNESQIELRNKGKGKIRKEGRRKQFNAIRRYATKKAKYKFYQQLFDKDRRRLTRIIMGEPDKAKCAIPMKEIEEYYVNILGTIGHGNMIGWPSSTENADNDILMSPISVDEIRIALTEIRKDSAPGPDKVKVSNLWDIFNLDSLILTKIFNIWFLNRQVPDEFKKNRTILIPKTQDEEEMKKLTSWRPLTIGSVWIRIYTKILAKRLVEIVKICSRQKGFISAPGCEENIAILDNLIKGAKRNGNEIAIVFVDLAKAFDSVGHGHIIAGLRRFGIDEHFIDIIRDLYANCTTRVWVGDEATESILIRRGVKQGDPLSPILFNIAMDPLLTRLEVEGSGFYVKGNSVTSLAFADDVAILSSSYKGMIKNLGILEEFCKNTNLSVNVKKTKGFHILTKHKTYVVNPKDNWQIGSEKIEYVQPGDFEKYLGARIDPWIGVGGPVLKEKLKDWSENLIKAPLKPAQKILILQTYILPKLFYNLLLIEPPFNLLDDLDVLVRKIVKEILHLPQCTTDGIFYSRGRDGGLALTKFSVQIPNMLIRKWRRHIVSRDDWMDLSYLYAGENLVDKILSFSAVTSHPKKWREEEFLRWSELRCQGIGIKYLKNDLISNSIFRNSSKVKSSAYIAALQLRANIYPTRETLARGRGGVNALCRWCGKVRETVPHISGQCYKTKNARIKRHNRVVSAVVDKVGKLGWKAMIEPHLRNSKGELRKPDIIFIKGDTAVVVDVTVRWEDNAGSLEQAHSEKVAYYLELEEEIKNLTGGKNIHFFGFVLGARGKWSEGNNDLLQLLGMDRSKNFKESICRLVLYSTIGMMAIFSDR

SEQ ID NO: 9261 - protein, 1241 aa, Chrysemys picta
MEKSNIYFYTGLALDRVNNAPAVGFDAPADSVKYIRGVIRVAEPMDKMVWTIMKSHENESENQVLPVEHGEEVEENVCDDHGEEILSILPMVFTRDTFNDLTMDSFNPDFKYLSTFDDPYVRESSTDFNRDRNKDLNSIGSNINLLESSSWKDGVFYLEYPVDSFNCPICPQILPTFGKWAKHINVVHKSKAIRVVCSKCGKSSQYHNIACHYPKCIPKKADTPMKSHTCSVCGLGFHTRSGLSQHCRHRHPAVRNEQRKEDMAAKSKIKEGSTRSRIWTKDEVAQLIQLERKYIGKRNINKCIESEMRTKTNKQISDKRRELAKKKLVVTGDREEVTEVEDIRVNILEIPPPRERIFPLKGHPEVDLVEKICKRGKQSREGREIINSLGEIEGLLKEDLTKALGWAMLEKLCYSLVEGQDPRNESQIELRNKGKGKIRKEGRRKQFNAIRRYATKKAKYKFYQQLFDKDRRRLTRIIMGEPDKAKCAIPMKEIEEYYVNILGTIGHGNMIGWPSSTENADNDILMSPISVDEIRIALTEIRKDSAPGPDKVKVSNLWDIFNLDSLILTKIFNIWFLNRQVPDEFKKNRTILIPKTQDEEEMKKLTSWRPLTIGSVWIRIYTKILAKRLVETVKICSRQKGFISAPGCEENIAILDNLIKGAKRNGNEIAIVFVDLTKAFDSVGHRHIIAGLRRFGIDEHFIDIIRDLYDNCTTRVWVGDEATESILIRRGVKQGDPLSPILFNIAMDPLLTRLEVEGSGFYVKGNSVTSLAFADDVAILSSSYKGMIKNLGILEEFCKNTNLSVNVKKTKGFHILTKHKTYVVNPKDNWQIGSEKIEYVQPGDFEKYLGARIDPWIGVGGPVLKEKLKDWSENLIKAPLKPAQKILILQTYILPKLFYNLLLIEPPFNLLDDLDVLVRKIVKEILHLPQCTTDGIFYSRGRDGGLALTKFSVQIPNMLIRKWRRHIVSRDDWMDLSYLYAGENLVDKILSFSAVTSHPKKWREEEFLRWSELRCQGIGIKYFKNDLISNSIFRNSSKVKSSAYIAALQLRANIYPTRETLARGRGGVNALCRWCGKVRETVPHISGQCYKTKNARIKRHNRVVSAVVDKVGKLGWKAMIEPHLRNSKGELRKPDIIFIKGDTAVVVDVTVRWEDNAGSLEQAHSEKVAYYLELEEEIKNLTGGKNIHLFGFVLGARGKWSEGNNDLLQLLGMDRSKNFKESICRLVLYSTIGMMAIFSDR

SEQ ID NO: 9262 - protein, 1241 aa, Chrysemys picta
MEKSNLYFYTGLALDRVNNAPAVGFDAPADSVKYIRGVIRVAGPMDKMVWTIMKSHENESENQVLPVEHGEEVEENVCDDHGEEILSILPMVFTRDTFNDLTMDSFNPDFKYLSTFDDPYVRESSTDFNRDRNKDLNSIGSNINILESSSWKDGVFYLEYPVDSFNCPICPQILPTFGKWAKHINVVHKSKAIRVVCSKCGKSSQYHNIACHYPKCIPKKADTPMKSHTCSVCGLGFHTRSGLSQHCRHRHPAVRNEQRKEDMAAKSKIKEGSTRSRIWTKDEVAQLIQLERKYIGKRNINKCIESEMRTKTNKQISDKRRELAKKKLVVTGDREEVTEVEDIRVNILEIPPPRERIFPLKGHPEVDLVEKICKRGKQSREGREIINSLGEIEGLLKEDLTKALGWAMLEKLCYSLVEGQDPRNESQIELRNKGKGKIRKEGRRKQFNAIRRYATKKAKYKFYQQLFDKDRRRLTRIIMGEPDKAKCAIPMKEIEEYYVNILGTIGHGNMIGWPSSTENADNDILMSPISVDEIRIALTEIRKDSAPGPDKVKVSNLWDIFNLDSLILTKIFNIWFLNRQVPDEFKKNRTILIPKTQDEEEMKKLTSWRPLTIGSVWIRIYTKILAKRLVETVKICSRQKGFISAPGCEENIAILDNLIKGAKRNGNEIAIVFVDLAKAFDSVGHGHIIAGLRRFGIDEHFIDIIRDLYDNCTTRVWVGDEATESILIRRAVKQGDPLSPILFNIAMDPLLTRLEVEGSGFYVKGNSVTSLAFADDVAILSSSYKGMIKNLGILEEFCKNTNLSVNVKKTKGFHILTKHKTYVVNPKDNWQIGSEKIEYVQPGDFEKYLGARIDPWIGVGGPVLKEKLKDWSENLIKAPLKPAPKILILQTYILPKLFYNLLLIEPPFNLLDDLDVLVRKIVKEILHLPQCTTDGIFYSRGRDGGLALTKFSVQIPNMLIRKWRRHIVSRDDWMDLSYLYAGENLVDKILSFSAVTSHPKKWREEEFLRWSELRCQGIGIKYFKNDLISNSIFRNSSKVKSSAYIAALQLRANIYPTRETLARGRGGVNALCRWCGKVRETVPHISGQCYKTKNARIKRHNRVVSAVVDKVGKLGWKAMIEPHLRNSKGELRKPDIIFIKGDTAVVVDVTVRWEDNAGSLEQAHSEKVAYYLELEEEIKNLTGGKNIHFFGFVLGARGKWSEGNNDLLQLLGMDRSKNFKESICRLVLYSTIGMMAIFSDR

SEQ ID NO: 9263 - protein, 1260 aa, Terrapene carolina
MEKSNLYFYTGLALDRVNNAPAVGFDAPADSVKYIRGVIRVAGPMDKMVWTIMKSHEHESENQVLPVEHGEEVEENVCDDHGEEILSILSMVFTRDTFNDLTMESFNPDFKYLSTFDDPYVSESGYLNAHLVNGSSLLNSFRPSTDFNRDRNKDLNSTGSNINILESSSWKDGVFYLEYPVDSFNCPICPQILPTFGKWAKHINVVHKSKAIRVVCSKCGKSSQYHNIACHYPKCIPKKADTPMKSHTCSVCGLGFHTRSGLSQHCRHRHPAVRNEQRKEDMAAKSKIKEGSTRSRIWTKDEVAQLIQLERKYIGKRNINKCIESEMRTKTNKQISDKRRELAKKKLVVTGDREEVTEVEDIRVNILEIPPPRERIFPLKGHPEVDLVEKICKRGKQSREGREIINSLGEIEGLLKEDLTKALGWAMLEKLCYSLVEGKDPRNESQIELRNKGKGKMRKEGRRKQFNAIRRYATKKAKYKFYQQLFDKDRRRLTRIIMGEPDKAKCAIPMKEIEEYYVNILGTIGHGNMIGWPSSTENADNDILMSPISVDEIRIALREIKKDSAPGPDKVKVSNLWDILNLDSLILTKIFNIWFLNRQVPDEFKKNRTILIPKTQDEEEMKKLTSWRPLTIGSVWIRIYTKILAKRLVETVKICSRQKGFISTPGCEENIAILDNLIKGAKRNGNEIAIVFVDLAKAFDSVGHGHIIAGLRRFGIDEHFIDIIRDLYDNCTTRVWVGDEATESILIRRGVKQGDPLFPILFNIAMDPLLTRLEVEGSGFYVKGNGVTSLAFADDVAILSSSYKGMIKNLGILEEFCKNTNLSVNVKKTKGFHILTKHKTYVVNPKDNWQIGSEEIEYVQPGDFEKYLGARIDPWIGVGGPVLKEKLKDWSENLIKAPLKPAQKILILQTYILPKLFYNLLLIEPPFNLLDDLDVLVRKIVKEILHLPQCITDGIFYSRGRDGGLALTKFSVQIPNMLIRKWRRHIVSRDDWMDLSYLYAGENLVDKILSFSAVTSHPKKWREEEFLRWSELRCQGIGIKYFKNDLISNSIFRNSTKVKSSAYIAALQLRANIYPTRETLARGRGGVNALCRWCGKVRETVPHISGQCYKTKNARIKRHNRVVSAVVDKVGKLGWKAMIEPHLRNSKGELRKPDIIFIKGDTAVVVDVTVRWEDNAGSLEQAHSEKVAYYLELEEEIKNLTGGKNIHFFGFVLGARGKWSEGNNDLLQLLGMDRSKNFKESICRLVLYSTIGMMAIFSDR

SEQ ID NO: 9264 - protein, 979 aa, Terrapene carolina
MAAKSKIKEGSIRSRIWTKDEVAQLIQLERKYIGKRNINKCIESEMRTKTNKQISDKRRELAKKKLVVTGDREEVTEVEDIRVNILEIPPPRERIFPLKGHPEVDLVEKICKRGKQSREGREIINSLGEIEGLLKEDLTKALGWAMLEKLCYSLVEGKDPRNESQIELRNKGKGKMRKEGRRKQFNAIRRYATKKAKYKFYQQLFDKDRRRLTRIIMGEPDKAKCAIPMKEIEEYYVNILGTIGHGNMIGWPSSTENADNDILMSPISVDEIRIALREIRKDSAPGPDKVKVSNLWDIFNLDSLILTKIFNIWFLNRQVPDEFKKNRTILIPKTQDEEEMKKLTSWRPLTIGSVWIRIYTKILAKRLVETVKICSRQKGFISAPGCEENIAILDNLIKGAKRNGNEIAIVFVDLAKAFDSVGHGHIIAGLRRFGIDEHFIDIIRDLYDNCTTRVWVGDEATESILIRRGVKQGDPLSPILFNIAMDPLLTRLEVEGSGFYVKGNGVTSLAFADDVAILSSSYKGMIKNLGILEEFCKNTNLSVNVKKTKGFHILTKHKTYVVNPKDNWQIGSEEIEYVQPGDFEKYLGARIDPWIGVGGPVLKEKLKDWSENLIKAPLKPAQKILILQTYILPKLFYNLLLIEPPFNLLDDLDVLVRKIVKEILHLPQCTTDGIFYSRGRDGGLALTKFSVQIPNMLIRKWRRHIVSRDDWMDLSYLYAGENLVDKILSFSAVTSHPKKWREEEFLRWSELRCQGIGIKYFKNDLISNSIFRNSSKVKSSAYIAALQLRANIYPTRETLARGRGGVNALCRWCGKVRETVPHISGQCYKTKNARIKRHNRVVSAVVDKVGKLGWKAMIEPHLRNSKGELRKPDIIFIKGDTAVVVDVTVRWEDNAGSLEQAHSEKVAYYLELEEEIKNLTGGKNIHFFGFVLGARGKWSEGNNDLLQLLGMDRSKNFKESICRLVLYSTIGMMAIFSDR

SEQ ID NO: 9265 - protein, 1260 aa, Terrapene carolina
MEKSNLYFYTGLALDRVNNAPAVGFDAPADSVKYIRGVIRVAGPMDKMVWTIMKSHEHESENQVLPVEHGEEVEENVCDDHGEEILSILPMVFTRDTFNDLTMESFNPDFKYLSTFDDPYVSESGYLNAHLVNGSSLLNSFRPSTHFNRDRNKDLNSTGSNINILESSSWKDGVFYLEYPVDSFNCPICPQILPTFGKWAKHINVVHKSKAIRVVCSKCGRSSQYHNIACHYPKCIPKKADTPMKSHTCSVCGLGFHTRSGLSQHCRHRHSAVRNEQRKEDMAAKSKIKEGSTRSRIWTKDEVAQLIQLERKYIGKRNINKCIESEMRTKTNKQISDKRRELAKKKLVVTGDREEVTEVEDIRVNILEIPPPRERIFPLKGHPEVDLVEKICKRGKQSREGREIINSLGEIEGLLKEDLTKALGWAMLEKLCYSLVEGKDPRNESQIELRNKGKGKMRKEGRRKQFNAIRRYATKKAKYKFYQQLFDKDRRRLTRIIMGEPDNAKCAIPMKEIEEYYVNILGTIGHGNMIGWPSSTENADNDILMSPISVDEIRIALREIRKDSVPGPDKVKVSNLWDIFNLDSLILTKIFNIWFLNRQVPDEFKKNRTILIPKTQDEEEMKKLTSWRPLTIGSVWIRIYTKILAKRLVETVKICSRQKGFISAPGCEENIAILDNLIKGAKRNGNEIAIVFVDLAKAFDSVGHGHIIAGLRRFGIDEHFIDIIRDLYDNCTTRVWVGDEATESILIRRGVKQGDPLSPILFNIAMDPLLTRLEVEGSGFYVKGNGVTSLAFADDVAILSSSYKGMIKNLGILEEFCKNTNLSVNVKKTKGFHILTKHKTYVVNPKDNWQIGSEEIEYVQPGDFEKYLGARIDPWIGVGGPVLKEKLKDWSENLIKAPLKPAQKILILQTYILPKLFYNLLLIEPPFNLLDDLDVLVRKIVKEILHLPQCTTDGIFYSRGRDGGLALTKFSVQIPNMLIRKWRRHIVSRDDWMDLSYLYAGENLVDKILSFSAVTSHPKKWREEEFLRWSELRCQGIGIKYFKNDLISNSIFRNSSKVKSSAYIAALQLRANIYPTRETLASGRGGVNALCRWCGKVRETVPHISGQCYKTKNARIKRHNRVVSAVVDKVGKLGWKAMIEPHLRNSKGELRKPDIIFIKGDTAVVVDVTVRWEDNAGSLEQAHSEKVAYYLELEERIKNLTGGKNIHFFGFVLGARGKWSEGNNDLLQLLGMDRSKNFKESICRLVLYSTIGMMAIFSDR

SEQ ID NO: 9266 - protein, 1026 aa, Trachemys scripta
MIPKKADTPMKSHTCSVCGLGFHTRSGLSQHCRHRHPAVRNEQRKEDMAAKSKIKEGSTRSRIWTKDEVVQLIQLERKYIGKRNINKCIESEMRTKTNKQISDKRRELAKKKLVVTGDREEVTEVEDIRVNILEIPPPRERIFPLKGHPEVDLVEKICKWGKQSREGREIINSLGEIEGLLKEDLTKALGWAMLEKLCYSLVEGKDPRNESQIELRNKGKGKMRKEGRRKQFNAIRRYATKKAKYKFYQQLFDKDRRRLTRIIMGEPDKAKCAIPMKEIEEYYVNILGTIGHGNMIGWPSSTENADNDILMSPISVDEIRIALREIRKDSAPGPDKVKVSNLWDIFNLDSLILTKIFNIWFLNRQVPDKFKKNRTILIPKTQDEEEMKKLTSWRPLTIGSVWIRIYTKILAKRLVETVKICSRQKGFISAPGCEENIAILDNLIKGAKRNGNEIAIVFVDLAKAFDSVGHGHIIAGLRRFGIDEHFIDIIRDLYDNCTTRVWVGDEATESILIRRGVKQGDPLSPILFNIAMDPLLTRLEVEGSGFYVKGNSVTSLAFADDVAILSSSYKGMIKNLGILEEFCKNTNLSVNVKKTKGFHILTKHKTYVVNPKDYWQIGSEEIEYVQPGDFEKYLGARIDPWIGVGGPVLKEKLKDWSENLIKAPLKPAQKILILQTYILPKLFYNLLLIEPPCNLLDDLDVLVRKIVKEILHLPQCTTDGIFYSRGRDGGLALTKFSVQIPNMLIRKWRRHIVSRDDWMDLSYLYAGENLVDKILSFSAVTSHPKKWREEEFLRWSELRCQGIGIKYFKNDLISNSTFRNSSKVKSSAYIAALQLRANIYPTMETLARGRGGVNALCRWCGKVRETVPHISGQCYKTKNARIKRHNRVVSAVVDKVGKLGWKAMIEPHLRNSKGELRKPDIIFIKGDTAVVVDVTVRWEDNAGSLEQAHSEKVAYYLELEEEIKNLTGGKNIHFFGFVLGARGKWSEGNNDLLQLLGMDRSKNFKESICRLVLYSTIGMMAIFSDR

SEQ ID NO: 9267 - protein, 1260 aa, Actinemys marmorata
MEKSNLYFYTGLALDRVNNAPAVGFDAPADSVKYIRGVIRVAGPMDKMVWTIMKSHEHESENQVLPVEHGEEVEENVCDDHGEEILSILPMVFTRDTFNDLTMESFNPDFKYLSTFDDPYVRESGYLNAHLVNGSSLLNSFRPSTDFNRDRNKDLNSTGSNINILESSSWKDGVFYLEYPVDSFNCPICPQILPTFGKWAKHINVVHKSKAIRVICSKCGKSSQYHNIACHYPKCIPKKADTPMKSHTCSVCGLGFHTRSGLSQHCRHRHPAVRNEQRKEDMAAKSKIKEGSTRSRIWTKDEVAQLIQLERKYIGKRNINKCIESEMRTKTNKQISDKRRELAKKKLVVTGDREEVTEVEDIRVNILEIPPPRERIFPLKGHPEVDLVEKICKRGKQSREGREIINSLGEIEGLLKEDLTKALGWAMLEKLCYSLVEGKDPRNESQIELRNKGKGKMRKEGRRKQFNAIRRYATKKAKYKFYQQLFDKDRRRLTRIIMGEPDKAKCAIPMKEIEEYYVNILGTIGHGNMIGWPSSTENADNDILMSPISVDEIRIALREIRKDSAPGPDKVKVSNLWDIFKLDSLILTKIFNIWFLNRQVPDEFKKNRTILIPKTQDEEEMKKLTSWRPLTIGSVWIRIYTKILAKRLVETVKICSRQKGFISAPGCEENIAILDNLIKGAKRNGNEIAIVFVDLAKAFDSVGHGHIIAGLRRFGIDEHFIDIIRDLYDNCTTRVWVGDEATESILIRRGVKQCDPLSPILFNIAMDPLLTRLEVEGSGFYVKGNSVTSLAFADDVAILSSSYKGMIKNLGILEEFCKNTNLSVNVKKTKGFHILTKHKTYVVNPKDNWQIGSEEIEYVQPGDFEKYLGARIDPWIGVGGPVLKEKLKDWSENLIKAPLKPAQKILILQTYILPKIFYNLLLIEPPFNLLDDLDVLVRKIVKEILHLPQCTTDGIFYSRGRDGGLALTKFSVQIPNMLIRKWRRHIVSRDDWMDLSYLYAGENLVDKILSFSAVTSHPKKWREEEFLRWSELRCQGIGIKYFKNDLISNSIFRNSSKVKSSAYIAALQLRANIYPTRETLARGRGGVNALCRWCGKVRETVPHISGQCYKTKNARIKRYNRVVSAVVDKVGKLGWKAMIEPHLRNSKGELRKPDIIFIKGDTAVVVDVTVRWEDNAGSLEQAHSEKVAYYLELEEEIKNLTGGKNIHFFGFVLGARGKWSEGNNDLLQLLGMDRSKNFKESICRLVLYSTIGMMAIFSDR

SEQ ID NO: 9268 - protein, 1260 aa, Actinemys marmorata
MEKSNLYFYTGLALDRINNAPAVGFDAPADSVKYIRGVIRVAGPMDKMVWTIMKSHEHESENQVLPVEHGEEVEENVCDDHGEEILSILPMVFTRDTFNDLTMESFNPDFKYLSTFDDPYVRESGYLNAHLVNGSSLLNSFRPSTDFNRDRNKDLNSTGSNINILESSSWKDGVFYLEYPVDSFNCPICPQILPTFGKWAKHINVVHKSKAIRVVCSKCGKSSQYHNIACHYPKCIPKKADTPMKSHTCSVCGLGFHTRSGLSQHCRHRHPAVRNEQRKEDMAAKSKIKEGSTRSRIWTKDEVAQLIQLERKSIGKRNINKCIESEMRTKTNKQISDKRRELAKKKLVVTGDREEVTEVEDIRVNILEIPPPRERIFPLKGHPEVDLVEKICKRGKQSREGREIINSLGEIEGLLKEDLTKALGWAMLEKLCYSLVEGKDPRNESQIELRNKGKGKMRKEGRRKQFNAIRRYATKKAKYKFYQQLFDKDRRRLTRIIMGEPDKAKCAIPMKEIEEYYVNILGTIGHGNMIGWPSSTENADNDILMSPISVDEIRIALREIRKDSAPGPDKVKVSNLWDIFNLDSLILTKNFNIWFLNRQVPDEFKKNRTILIPKTQDEEEMKKLTSWRPLTIGSVWIRIYTKILAKRLVETVKICSRQKGFISAPGCEENIAILDNLIKGAKRNGNEIAIVFVDLAKAFDSVGHGHIIAGLRRFGIDEHFIDIIRDLYDNCTTRVWVGDEATESILIRRGVKQGDPLSPILFNIAMDPLLTRLEVEGSGFYVKGNSVTSLAFADDVAILSSSYKGMIKNLGILEEFCKNTNLSVNVKKTKGFHILTKHKTYVVNPKDNWQIGSEEIEYVQPGDFEKYLGARIDPWIGVGGPVLKEKLKDWSENLIKAPLKPAQKILILQTYILQKLFYNLLLIEPPFNLLDDLDVLVRKIVKEILHLPQCTTDGIFYSRGRDGGLALTKFSVQIPNMLIRKWRRHIVSRDDWMDLSYLYAGENLVDKILSFSAVTSHPKKWREEEFLRWSELRCQGIGIKYFKNDLISNSIFRNSSKVKSSAYIAALQLRANIYPTRETLARGRGGVNALCRWCGKVRETVPHISGQCYKTKNARIKRHNRVVSAVVDKVGKLGWKAMIEPHLRNSKGELRKPDIIFIKGDTAVVVDVTVRWEDNAGSLEQAHSEKVAYYLELEEEIKNLTGGKNIHFFGFVLGARGKWSEGNNDLLQLLGMDRSKNFKESICRLVLYSTIGMMAIFSDR

SEQ ID NO: 9269 - protein, 1241 aa, Chrysemys picta
MEKSNLYFYTGLALDRVNNAPAVGFDAPADSVKYIRGVIRVAGPMDKMVWTIMKSHENESENQVLPVEHGEEVEENVCDDHGEEILSILPMVFTRDTFNDLTMDSFNPDFKYLSTFDDPYVRESSTDFNRYRNKDLNSIGSNINILESSSWKDGLFYLEYPVDSFNCPICPQILPTFGKWAKHINVVHKSKAIRVVCSKCGKSSQYHNIACHYPKCIPKKADTPMKSHTCSVCGLGFHTRSGLSQHCRHRHPAVRNEQRKEDMAAKSKIKEGSTRSRIWTKDEVAQLIQLERKYIGKRNINKCIESEMRTKTNKQISDKRRELAKKKLVVTGDREEVTEVEDIRVNILEIPPPRERIFPLKGHPEVDLVEKICKRGKQSREGREIINSLGEIEGLLKEDLTKALGWAMLEKLCYSLVEGQDPRNESQIELRNKGKGKIRKEGRRKQFNAIRRYATKKAKYKFYQQLFDKDRRRLTRIIMGEPDKAKCAIPMKEIEEYYVNILGTIGHGNMIGWPSSTENADNDVLMSPISVDEIRIALTEIRKDSAPGPDKVKVSNLWDIFNLDSLILTKIFNIWFLNRQVPDEFKKNRTILIPKTQDEEEMKKLTSWRPLTIGSVWIRIYTKILAKRLVETVKICSRQKGFISAPGCEENIAILDNLIKGAKRNGNEIAIVFVDLAKAFDSVGHGHIIAGLRRFGIDEHFIDIIRDLYDNCTTRVWVGDEATESILIRRGVKQGDPLSPILFNIAMDPLLTRLEVEGSGFYVKGNSVTSLAFADDVAILSSSYKGMIKNLGILEEFCKNTNLSVNVKKTKGFHILTKHKTYVVNPKDNWQIGSEKIEYVQPGDFEKYLGARIDPWIGVGGPVLKEKLKDWSENLIKAPLKPAQKILILQTYILPKLFYNLLLIEPPFNLLDDLDVLVRKIVKEILHLPQCTTDGIFYSRGRDGGLALTKFSVQIPNMLIRKWRRHIVSRDDWMDLSYLYAGENLVDKILSFSAVTSHPRKWREEEFLRWSELRCQGIGIKYFKNDLISNSIFRNSSKVKSSAYIAALQLRANIYPTRETLARGRGGVNALCRWCGKVRETVPHISGQCYKTKNARIKRHNRVVSAVVDKVGKLGWKAMIEPHLRNSKGELRKPDIIFIKGDTAVVVDVTVRWEDNAGSLEQAHSEKVAYYLELEEEIKNLTGGKNIHFFGFVLGARGKWSEGNNDLLQLLGMDRSKNFKESICRLVLYSTIGMMAIFSDR

SEQ ID NO: 9270 - protein, 1260 aa, Chrysemys picta
MEKSNLYFYTGLALDRVNNAPAVGFDAPADSVKYIRGVIRVAGPMDKMVWTIMKSHENESENQVLPVEHGEEVEENVCDDRGEKILSILPMVFTRDTFNDLTMDSFNPAFKYLSTFDDPYVRESGYLNAHLINGSSLLNSFRPSTDFNRDRNKDLNSTGSNINILESSSWKDGVFYLEYPVDSFNCPICPQILPTFGKWAKHINVVHKSKAIRVVCSKCGKSSQYRNIACHYPKCIPKKADTPMKSHTCSVCGLGFHTRSGLSQHCRHRHPAVRNEQRKEDMAAKSKIKEGSIRSRIWTKDEVAQLIQLERKYIGKRNINKCIESEMRTKTNKQISDKRRELAKKKLVVTGDREEVTEVEDIRVNILEIPPPRERILPLKGHPEVDLVEKICERGKQSREGREIINSLGDIEGLLKEDLTKALGWAMLEKLCYSLVEGKDPRNESQIELRNKGKGKMRKEGRRKQFNASRRYATKKAKYKFYQQLFDKDRRRLTRIIMGEPDKAKCAIPMKEIEEYYVNILGTIGHGNMIGWPSSTENADNDILMNPISVDEIRIALREIRKDSAPGPDKVKVSNLWDIFNLDSLILTKICNIWFLNRQVPDEFKKNRTILIPKTQDEEEMKKLTSWRPLTIGSVWIRIYTKILAKRLVETVKICSRQKGFISAPGCEENIAILDNLIKGAKRNGNEIAIVFVDLAKAFDSVGHGHIIAGLRRFGIDEHFIDIIRDLYDNCTTRVWVGDEATESILIRRGVKQGDPLSPILFNIAMDPLLTRLEVEGSGFYVKGNSVTSLAFADDVAILSSSYKGMIKNLGILEEFCKNTNLSVNVKKTKGFHILTKHKTYVVNPKDNWQIGSEEIEYVQPGDFEKYLGARIDPWIGVGGPVLKEKLKDWSENLIKAPLKPAPKILILQTYILPKLFYNLLLIEPPFNLLDDLDVLVRKIVKEILHLPQCTTDGIFYSRGRDGGLALTTFSVQIPNMLIRKWRRHIVSRDDWMDLSYLNAGENLVDKILLFSAVTSHPKKWREEEFLRWSELRCQGIGIKYFKNDLISNSIFRNSSKVKSSVYIAALQLRANIYPTRETLARGRGGVNALCRWCGKVRETVPHISGQCYKTKNARIKRHNRVVSAVVDKVGKLGWKAIIEPHLRNSKGELRKPDIIFIKGDTAVVVDVTVRWEDNAGSLEQAHSEKVAYYLELEEEIKNLTGGKNIHFFGFVLGARGKWSEGNNDLLQLLGMDRSKNFKESICRLVLYSIIGMMAIFSDR

SEQ ID NO: 9271 - protein, 1241 aa, Chrysemys picta
MEKSNLYFYTGLALDRVNNAPAVGFDAPADSVKYIRGVIRVAGPMDKMVWTIMKSHENESENQVLPVEHGQEVEENVCDDHGEEILSILPMVFTRDTFNDLTMDSFNPDFKYLSIFDDPYVRESSTDFNRDRNKDLNSIGSNINILESSSWKDGVFYLEYPVDSFNCPICPQILPTFGKWAKHINVVHKSKAIRVVCSKCGKSSQYHNIACHYPKCIPKKADTPMKSHTCSVCGLGFHTRSGLSQHCRHRHPAVRNEQRKEDMAAKSKIKEGSTRSRIWTKDEVAQLIQLERKYIGKRNINKCIESEMRTKTNKQISDKRRELAKKKLVVTGDRGEVTEVEDIRVNILEIPPPRERIFPLKGHPEVDLVEKICKRGKQSREGREIINSLGEIEGLLKEDLTKALGWAMLEKLCYSLVEGQDPRNESQIELRNKGKGKIRKEGRRKQFNAIRRYATKKAKYKFYQQLFDKDRRRLTRIIMGEPDKAKCAIPMKEIEEYYVNILGTIGHGNMIGWPSSTENADNDILMSPISVDEIRIALTEIRKDSAPGPDKVKVSNLWDIFNLDSLILTKIFNIWFLNRQVPDEFKKNRTILIPKTQDEEEMKKLTSWRPLTIGSVWIRIYTKILAKRLVETVKICNRQKGFISAPGCEENIAILDNLIKGAKRNGNEIAIVFVDLAKAFDSVGHGHIIAGLRRFGIDEHFIDIIRDLYDNCTTRVWVGDEATESILIRRGVKQGDPLSPILFNIAMDPLLTRLEVEGSGFYVKGNSVTSLAFADDVAILSSSYKGMIKNLGILEEFCKNTNLSVNVKKTKGFHILTKHKTYVVNPKDNWQIGSEKIEYVQPGDFEKYLGARIDPWIGVGGPVLKEKLKDWSENLIKAPLKPAQKILILQTYILPKLFYNLLLIEPPFNLLDDLDVLVRKIVKEILHLPQCTTDGIFYSRGRDGGLALTKFSVQIPNMLIRKWRRHIVSRDDWMDLSYLYAGENLVDKILSFSAVTSHPKKWREEEFLRWSELRCQGIGIKYFKNDLISNSIFRNSSKVKSSAYIAALQLRANIYPTRETLARGRGGVNALCRWCGKVRETVPHISGQCYKTKNARIKRHNRVVSAVVDKVGKLGWKAMIEPHLRNSKGELRKPDIIFIKGDTAVVVDVTVRWEDNAGSLEQAHSEKVAYYLELEEEIKNLTGGKNIHFFGFVLGARGKWSEGNNDLLQLLGMDRSKNFKESICRLVLYSTIGMMAIFSDR

SEQ ID NO: 9272 - protein, 1260 aa, Terrapene carolina
MEKSNLYFYTGLALDRVNNAPAVGFDAPADSVKYIRGVIRVAGPMDKMVWTIMKSHEHESENQVLPVEHGEEVEENVCDDHGEEILSILPMVFTRDTFNDLTMESFNPDFKYLSTFDDPYVSESGYLNAHLVNGSSLLNSFRPSTDFNRDRNKDLNSTGSNINILESSSWKDGVFYLEYPVDSFNCPICPQILPTFGKWAKHINVVHKSKAIRVVCSKCGKSSQYHNIACHYPKCIPKKADTPMKSHTCSVCGLGFHTRSGLSQHCRHRHPAVRNEQRKEDMAAKSKIKEGSNRSRIWTKDEVAQLIQLERKYIGKRNINKCIESEMRTKTNKQISDKRRELAKKKLVVTGDREEVTEVEDIRVNILEIPPPRERIFPLKGHPEVDLVEKICKRGKQSREGREIINSLGEIEGLLKEDLTKALGWAMLEKLCYSLVEGKDPRNESQIELRNKGKGKMRKEGRRKQFNAIRRYATKKAKYKFYQQLFDKDRRRLTRIIMGEPDKAKCAIPMKEIEEYYVNILGTIGHGNMIGWPSSTENADNDILMSPISVDEIRIALREIRKDSAPGPDKVKVSNLWDIFNLDSLILTKIFNIWFLNRQVPDEFKKNRTILIPKTQDEEEMKKLTSWRPLTIGSVWIRIYTKILAKRLVETVKICSRQKGFISAPGCEENIAILDNLIKGAKRNGNEIAIVFVDLAKAFDSVGHGHIIAGLRRFGIDEHFIDIIRDLYDNCTTRVWVGDEATESILIRRGVKQGDPLSPILFNIAMDPLLTRLEVEGSGFYVKGNGVTSLAFADDVAILSSSYKGMIKNLGILEEFCKNTNLSVNVKKTKGFHILTKHKTYVVNPKDNWQIGSEEIEYVQPGDFEKYLGARIDPWIGVGGPVLKEKLKDWSENLIKAPLKPAQKILILQTYILPKLFYNLLLIEPPFNLLDDLDVLVRKIVKEILHLPQCTTDGIFYSRGRDGGLALTKFSVQIPNMLIRKWRRHIVSRDDWMDLSYLYAGENLVDKILSFSAVTSHPKKWREEEFLRWSELRCQGIGIKYFKNDLISNSIFRNSSKVKSSAYIAALQLRANIYPTRETLARGRGGVNALCRWCGKVRETVPHISGQCYKTKNARIKRHNRVVSAVVDKVGKLGWKAMIEPHLRNSKGELRKPDIIFIKGDTAVVVDVTVRWEDNAGSLEQAHSEKVAYYLELEEEIKNLTGGKNIHFFGFVLGARGKWSEGNNDLLQLLGMDRSKNFKESICRLVLYSTIGRMAIFSDR

SEQ ID NO: 9273 - protein, 1260 aa, Terrapene carolina
MEKSNLYFYTGLALDRVNNAPAVGFDAPADSVKYIRGVIRVAGPMDKMVWTIMKSHEHESENQVLPVEHGEEVEENVCDDHGEEILSILPMVFTRDTFNDLTMESFNPDFKYLSTFDDPYVSESGYLNAHLVNGSSLLNSFRPSTDFNRDRNKDLNSTGSNINILESSSWKDGVFYLEYPVDSFNCPICPQILPTFGKWAKHINVVHKSKAIRVVCSKCGKSSQYHNIACHYPKCIPKKADTPMKSHTCSVCGLGFHTRSGLSQHCRHRHPAVRNEQRKEDMAAKSKIKEGSTRSRIWTKDEVAQLIQLERKYIGKRNINKCIESEMRTKTNKQISDKRRELAKKKLVVTGDREEVTEVEDIRVNILEIPPPRERIFPLKGHPEVDLVEKICKRGKQSREGREIINSLGEIEGLLKEDLTKALGWAMLEKVCYSLVEGKDPRNESQIELRNKGKGKMRKEGRRKQFNAIRRYATKKAKYKFYQQLFDKDRRRLTRIIMGEPDKAKCAIPMKEIEEYYVNILGTIGHGNMIGWPSSTENADNDILMSPISVDEIRIALREIRKDSAPGPDKVKVSNLWDIFNLDSLILTKIFNIWFLNRQVPDEFKKNRTILIPKTQDEEEMKKLTSWRPLTIGSVWIRIYTKILAKRLVETVKICSRQKGFISAPGCEENIAILDNLIKGAKRNGNEIAIVFVDLAKAFDSVGHGHIIAGLRRFGIDEHFIDIIRDLYDNCTTKVWVGDEATESILIRRGVKQGDPLSPILFNIAMDPLLTRLEVEGSGFYVKGNGVTSLAFADDVAILSSSYKGMIKNLSILEEFCKNTNLSVNVKKTKGFHILTKHKTYVVNPKDNWQIGSEEIEYVQPGDFEKYLGARIDPWIGVGGPVLKEKLKDWSENLIKDPLKPAQKILILQTYILPKLFYNLLLIEPPFNLLDDLDVLVRKIVKEILHLPQCITDGIFYSRGRDGGLALTKFSVQIPNMLIRKWRRHIVSRDDWMDLSYLYAGENLVDKILSFSAVTSHPKKWREEEFLRWSELRCQGIGIKYFKNDLISNSIFRNSSKVKSSAYIAALQLRANIYPTRETLARGRGGVNALCRWCGKVRETVPHISGQCYKTKNARIKRHNRVVSAVVDKVGKLGWKAMIEPHLRNSKGELRKPDIIFIKGDTAVVVDVTVRWEDNAGSLEQAHSEKVAYYLELEEEIKNLTGGKNIHFFGFVLGARGKWSEGNNDLLQLLGMDRSKNFKESICRLVLYSTIGMMAIFSDR

SEQ ID NO: 9274 - protein, 1260 aa, Terrapene carolina
MEKSNLYFYTGLALDRVNNAPAVGFDAPADSVKYIRGVIRVAGPMDKMVWTIMKSHEHESENQVLPVEHGEEVEENVCDDHGEEILSILPMVFTRDTFNDLTMESFNPDFKYLSIFDDPYVSESGYLNAHLVNGSSLLNSFRPSTDFNRDRNKDLNSTGSNINILESSSWKDGVFYLEYPVDSFNCPICPQILPTFGKWAKHINVVHKSKAIRVVCSKCGKSSQYHNIACHYPKCIPKKVDTPMKSHTCSVCGLGFHTRSGLSQHCRHRHPAVRNEQRKEDMAAKSKIKEGSTRSRIWTKDEVAQLIQLERKYIGKRNINKCIESERRTKTNKQISDKRRELAKKKLVVTGDREEVTEVEDIRVNILEIPPPRERIFPLKGHPEVDLVEKICKRGKQSREGREIINSLGEIEGLLKEDLTKALGWAMLEKVCYSLVEGKDPRNESQIELRNKGKGKMRKEGRRKQFNAIRRYATKKAKYKFYQQLFDKDRRRLTRIIMGEPDKAKCAIPMKEIEEYYVNILGTIGHGNMIGWPSSTENADNDILMSPISVDEIRIALREIRKDSAPGLDKVKVSNLWDIFNLDSLILTKIFNIWFLNRQVPDEFKKNRTILIPKTQDEEEMKKLTSWRPLTIGSVWIRIYTKILAKRLVETVKICSRQKGFISAPGCEENIAILDNLIKGAKRNGNEIAIVFVDLAKAFDSVGHGHIIAGLRRFGIDEHFIDIIRDLYDNCTTRVWVGDEATESILIRRGVKQGDPLSPILFNIAMDPLLTRLEVEGSGFYVKGNGVTSLAFADDVAILSSSYKGMIKNLGILEEFCKNTNLSGNVKKTKGFHILTKHKTYVVNPKDNWQIGSEEIEYVQPGDFEKYLGARIDPWIGVGGPVLKEKLKDWSENLIKAPLKPAQKILILQTYILPKLFYNLLLIEPPFNLLDDLDVLVRKIVKEILHLPQCTTDGIFYSRGRDGGLALTKFSVQIPNMLIRKWRRHIVSRDDWMDLSYLYAGENLVDKILSFSAATSHPKKWREEEFLRWSELRCQGIGIKYFKNDLISNSIFRNSTKVKSSAYIAALQLRANIYPTRETLARGRGGVNALCRWCGKVRETVPHISGQCYKTKNARIKRHNRVVSAVVDKVGKLGWKAMIEPHLRNSKGELRKPDIIFIKGDTAVVVDVTVRWEDNAGSLEQAHSEKVAYYLELEEEIKNLTGGKNIHFFGFVLGARGKWSEGNNDLLQLLGMDRSKNFKESICRLVLYSTIGMMAIFSDR

SEQ ID NO: 9275 - protein, 1017 aa, Trachemys scripta
MKSHTCSVCGLGFHTRSGLSQHCRHRHPAVRNEQRKEDMAAKSKIKEGSTRSRIWTKDEVAQLTQLERKYIGKRNINKCIESEMRTKTNKQISDKRRELAKKKLVVTGDREEVTEVEDIRVNILEIPPPRERIFPLKGHPEVDLVEKICKRGKQSREGREIINSLGEIEGLLKEDLTKALGWAMLEKLCYSLVEGKDPRNESQIELRNKGKGKMRKEGRRKQFNAIRRYATKKAKYKFYQQLFDKDRRRLTRIIMGEPDKAKCAIPMKEIEEYYVNILGTIGHGNMIGWPSSTENADNDILMSPISVDEIRIALREIRKDSAPGPDKVKVSNLWDIFNLDSLILTKIFNIWFLNRQVPDEFKKNRTILIPKTQDEEEMKKLTSWRPLTIGSVWIRIYTKILAKRLVETVKICSRQKGFISAPGCEENIAILDNLIKGAKRNGNEIAIVFVDLAKAFDSVGHGHIIAGLRRFGIDEHFIDIIRDLYDNCTTRVWVGDEATESILIRRGVKQGDPLSPILFNIAMDPLLTRLEVEGSGFYVKGNSVTSLAFADDVAILSSSYKGMIKNLGILEEFCKNTNLSVNVKKTKGFHILTKHKTYVVNPKDNWQIGSEEIEYVQPGNFEKYLGARIDPWIGVGGPVLKEKLKDWSENLIKAPLKPAQKILILQTYILPKLFYNLLLTEPPFNLLDDLDVLVRKIVKEILHLPQCTTDGIFYSRGRDGGLALTKFSVQIPNMLIRKWRRHIVSRDDWMDLSYLYAGENLVDKILSFSAVTSHPKKWREEEFLRWSELRCQGIGIKYFKNDLISNSIFRNSSKVKSSAYIAALQLRANIYPTRETLARGRGGVNALCRWCGKVRESVPHISGQCYKTKNARIKRHNRVVSAVVDKVGKLGWKAMIEPHLRNSKGELRKPDIIFIKGDTAVVVDVTVRWENNAGSLEQAHSEKVAYYLELEEEIKNLTGGKNIHFFGFVLGARGKWSEGNNDLLQLLGMDRSKNFKESICRLVLYPTIGMMAIFSDR

SEQ ID NO: 9276 - protein, 1260 aa, Actinemys marmorata
MEKSNLYFYTGLALDRVNNAPAVGFDAPADSVKYIRGVIRVAGPMDKMVWTIMKSHEHESENQVLPVEHGEEVEENVCDDHGEEILSILPMVFTRDTFNDLTMESFNPDFKYLSTFDDPYVRESGYLNAHLVNGSSLLNSFRPSTDFNRDRNKDLNSTGSNINILESSSWKDGVFYLEYPVDSFNCPICPQILPTFGKWAKHINVVHKSKAIRVVCSKCGKSSQYHNIACHYPKCIPKKADTPMKSHTCSVCGLGFHTRSGLSQHCRHRHPAVRNEQRKEDMAAKSKIKEGSTRSRIWTKDEVAQLIQLERKYIGKRNINKCIESEMRTKTNKQISDKRRELAKKKLVVTGDREEVTEVEDIRVNILEIPPPRERIFPLKGHPEVDLVEKICKRGKQSREGREIINSLGEIEGLLKEDLTKALGWAMLEKLCYSLVEGKDPRNESQIELRNKGKGKMRKEGRRKQFNAIRRYATKKAKYKFYQQLFDKDRRRLTRIIMGEPDKAKCAIPMKEIEEYYVNILGTIGHGNMIGWPSSTENADNDILMSPISVDEIRIALREIRKDSAPGPDKVKVSNLWDIFNLDSLILTKIFNIWFLNRQVPDEFKKNRTILIPKSQDEEEMKKLTSWRPLTIGSVWIRIYTKILAKRLVETVKICSRQKGFISAPGCEENIAILDNLIKGAKRNGNEIAIVFVDLAKAFDSVGHGHIIAGLRRFGIDEHFIDIIRDLYDNCTTRVWVGDEATESILIRRGVKQGDLLSPILFNIAMDPLLTRLEVEGSGFYVKGNSVTSLAFANDVAILSSSYKGMIKNLGILEEFCKNTNLSVNVKKTKGFHILTKHKTYVVNPKDNWQIGSEEIEYVQPGDFEKYLGARIDPWIGVGGPVLKEKLKDWSENLIKAPLKPAPKILILQTYILPKLFYNLLLIEPPFNLLDDLDVLVRKIVKEILHLPQCTTDGIFYSRGRDGGLALTKFSVQIPNMLIRKWRRHIVSRDDWMDLSYLYAGENLVDKILSFSAVTSHPKKWREEEFLRWSELRCQGIGIKYFKNDLISNSIFRNSSKVKSSAYIAALQLRANIYPTRETLARGRGGVNALCRWCGKVRETVPHISGQCYKTKNARIKRHNRVVSAVVDKVGKLGWKAMIEPHLRNSKGELRKPDIIFIKGDTAVVVDVTVRWEDNAGSLEQAHSEKVAYYLELEEEIKNLTGGKNIHFFGFVLGARGKWSEGNNDLLQLLGMDRSKNFKESICRLVLYSTIGMMAIFSDR

SEQ ID NO: 9277 - protein, 984 aa, Chrysemys picta
MSKEDMAAKSKIKEGSTRSRIWTKDEVAQLIQLERKYIGKRNINKCIESEMRTKTNKQISDKRRELAKKKLVVTGDREEVTEVEDIRVNILEIPPPRERIFPLKEHPEVDLVEKICKRGKQSREGREIINSLGEIEGLLKEDLTKALGWAMLEKLCYSLVEGQDPRNESQIELRNKGKGKIRKEGRRKQFNAIRRYATKKAKYKFYQQLFDKDRRRLTRIIMGEPDKAKCAIPMKEIEEYYVNILGTIGHGNMIGWPSSTENADNDILMSPISVDEIRIALTEIRKDSAPGPDKVKVSNLWDIFNLDSLILTKIFNIWFLNRQVPDEFKKNRTILIPKTQDEEEMKKLTSWRPLTIGSVWIRIYTKILAKRLVETVKICSRQKGFISAPGCEENIAILDNLIKGAKRNGNEIAIVFVDLAKAFDSVGHGHIIAGLRRFGIDEHFIDIIRDLYDNCTTRVWVGDEATESILIRRGVKQGDPLSPVLFNIAMDPLLTRLEVEGSGFYVKGNSVTSLAFADDVAILSSSYKGMIKNLGILEEFCKNTNLSVNVKKTKGFHILTKYKTYVVNPKDNWQIGSEKIEYVQPGDFEKYLGARIDPWIGVGGPVLKEKLKDWSENLIKAPLKPAQKILILQTYILPKLFYNLLLIEPPFNLLDDLDVLVRKIVKEILHLPQCTTDGIFYSRGRDGGLALIKFSVQIPNMLIRKWRRHIVSRDDWMDLSYLYAGENLVDKILSFSAVTSHPKKWREEEFLRWSELRCQGIGIKYFKNDLISNSIFRNSSKVKSSAYIAALQLRANIYPTRETLARGRGGVNALCRWCGKVPETVSHISGQCYKTKNARIKRHNRVVAAVVDKVGKLGWKAMIEPHLRNSKGELRKPDIIFIKGDTAVVVDVTVRWEDNAGSLEQAHSEKVAYYLELEEEIKNLTGGKNIHFFGFVLGARGKWSEGNNDLLQLLGMDRSKNFKESICRLVLYSTIGMIAIFSDR

SEQ ID NO: 9278 - protein, 1260 aa, Chrysemys picta
MEKSNLYFYTGLALDRVNNAPAVGFDAPADSVKYIRGVIRVAGPMDKMVWTIMKSHENESENQVLPVEHGEEVEENVCDDRGEEILSILPMVFTRDTFNDLTMDSFNPDFKYLSTFDDPYVRESGYLNAHLVNGSSLLNSFRPSTDFNRDRNKDLNSTGSNINILESSSWKDGVFYLEYPVDSFNCPICPQILPTFGKWAKHINVVHKSKAIRVVCSKCGKSSQYRNIACHYPKCIPKKVDTPMKSHTCSVCGLGFHTRSGLSQHCRHRHPAVRNEQRKEDMAAKSKIKEGSIRSRIWTKDEVAQLIQLERKYIGKRNINKCIESEMRTKTNKQISDKRRELAKKKLVVTGDREEVTEVEDIRVNILEIPPPRERIFPLKGHPEVDLVEKICKRGKQSREGREIINSLGEIEGLLKEDLTKALGWAMLEKLCYSLVEGKDPRNESQIELRNQGKGKMRKEGRRKQFNASRRYATKKAKYKFYQQLFDKDRRRLTRIIMGEPDKAKCAIPMKEIEECYVNILGTIGDGNMIGWPSSTENADNDILMSPISVDEIRIALREIRKDSAPGPDKVIVSNLWDIFNLDSLILTKIFNIWFLNRQVPDEFKKNRTILVPKTQDEEEMKKLTSWRPLTIGSVWIRIYTKILAKRLVETVKICSRQKGFISAPGCEENIAILDNLIKGAKRNGNEIAIMFVDLAKAFDSVGHGHIIAGLRRFGIDEHFIDIIRDLYDNCTTRVWVGDEATESILIRRGVKQGDPLSPILFNIAMDPLLTRLEVEGSGFYVKGNSVTSLAFADDVAILSSSYKGMIKNLGILEEFCKNTNLSVNVKKTKGFHILTKHKTYVVNPKDNWQIGSEEIEYVQPGDFEKYLGARIDPWIGVGGPVLKEKLKDWSENLIKAPLKPAQKILILQTYILPKLFYNLLLIEPPFNLLDDLDVLVRKIVKEILHLPQCTTDGIFYSRGRDGGLALTKFSVQIPNMLIRKWRRHIVSRDDWMDLSYLYAGENLVDKILLFSAVTSHPKKWREEEFLRWSELRCQGIGIKYFKNDLISNSIFRNSSKVKSSVYIAALQLRANIYPTRETLARGRGGVNALCRWCGKVRETVPHISGQCYKTKNARIKRHNRVVSAVVDKVGKLGWKAIIEPHLRNSKGELRKPDIIFIKGDTAVVVDVTVRWEDNAGSLEQAHSEKVAYYLELEEEIKNLTGGKNIHFFGFVLGARGKWSEGNNDLLQLLGMDRSKNFKESICRLVLYSTIGMMAIFSDR

SEQ ID NO: 9279 - protein, 1241 aa, Chrysemys picta
MEKSNLYFYTGLALDRVNNAPAVGFDAPADSVKYIRGVIRVAGPMDKMVWTIMKSHENESENQVLPVEHGEEVEENVCDDHGEEILSILPMVFTRDTFNDLTMDSFNPDFKYLSTFDDPYVRESSTDFNRDRNKDLNSIGSNINILESSSWKDGVFYLEYPVDSFNCPICPQILPTFGKWAKHINVVHKSKAIRVVCSKCGKSSQYHNIACHYPKCIPKKADTPMKSHTCSVCGLGFHTRSGLSQHCRHRHPAVRNEQRKEDMAAKSKIKEGSTRSRIWTKDEVAQLIQLERKYIGKRNINKCIESEMRTKTNKQISDKRREVAKKKLVVTGDREEVTEVEDIRVNILEIPPPRERIFPLKGHPEVDLVEKICKRGKQSREGREIINSLGEIEGLLKEDLTKALGWAMLEKLCYSLVEGQDPRNESQIELRNKGKGKIRKEGRRKQFNAIRRYATKKAKYKFYQQLFDKDRRRLTRIIMGEPDKAKCAIPMKEIEEYYVNILGTIGHGNMIGWPSSTENADNDILMSPISVDEIRIALTEIRKDSAPGPDKVKVSNLWDIFNLDSLILTKIFNIWFLNRQVPDEFKKNRTILIPKTQDEEEMKKLTSWRPLTIGSVWIRIYTKILAKRLVETVKICSRQKGFISAPGCEENIAILDNLIKGAKRNGNEIAIVFVDLAKAFDSVGHGHIIAGLRRFGIDEHFIDIIRDLYDNCTTRVWVGNEATESILIRRGVKQGDPLSPILFNIAMDPLLTRLEVEGSGFYVKGNSVTSLAFADDVAILSSSYKGMIKNLGILEEFCKNTNLSVNVKKTKGFHILTKHKTYVVNPKDNWQIGSEKIEYVQPGDFEKYLGARIDPWIGVGGPVLKEKLKDWSENLIKAPLKPAQKILILQTYILPKLFYNLLLIEPPFNLLDDLDVLVRKIVKEILHLPQCTTDGIFYSRGRDGGLALTKFSVQIPNMLIRKWRRHIVSRDDWMDLSYLYAGENLVDKILSFSAVTSHPKKWREEEFLRWSELRCQGIGIKYFKNDLISNSIFRNSSKVKSSAYIAALQLRANIYPTRETLARGRGGVNALCRWCGKVRETVPHISGQCYKTKNARIKRHNRVVSAVVDKVGKLGWKAMIEPHLRNSKGELRKPDIIFIKGDTAVVVDVTVRWEDNAGSLEQAHSEKVAYYLELEEEIKNLTGGKNIHFFGFVLGARGKWSEGNNDLLQLLGMDRSKNFKESICRLVLYSTIGMMAIFSDR

SEQ ID NO: 9280 - protein, 1017 aa, Terrapene carolina
MKSHTCSVCGLGFHTRSGLSQHCRHRHPAVRNEQRKEDMAAKSKIKEGSTRSRIWTKDEVAQLIQLERKYIGKRNINKCIESEMRTKTNKQISDKRRELAKKKLVVTGDREEVTEVEDIRVNILEIPPPRERIFPLKGHPEVDLVEKICKRGKQSREGREIINSLGEIEGLLKEDLTKALGWAMLEKLCYSLVEGKDPRNESQIELRNKGKGKMRKEGRRKQFNAIRRYATKKAKYKFYQQLFDKDRRRLTRIIMGEPDKAKCAIPMKEIEEYYVNILGTIGHGNMIGWPSSTENADNDILMSPISVDEIRIALREIRKDSAPGPDKVKVSNLWDIFNLDSLILTKIFNIWFLNRQVPDEFKKNRTILIPKTQDEEEMKKLTSWRPLTIGSVWIRIYTKILAKRLVETVKICSRQKGFISAPGCEENIAILDNLIKGAKRNGNEIAIVFVDLAKAFDSVGHGHIIAGLRRFGIEEHFIDIIRDLYDNCTTRVWVGDEATESILIRRGVKQGDPLSPILFNIAMDPLLTRLEVEGSGFYVKGNGVTSLAFADDVAILSSSYKGMIKNLGILEEFCKNTNLSVNVKKTKGFHILTKHKTYVVNPKDNWQIGSEEIEYVQPGDFEKYLGARIDPWIGVGGPVLKEKLKDWSENLIKAPLKPAQKILILQTYILPKLFYNLLLIEPPFNLLDDLDVLVRKIVKEILHLPQCITDGIFYSRGRDGGLALTKFSVQIPNMLIRKWRRHIVSRDDWMDISYLYAGENLVDKILSFSAVTSHPKKWREEEFLRWSELRCQGIGIKYFKNDLISNSIFRNSTKVKSSAYIAALQLRANIYPTRETLARGRGGVNALCRWCGKVRETVPHISGQCYKTKNARIKRHNRVVSAVVDKVGKLGWKAMIEPHLRNSKGELRKPDIIFIKGDTAVVVDVTVRWEDNAGSLEQAHSEKVAYYLELEEEIKNLTGGKNIHFFGFVLGARGKWSEGNNDLLQLLGMDRSKNFKESICRLVLYSTIGMMAIFSDR

SEQ ID NO: 9281 - protein, 1260 aa, Terrapene carolina
MEKSNLYFYTGLALDRVNNAPAVGFDAPADSVKYIRGVIRVAGPMDKMVWTIMKSHEHESENQVLPVEHGEEVEENVCDDHGEEILSILPMVFTRDTFNDLTMESFNPDFKYLSTFDDPYVSESGYLNAHLVNGSSLLNSFRPSTDFNRDRNKDLNSTGSNINLLESSSWKDGVFYLEYPVDSFNCPICPQILPTFGKWAKHINVVHKSKAIRVVCSKCGKSSQYHNIACHYPKCIPKKADTPMKSHTCSVCGLGFHTRSGLSQHCRHRHPAVRNEQRKEDMAAKSKIKEGSTRSRIWTKDEVAQLIQLERKYIGKRNINKCIESEMRTKTNKQISDKRRELAKKKLVVTGDREEVTEVEDIRVNILEIPPPRERIFPLKGHPEVDLVEKICKRGKQSREGREIINSLGEIEGLLKEDLTKALGWAMLEKVCYSLVEGKDPRNESQIELRNKGKGKMRKEGRRKQFNAIRRYATKKAKYKFYQQLFDKDRRRLTRIIMGEPDKAKCAIPMKEIEEYYVNILGTIGHGNMIGWPSSTENADNDILMSPISVDEIRIALREIRKDSAPGPDKVKVSNLWDIFNLDSLILTKIFNIWFLNRQVPDEFKKNRTILIPKTQDEEEMKKLTSWRPLTIGSVWIRIYTKILAKRLVETVKICSRQKGFISAPGCEENIAILDNLIKGAKRNGNEIAIVFVDLAKAFDSVGHGHIIAGLRRFGIDEHFIDIIRDLYDNCTTRVWVGDEATESILIRRGVKQGDPLSPILFNIAMDPLLTRLEVEGSGFYVKGNGVTSLAFADDVAILSSSYKGMIKNLGILEEFCKNTNLSVNVKKTKGFHILTKHKTYVVNPKDNWQIGSEEIEYVQPGDFEKYLGARIDPWIGVGGPVLKEKLKDWSENLIKAPLKPAQKILILQTYILPKLFYNLLLIEPPFNLLDDLDVLVRKIVKEILHLPQCTTDGIFYSRGRDGGLALTKFSVQIPNMLIRKWRRHIVSRDDWMDLSYLYAGENLVDKILSFSAVTSHPKKWREEEFLRWSELRCQGIGIKYFKNDLISNSIFRNSTKVKSSAYIAALQLRANIYPTRETLARGRGGVNALCRWCGKVRETVPHISGQCYKTKNARIKRHNRVVSAVVDKVGKLGWKAMIEPHLRNSKGELRKPDIIFIKGDTAVVVDVTVRWEDNAGSLEQAHSEKVAYYLELEEEIKNLTGGKNIHFFGFVLGARGKWSEGNNDLLQLLGMDRSKNFKESICRLVLYSTIGMMAIFSDR

SEQ ID NO: 9282 - protein, 1145 aa, Terrapene carolina
MEKSNLYFYTGLALDRVNNAPAVGFDAPADSVKYIRGVIRVAGPMDKMVWTIMKSHEHESENQVLPVEHGEEVEENVCDDHGEEILSILPMVFTRDTFNDLTMESFNPDFKYLSTFDDPYVSESGYLNAHLVNGSSLLNSFRPSTDFNRDRNKDLNSTGSNINILESSSWKDGVFYLEYPVDSFNCPICPQILPTFGKWAKHINVVHKSKAIRVVCSKCGKSSQYHNIACHYPKCIPKKADTPMKSHTCSVCGLGFHTRSGLRQHCRHRHPAVRNEQRKEDMAAKSKIKEGSTRSRIWTKDEVAQLIQLERKYIGKRNINKCIESEMRTKTNKQISDKRRELAKKKLVVTGDREEVTEVEDIRVNILEIPPPRERIFPLKGHPEVDLVEKICKRGKQSREGREIINSLGEIEGLLKEDLTKDLGWAMLEKLCYSLIEGKDPRNESQIELRNKGKGKMRKEGRRKQFNAIRRYATKKAKYKFYQQLFDKDRRLTRIIMGEPDKAKCAIPMKEIEEYYVNILGTIGHGNMIGWPSSTENADNDILMSPISVDEIRIALREIRKDSAPGPDKVKVSNLWDIFNLDSLILTKIFNIWFLNRQVPDEFKKNRTILIPKTQDEEEMKKLTSWRPLTIGSVWIRIYTKILAKRLVETVKICSRQKGFISAPGCEENIAILDNLIKGAKRNGNEIAIVFVDLAKAFDSVGHGHIIAGLRRFGIDEHFIDIIRDLYDNCTTRVWVGDEATESILIRRGVKQSDPLSPILFNIAMDPLLTRLEVEGSGFYVKGNGVTPLAFADDVAILSSSYKGMIKNLGILEEFCKNTNLSVNVKKTKGFHILTKHKTYVVNPKDNWQIGSEEIEYVQPGDFEKYLGARIDPWIGVGGPVLKEKLKDWSENLIKAPLKPAQKILILPTYILPKLFYNLLLIEPPFNLLDDLDVLVRKIVKEILHLPQCTTDGIFYSRGRDGGLALTKFSVQIPNMLIRKWRRHIVSRDDWMDLSYLYAGENLVDKILSFSAVTSHPKKWREEEFLRWSELRCQGIGIKYFKNDLISNSIFRNSSKVKSSAYIAALQLRANIYPTRETLARGRGGVNALCRWCGKVRETVPHISGQCYKTKNARIKRHNRVVSAVVDKVGKLGWKAMIEPHLRNS

SEQ ID NO: 9283 - protein, 1260 aa, Terrapene carolina
MEKSNLYFYTGLALDRVNNAPAVGFDAPADSVKYIRGVIRVAGPMDKMVWTIMKSHEHESENQVLPVEHGEEVEENVCDDHGEEILSILPMVFTRDTFNDLTMESFNPDFKYLSTFDDPYVSESGYLNAHLVNGFSLLNSFRPSTDFNRDRNKDLNSTGSNINILESSSWKDGVFYLEYPVDSFNCPICPQILPTFGKWAKHINVVHKSKAIRVVCSKCGKSSQYHNIACHYPKCIPKKADTPMKSHTCSVCGLGFHTRSGLSQHCRHRHPAVRNEQRKEDMAAKSKIKEGSTRSRIWTKDEVAQLIQLERKYIGKRNINKCIESEMRTKTNKQISDKRRELAKKKLVVTGDREEVTEVEDIRVNILEIPPPRERIFPLKGHPEVDLVEKICKRGKQSREGREIINSLGEIEGLLKEDLTKALGWAMLEKLCYSLVEGKDPRNESQIELRNKGKGKMRKEGRRKQFNAIRRYATKKAKYKFYQQLFDKDRRRLTRIIMGEPDKAKCAIPMKEIEEYYVNILGTIGHGNMIGWPSSTENADNDILMSPISVDEIRIALSEIRKDSAPGPDKVKVSNLWDIFNLDSLILTKIFNIWFLNRQVPDEFKKNRTILIPKTQDEEEMKKLTSWRPLTIGSVWIRIYTKILAKRLVETVKICSRQKGFISAPGCEENIAILDNLIKGAKRNGNEIAIVFVDLAKAFDSVGHGHIIAGLRRFGIDEHFIDIIRDLYDNCTTRVWVGDEATESILIRRGVKQGDPLSPILFNIAMDPLLTRLEVEGSGFYVKGNGVTSLAFADDVAILSSSYKGMIKNLGILEEFCKNTNLSVNVKKTKGFHILTKHKTYVVNPKDNWQIGSEEIEYVQPGDFEKYLGARIDPWIGVGGPVLKEKLKDWSENLIKAPLKPAQKILILQTYILPKLFYNLLLIEPPFNLLEDLDVLVRKIVKEILHLPQCTTDGIFYSRGRDGGLALTKFSVQIPNMLIRKWRRHIVSRDDWMDLSYLYAGENLVDKILSFSAVTSHPKKWREEEFLRWSELRCQGIGIKYFKNDLISNSIFRNSSKVKSSAYIAALQLRANIYPTRETLARGRGGVNALCRWCGKVRETVPHISGQCYKTKNARIKRHNRVVSAVVDKVGKLGWKAMIEPHLRNSKGELRKPDIIFIKGDTAVVVDVTVRWEDNAGSLEQAHSEKVAYYLELEEEIKNLTGGKNIHFFGFVLGARGKWSEGNNDLLQLLGMDRSKNFKESICRLVLYSTIGMMAIFSDR

SEQ ID NO: 9284 - protein, 1241 aa, Trachemys scripta
MEKSNLYFYTGLALDRVNNAPAVGFDAPADSVKYIRGVIRVDGPMDKMVWTIMKSHEHESENQVLPVEHGEEVEENVCDDHGEEILSILPMVFTRDTFNDLTMDSFNPDFKYLSTFDDPYVRESSTDFNRDRNKDLNSIGSNINILESSSWKDGVFYLEYPVDSFNCPICPQILPTFGKWAKHINVVHKSKAIRVVCSKCGKSSQYHNIACHYPRCIPKKADTPMKSHTCSVCGLGFHTRSGLSQHCRHRHPAVRNEQRKEDMAAKSKIKEGSTRSRIWTKDEVVQLIQLERKYIGKRNIDKCIESEMRTKTNKQISDKRRELAKKKLVVTGDREEVTEVEDIRVNILEIPPPRERIFPLKGHPEVDLVEKICKRGKQSREGREIINSLGEIEGLLKEDLTKALGWAMLEKLCYSLVEGQDPRNESQIELRNKGKGKIRKEGRRKQFNAIRRYATKKAKYKFYQQLFDKDRRRLTRIIMGEPDKAKCAIPMKEIEQYYVNILGTIGHGNMIGWPSSTENADNDILMSPISVDEIRIALTEIRKDSAPGPDKVKVSNLWDIFNLDSLILTKIFNIWFLNRQVPDEFKKNRTILIPKTQDEEEMKKLTSWRPLTIGSVWIRIYTKILAKRLVETVKICSRQKGFISAPGCEENIAILDNLIKGAKRNGNEIAIVFVDLAKAFDSVGHGHIIAGLRRFGIDEHFIDIIRDLYDNCTTRVWVGDEATESILIRRGVKQGDPLSPILFNIAMDPLLTRLEVEGSGFYVKGNSVTSLAFADDVAILSSSYKGMIKNLGILEEFCKNTNLSVNVKKTKGFHILTKHKTYVVNPKDNWQIGSEKIEYVQPGDFENYLGARIDPWIGVGGPVLKEKLKDWSENLIKAPLKPAQKILILQTYILPKLFYNLLLIEPPFNLLDDLDVLVRKIVKEILHLPQCTTDGIFYSRGRDGGLALTKFSVQIPNMLIRKWRRHIVSRDDWMDLSYLYAGENLVDKILSFSAVTSHPKKWREEEFLRWSELRYQGIGIKYFKNDLISNSIFRNSSKVKSSAYIAALQLRANIYPTRETLARGRGGVNALCRWCSKVRETVPHISRQCYKTKNARIKRHNRVVAAVVDKVGKLGWKAMIEPHLRNSKGELRKPDIVFIKGDTAVVVDVTVRWEDNAGSLEQAHSEKVAYYLELEEEIKNLTGGKNIHFFGFVLGARGKWSEGNNDLLQLLGMDRSKNFKESICRLVLYSTIGMMAIFSDR

SEQ ID NO: 9285 - protein, 1260 aa, Actinemys marmorata
MEKSNLYFYTGLALDRVNNAPAVGFDAPADSVKYIRGVIRVAGPMDKMVWTIMKSHEHESENQVLPVEHGEEVEENVCDDHGEEILSILPMVFTRDTFNDLTMESFNPDFKYLSTFDDPYVRESGYLNAHLVNGSSLLNSFRPSTDFNRDRNKDLNSTGSNINILESSSWKDGVFYLEYPVDSFNCPICPQILPTFGKWAKHINVVHKSKAIRVVCSKCGKSSQYHNIACHYPKCIPKKADTPMKSHTCSVCGLGFHTRSGLSQHCRHRHPAVRNEQRKEDMAAKSKIKEGSTRSRIWTKDEVAQLIQLERKYIGKRNINKCIESEMRTKTNKQISDKRRELAKKKLVVTGDREEVTEVEDIRVNILEIPPPRERIFPLKGHPEVDLVEKICKRGKQSREGREIINSLGEIEGLLKEDLTKALGWAMLEKLCYSLVEGKDPRNESQIELRNKGNGKMRKEGRRKQFNAIRRYATKKAKYKFYQQLFDKDRRRLTRIIMGEPDKAKCAIPMKEIEEYYVNILGTIGHGNMIGWPSSTENVDNDILMSPISVDEIRIALREIRKDSAPGPDKVKVSNLWDIFNLDSLILTKFFNIWFLNRQVPDEFKKNRTILIPKTQDEEEMKKLTSWRPLTIGSVWIRIYTKILAKRLVETVKICSRQKGFISAPGCEENIAILDNLIKGAKRNGNEIAIVFVDLAKAFDSVGHGHIIAGLRRFGIDEHFIDIIRDLYDNCTTRVWVGNEATESILIRRGVKQGDPLSPILFNIAMDPLLTRLEVEGSGFYVKGNSVTSLAFADDVAILSSSYKGMIKNLGILEEFCKNTNLSVNVKKTKGFHILTKHKTYVVNPKDNWQIGSEEIEYVQPGDFEKYLGARIDPWIGVGGPVLKEKLKDWSENLIKAPLKLAQKILILQTYILPKLFYNLLLIEPPFNLLDDLDVLVRKIVKKILHLPQCTTDGIFYSRGRDGGLALTKFSVQIPNMLIRKWRRHIVSRDDWMDLSYLYAGENLVDKILSFSAVTSHPKKWREEEFLRWSELRCQGIGIKYFKNDLISNSIFRNSSKVKSSAYIAALQLRANIYPTRETLARGRGGANALCRWCGKVRETVPHISGQCYKTKNARIKRHNRVVSAVVDKVGKLGWKAMIEPHLRNSKGELRKPDIIFIKGDTAVVVDVTVRWEDNAGSLEQAHSEKVAYYLELEEEIKNLTGGKNIHFFGFVLGARGKWSEGNNDLLQLLGMDRSKNFKESICRLVLYSTIGMMAIFSDR

SEQ ID NO: 9286 - protein, 1241 aa, Chrysemys picta
MEKSNLYFYTGLALDRVNNAPAVGFDAPADSVKYIRGVIRVAGPMDKMVWTIMKSHENESENQVLPVEHGEEVEENVCDDHGEEILSILPMVFTRDTFNDLTMDSFNPDFKYLSTFDDPYVRESSTDFNRDRNKDLNSIGSNINILESSSWKDGVFYLEYPVDSFNCPICPQILPTFGKWAKHINVVHKSKAIRVVCSKCGKSSQYHNIACHYPKCIPKKADTPMKSHTCSVCGLGFHTRSGLSQHCRHRHPAVRNEQRKEDMAAKSKIKEGSTRSRIWTKDEVAQLIQLERKYIGKRNINKCIESEMRTKTNKQISDKRRELAKKKLVVTGDREEVTEVEDIRVNILEIPPPRERIFPLKGHPEVDLVEKICKRGKQSREGREIINSLGEIEGLLKEDLTKALGWAMLEKLCYSLVEGQDPRNESQIELRNKGKGKIRKEGRRKQFNAIRRYATKKAKYKFYQQLFDKDRRRLTRIIMGEPDKAKCAIPMKEIEEYYVNILGTIGHGNMIGWPSSTENADNDILMSPISVDEIRIALTEIRKDSAPGPDKVKVSNLWDIFNLDSLILTKIFNIWFLNRQVPDEFKKNRTILIPKTQDEEEMKKLTSWRPLTIGSVWIRIYTKILAKRLVETVKICSRQKGFISAPGCEENIAILDNLIKGAKRNGNEIAIVFVDLAKAFDSVGHGHIIAGLRRFGIDEHFIDIIRDLYDNCTTRVWEGNEATESILIRRGVKQGDPLSPILFNIAMDPLLTRLEVEGSGFYVKGNSVTSLAFADDVAILSSSYKGMIKNLGILEEFCKNTNLSVNVKKTKGFHILTKHKTYVVNPKDNWQIGSEKIEYVQPGDFEKYLGARIDPWIGVGGPVLKEKLKDWSENLIKAPLKPAQKILILQTYILPKLFYNLLLIEPPFNLLDDLDVLVRKIVKEILHLPQCTTDGIFYSRGRDGGLALTKFSVQIPNMLIRKWRRHIVSRDDWMDLSYLYAGENLVDKILSFSAVTSHPKKWREEEFLRWSELRCQGIGIKYFKNDLISNSIFRNSSKVKSSAYIAALQLRANIYPTRETLARGRGGVNALCRWCGKVRETVPHISGQCYKTKNARIKRHNRVVSAVVDKVGKLGWKAMIEPHLRNSKGELRKPDIIFIKGDTAVVVDVTVRWEDNAGSLEQAHSEKVAYYLELEEEIKNLTGGKNIHFFGFVLGARGKWSEGNNDLLQLLGMDRSKNFKESICRLVLYSTIGMMAIFSDR

SEQ ID NO: 9287 - protein, 1241 aa, Chrysemys picta
MEKSNLYFYTGLALDRVNNAPAVGFDAPADSVKYIRGVIRVAGPMDKMVWTIMKSHENESENQVLPVEHGEEVEENVCDDHGEEILSILPMVFTRDTFNDLTMDSFNPDFKYLSIFDDPYVRESSTDFNRDRNKDLNSIGSNINILESSSWKDGVFYLEYPVDSFNCPICPQILPTFGKWAKHINVVHKSKAIRVVCSKCGKSSQYHNIACHYPKCIPKKADTPMKSHTCSVCGLGFHTRSGLSQHCRHRHPAVRNEQRKEDMAAKSKIKEGSTRSRIWTKDEVAQLIQLERKYIGKRNINKCIESEMRTKTNKQISDKRRELAKKKLVVTGDRGEVTEVEDIRVNILEIPPPRERIFPLKGHPEVDLVEKICKRGKQSREGREIINSLGEIEGLLKEDLTKALGWAMLEKLCYSLVEGQDPRNESQIELRNKGKGKIRKEGRRKQFNAIRRYATKKAKYKFYQQLFDKDRRRLTRIIMGEPAKAKCAIPMKEIEEYYVNILGTIGHGNMIGWPSSTENADNDILMSPISVDEIRIALTEIRKDSAPGPDKVKVSNLWDIFNLDSLILTKNFNIWFLNRQVPDEFKKNRTILIPKTQDEEEMKKLTSWRPLTIGSVWIRIYTKILAKRLVETVKICNRQKGFISAPGCEENIAILDNLIKGAKRNGNEIAIVFVDLAKAFDSVGHGHIIAGLRRFGIDEHFIDIIRDLYDNCTTRVWVGDEATESILIRRGVKQGDPLSPILFNIAMDPLLTRLEVEGSGFYVKGNSVTSLAFADDVAILSSSYKGMIKNLGILEEFCKNTNLSVNVKKTKGFHILTKHKTYVVNPKDNWQIGSEKIEYVQPGDFEKYLGARIDPWIGVGGPVLKEKLKDWSENLIKAPLKPAQKILILQTYILPKLFYNLLLIEPPFNLLDDLDVLVRKIVKEILHLPQCTTDGIFYSRGRDGGLALTKFSVQIPNMLIRKWRRHIVSRDDWMDLSYLYAGENLVDKILSFSAVTSHPKKWREEEFLRWSELRCQGIGIKYFKNDLISNSIFRNSSKVKSSAYIAALQLRANIYPTRETLARGRGGVNALCRWCGKVRETVPHISGQCYKTKNARIKRHNRVVSAVVDKVGKLGWKAMIEPHLRNSKGELRKPDIIFIKGDTAVVVDVTVRWEDNAGSLEQAHSEKVAYYLELEEEIKNLMGGKNIHFFGFVLGARGKWSEGNNDLLQLLGMDRSKNFKESICRLVLYSTIGMMAIFSDR

SEQ ID NO: 9288 - protein, 1192 aa, Terrapene carolina
MEKSNLYFYTGLALDRVNNAPAVGFDAPADSVKYIRGVIRVAGPMDKMVWTIMKSHEHESENQVLPVEHGEEVEENVCDDHGEEILSILPMVFTRDTFNDLTMESFNPDFKYLSTFDDPYVSESGYLNAHLVNGSSLLNSFRPSTDFNRDRNKDLNSTGSNINILESSSWKDGVFYLEYPVDSFNCPICPQILPTFGKWAKHINVVHKSKAIRVVCSKCGKSSQYHNIACHYPKCIPKKADTPMKSHTCSVCGLGFHTRSGLSQHCRHRHPAVRNEQRKEDMAAKSKIKEGSTRSRIWTKDEVAQLIQLERKYIGKRNINKCIESEMRTKTNKQISDKRRELAKKKLVVTGDREEVTEVEDIRVNILEIPPPRERIFPLKGHPEVDLVEKICKRGKQSREGREIINSLGEIEGLLKEDLTKALGWAMLEKLCYSLVEGKDPRNESQIELRNKGKGKMRKEGRRKQFNAIRRYATKKAKYKFYQQLFDKDRRRLTRIIMGEPDKAKCAIPMKEIEEYYVNILGTIGHGNMIGWPSSTENADNDILMSPISVDEIRIALREIRKDSAPGPDKVKVSNLWDIFNLDSLILTKIFNIWFLNRQVPDEFKKNRTILIPKTQDEEEMKKLTSWRPLTIGSVWIRIYTKILAKRLVETVKICSRQKGFISAPGCEENIAILDNLIKGAKRNGNEIAIVFVDLAKAFDSVGHGHIIAGLRRFGIDEHFIDIIRDLYDNCTTRVWVGDEATESILIRRGVKQGDPLSPILFNIAMDPLLTRLEVEGSGFYVKGNGVTSLAFADDVAILSSSYKGMIKNLGILEEFCKNTNLSVNVKKTKGFHILTKHKTYVVNPKDNWQIGSEEIEYVQPEDFEKYLGARIDPWIGVGGPVLKEKLKDWSENLIKAPLKPAQKILILQTYILPKLFYNLLLIEPPFTLLDDLDVLVRKIVKEILHLPQCITDGIFYSRGRDGGLALTKFSVQIPNMLIRKWRRHIVSRDDWMELSYLYAGENLVDKILPFSAVTSHPKKWREEEFLRWSELRCQGIGIKYFKNDLISNSIFRNSSKVKSSAYIAALQLRANIYPTRETLARGRGGVNALCRWCGKVRETVPHISGQCYKTKNARIKRHNRVVSAVVDKVGKLGWKAMIEPHLRNSKGELRKPDIIFIKEIQQWWLMLQCDGRIMPEVWNKPTVRRWLIILS

SEQ ID NO: 9289 - protein, 1260 aa, Terrapene carolina
MEKSNLYFYTGLALDRVNNAPAVGFDAPADSVKYIRGVIRVAGPMDKMVWTIMKSHEHESENQVLPVEHGEEVEENVCDDHGEEILSILPMVFTRDTFNDLTMESFNPDFKYLSTFDDPYVSESGYLNAHLVNGSSLLNSFRPSTDFNRDRNKDLNSTGSNINILESSSWKDGVFYLEYPVDSFNCPICPQILPTFGKWAKHINVVHKSKAIRVVCSKCGKSSQYHNIACHYPKCIPKKADTPMKSHTCSVCGLGFHTKSGLSQHCRHRHPAVRNEQRKEDMAAKSKIKEGSTRSRIWTKDEVAQLIQLERKYIGKRNINKCIESEMRTKTNKQISDKRRELAKKKLVVTGDREEVSEVEDIRVNILEIPPPRERIFPLKGHPEVDLVEKICKRGKQSREGREIINSLGEIEGLLKEDLTKALGWAMLEKVCYSLVEGKDPRNESQIELRNKGKGKMRKEGRRKQFNAIRRYATKKAKYKFYQQLFDKDRRRLTRIIMGEPDKAKCAIPMKEIEEYYVNILGTIGHGNMIGWPSSTENADNDILMSPISVDEIRIALREIRKDSAPGPDKVKVSNLWDIFNLDSLILTKIFNIWFLNRQVPDEFKKNRTILIPKTQDEEEMKKLTSWRPLTIGSVWIRIYTKILAKRLVETVKICSRQKGFISAPGCEENIAILDNLIKGAKRNGNEIAIVFVDLAKAFDSVGHGHIIAGLRRFGIDEHFIDIIRDLYDNCTTRVWVGDEATESILIRRGVKQGDPLSPILFNIAMDPLLTRLEVEGSGFYVKGNGVTSLAFADDVAILSSSYKGMIKNLGILEEFCKNTNLSVNVKKTKGFHILTKHKTYVVNPKDNWQIGSEEIEYVQPGDFEKYLGARIDPWIGVGGPVLKEKLKDWSENLIKAPLKPAQKILILQTYILPKLFYNLLLIEPPFNLLDDLDVLVRKIVKEILHLPQCTTDGIFYSRGRDGGLALTKFSVQIPNMLIRKWRRHIVSRDDWMDLSYLYAGENLVDKILSFSAVTSHPKKWREEEFLRWSELRCQGIGIKYFKNDLISNSIFRNSTKVKSSAYIAALQLRANIYPTRETLARGRGGVNALCRWCGKVRETVPHISGQCYKTKNARIKRHNRVVSAVVDKVGKLGWKAMIEPHLRNSKGELRKPDIIFIKGDTAVVVDVTVRWEDNAGSLEQAHSEKVAYYLELEEEIKNLTGGKNIHFFGFVLGARGKWSEGNNDLLQLLGMDRSKNFKESICRLVLYSTIGMMAIFSDR

SEQ ID NO: 9290 - protein, 1260 aa, Terrapene carolina
MEKSNLYFYTGLALDRVNNAPAVGFDAPADSVKYIRGVIRVAGPMDKMVWTIMKSHEHESENQVLPVEHGEEVEENVCDDHGEEILSILPMVFTRDTFNDLTMESFNPDFKYLSTFDDPYVSESGYLNAHLVNGSSLLNSFRPSTDFNRDRNKDLNSTGSNINILESSSWKDGVFYLEYPVDSFNCPICPQILPTFGKWAKHINVVHKSKAIRVVCSKCGKSSQYHNIACHYPKCIPKKADTPMKSHTCSVCGLGFHTRSGLSQHCRHRHPAVRNEQRKEDMAAKSKIKEGSTRSRIWTKDEVAQLIQLERKYIGKRNINKCIESEMRTKTNKQISDKRRELAKKKLVVTGDREEVTEVEDIRVNILEIPLPRERIFPLKGHPEVDLVEKICKRGKQSREGREIINSLGEIEGLLKEDLTKALGWAMLEKLCYSLVEGKDPRNESQIELRNKGKGKMRKEGRRKQINAIRRYATKKAKYKFYQQLFDKDRRRLTRIIMGEPDKAKCAIPMKEIEQYYVNILGTIGHGNMIGWPSSTENADNDILMSPISVDEIRIALREIRKDSAPGPDKVKVSNLWDIFNLDSLLLTKIFNIWFLNRQVPDEFKKNRTILIPKTQDEEEMKKLTSWRPLTIGSVWIRIYTKILAKRLVETVKICSRQKGFISAPGCEENIAILDNLIKGAKRNGNEIAIVFVDLAKAFDSVGHGHIIAGLRRFGIDEHFIDIIRDLYDNCTTRVWVGDEATESILIRRGVKQGDPLSPILFNIAMDPLLTRLEVEGSGFYVKGNGVTSLAFADDVAILSSSYKGMIKNLGILEEFCKNTNLSVNVKKTKGFHILTKHKTYVVNPKDNWQIGSEEIEYVQPGDFEKYLGARIDPWIGVGGPVLKEKLKDWSENLIKAPLKPAQKILILQTYILPKLFYNLLLIEPPFNLLDDLDVLVRKIVKEILHLPQCTTDGIFYSRGRDGGLALTKFSVQIPNMLIRKWRRHIVSRDDWMDLSYLYAGENLVDKILSFSAVTSHPKKWREEEFLRWSELRCQGIGIKYFKNDLISNSIFRNSSKVKSSAYIAALQLRANIYPTRETLARGRGGVNALCRWCGKVRETVPHISGQCYKTKNARIKRHNRVVSAVVDKVGKLGWKAMIEPHLRNSKGELRKPDIIFIKGDTAVVVDVTVRWEDNAGSLEQAHSEKVAYYLELEEEIKNLTGGKNIHFFGFVLGARGKWSEGNNDLLQLLGMDRSKNFKESICRLVLYCTIGMMAIFSDR

SEQ ID NO: 9291 - protein, 1183 aa, Trachemys scripta
MLLLKSSSSSPTTLTPSLLPMNPFIGLLLLPASNSSALLSILGLAQIFPSTISVLIFSYCPYYRVTIRPDLPGHVLFFVLKIASGGICKALTMSGISPSPGIAERAAGRAAGKSRAGLWSSWRGAPPCILSKCLSTKCSPPLLQLGAVTAMQRSKTGARALCADTRAAPPLWETRGLGFHTRSGLSQHCRHRHPAVRNEQRKEDMAAKSKIKEGSTRSRIWTKDEVAQLIQLERKYIGKRNINKCIESEMRTKTNKQISDKRRELAKKKLVVTGDREEVTEVEDIRVNILEIPPPRERIFPLKGHPEVDLVEKICKRGKQSREGREIINSLGEIEGLLKEDLTKALGWAMLEKLCYSLVEGKDPRNESQIELRNKGKGKMRKEGRRKQFNAIRRYATKKAKYKFYQQLFDKDRRRLTRIIMGEPDKAKCAIPMKEIEEYYVNILGTIGHGNMIGWPSSTENADNDILMSPISVDEIRIALREIRKDSAPGPDKVKVSNLWDIFNLDSLILTKIFNIWFLNRQVPDEFKKNRTILIPKTQDEEEMKKLTSWRPLTIGSVWIRIYTKILAKRLVETVKICSRQKGFISAPGCEENIAILDNLIKGAKRNGNEIAIVFVDLAKAFDSVGHGHIIAGLRRFGIDEHFIDIIRDLYDNCTTRVWVGDEATESILIRRGVKQGDPLSPILFNIAMDPLLTRLEVEGSGFYVKGNSVTSLAFADDVAILSSSYKGMIKNLGILEEFCKNTNLSVNVKKTKGFHILTKHKTYVVNPKDNWQIGSEEIEYVQPGDFEKYLGARIDPWIGVGGPVLKEKLKDWSENLIKAPLKPAQKILILQTYILPKLFYNLLLIEPPFNLLDDLDVLVRKIVKEILHLPQCTTDGIFYSRGRDGGLALTKFSVQIPNMLIRKWRRHIVSRDDWMDLSYLYAGENLVDKILSFSAVTSHPKKWREEEFLRWSELRCQGIGIKYFKNDLISNSIFRNSSKVKSSAYIAALQLRANIYPTRETLARGRGGVNALCRWCGKVRETVPHISGQCYKTKNARIKRHNRVVSAVVDKVGKLGWKAMIEPHLRNSKGELRKPDIIFIKGDTAVVVDVTVRWEDNAGSLEQAHSEKVAYYLELEEEIKNLTGGKNIHFFGFVLGARGKWSEGNNDLLQLLGMDRSKNFKESICKLVLYSTIGMMTIFSDR

SEQ ID NO: 9292 - protein, 1260 aa, Actinemys marmorata
MEKSNLYFYTGLALDRVNNAPAVGFDAPADSVKYIRGVIRVAGPMDKMVWTIMKSHEHESENQVHPVEHGEEVEENVCDDHGEEILSILPMVFTRDTFNDLTMESFNPDFKYLSTFDDPYVRESGYLNAHLVNGSSLLNSFRPSTDFNRDRNKDLNSTGSNINILESSSWKDGVFYLEYPVDSFNCPICPQILPTFGKWAKHINVVHKSKAIRVVCSKCGKSSQYHNIACHYPKCIPKKADTPMKSHTCSVCGLGFHTRSGLSQHCRHRHPAVRNEQRKEDMAAKSKIKEGSTRSRIWTKDEVAQLIQLERKYIGKRNINKCIESEMRTKTNKQISDKRRELAKKKLVVTGDREEVTEVEDIRVNILEIPPPRKRIFPLKGHPEVDLVEKICKRGKQSREGREIINSLGEIEGLLKEDLTKALGWAMLEKLCYSLVEGKDPRNESQIELRNKGKGKMRKEGRRKQFNAIRRYATKKAKYKFYQQLFDKDRRRLTRIIMGEPDKAKCAIPMKEIEEYYVNILGTVGHGNMIGWPSSTENADNDILMSPISVDEIRIALREIRKDRAPGPDKVKVSNLWDIFNLDSLILTKIFNIWFLNRQVPDEFKKNRTILIPKTQDEEEMKKLTSWRPLTIGSVWIRIYTKILAKRLVETVKICSRQKGFISAPGCEENIAILDNLIKGAKRNGNEIAIVFVDLAKAFDSVGHGHIIAGLRRFGIDEHFIDIIRDPYDNCTTRVWVGDEATESILIRRGVKQGDPLSPILFNIAMDPLLTRLEVEGSGFYVKGNSVTSLAFADDVAILSSSYKGMIKNLGILEEFCKNTNLSVNVKKTKGFHILTKHKTYVVNPKDNWQIGSEEIEYVQPGDFEKYLGARIDPWIGVGGPVLKEKLKDWSENLIKAPLKPAPKILILQTYILPKLFYNLLLIEPPFNLLDDLDVLVRKIVKEILHLPQCTTDGIFYSRGRDGGVALTKFSVQIPNMLIRKWRRHIVSRDDWMDLSYLYAGENLVDKILSFSAVTSHPKKWREEEFLRWSELRCQGIGIKYFKNDLISNSIFRNSSKVKSSAYIAALQLRANIYPTRETLARGRGGVNALCRWCGKVRETVPHISGQCYKTKNARIKRHNRVVSAVVDKVGKLGWKAMIEPHLRNSKGELRKPDIIFIKGDTAVVVDVTVRWEDNAGSLEQAHSEKVAYYLELEEEIKNLTGGKNIHFFGFVLGARGKWSEGNNDLLQLLGMDRSKNFKESICRLVLYSTIGMMAIFSDR

SEQ ID NO: 9293 - protein, 1216 aa, Actinemys marmorata
MEKSNLYFYTGLALDRVNNAPAVGFDAPADSVKYIRGVIRVAGPMDKMVWTIMKSHEHESENQVLPVEHGEEVEENVCDDHGEEILSILPMVFTRDTFNDLTMESFNPDFKYLSTFDDPYVRESGYLNAHLVNGSSLLNSFRPSTDFNRDRNKDLNSTGSNINILESSSWKDGVFYLEYPVDSFNCPICPQILPTFGKWAKHINVVHKSKAIRVVCSKCGKSSQYHNIACHYPKCIPKKADTPMKSHTCSVCGLGFHTRSGLSQHCRHRHPAVRNEQRKEDSEMRTKTNKQISDKRRELAKKKLVVTGDREEVTEVEDIRVNILEIPPPRERIFPLKGHPEVDLVEKICKRGKQSREGREIINSLGEIEGLLKEDLTKALGWAMLEKLCYSLVEGKDPRNESQIELRNKGKGKMRKEGRRKQFNAIRRYATKKAKYKFYQQLFDKDRRRLTRIIMGEPDKAKCAIPMKEIEEYYVNILGTIGHGNMIGWPSSTENADNDILMSPISVDEIRIALREIRKDSAPGPDKVKVSNLWDIFNLDSLILTKIFNIWFLNRQVPDEFKKNRTILIPKTQDEEEMKKLTSWRPLTIGSVWIRIYTKILAKRLVETVKICSRQKGFISAPGCEENIAILDNLIKGAKRNGNEIAIVFVDLAKAFDSVGHGHIIAGLRRFGIDEHFIDIIRDLYNCTTRVWVGDEATESILIRRGVKQGDPLSPILFNIAMDPLLTRLEVEGSGFYVKDNSVTSLAFADDVAILSSSYKGMIKNLGILEEFCKNTNLSVNVKKTKGFHILTKHKTYVVNPKDNWQIGSEEIEYVQPGDFEKYLGARIDPWIGVGGPVLKEKLKDWSENLIKAPLKPTQKILILQTYILPKLFYNLLLIEPPFNLLDDLDVLVRKIVKEILHLPQCTTDGIFYSRGRDGGLALTKFSVQIPNMLIRKWRRHIVSRDDWMDLSYLYAGENLVDKILSFSAVTSHPKKWREEEFLRWSELRCQGIGIKYFKNDLISNSIFRNSSEVKSSAYIAALQLRANIYPTRETLARGRGGVNALCRWCGKVRETVPHISGQCYKTKNARIKRHNRVVSAVVDKVGKLGWKAMIEPHLRNSKGELRKPDIIFIKGDTAVVVDVTVRWEDNAGSLEQAHSEKVAYYLELEEEIKNLTGGKNIHFFGFVLGARGKWSEGNNDLLQLLGMDRSKNFKESICRLVLYSTIGMMAIFSDR

SEQ ID NO: 9294 - protein, 1241 aa, Chrysemys picta
MEKSNLYFYTGLALDRVNNAPAVGFDAPADSVKYIRGVIRVAGPMDKMVWTIMKSHENESENQVLPVEHGEEVEENVCDDHGEEILSILPMVFTRDTFNDLTMDSFNPDFKYLSTFDDPYVRESSTDFNRDRNKDLNSIGSNINILESSSWKDGLFYLEYPVDSFNCPICPQILPTFGKWAKHINVVHKSKAIRVVCSKCGKSSQYHNIACHYPKCIPKKADTPMKSHTCSVCGLGFHTRSGLSQHCRHRHPAVRNEQRKEDMAAKSKIKEGSTRSRIWTKDEVAQLIQLERKYIGKRNINKCIESEMRTKTNKQISDKRRELAKKKLVVTGDREEVTEVEDIRVNILEIPPPRERIFPLKGHPEVDLVEKICKRGKQSREGREIINSLGEIEGLLKEDLTKALGWAMLEKLCYSLVEGQDPRNESQIELRNKGKGKIRKEGRRKQFNAIRRYATKKAKYKFYQQLFDKDRRRLTRIIMGEPDKAKCAIPMKEIEEYYVNILGTIGHGNMIGWPSSTENADNDVLMSPISVDEIRIALTEIRKDSAPGPDKVKVSNLWDIFNLDSLILTKIFNIWFLNRQVPDEFKKNRTILIPKTQDEEEMKKLTSWRPLTIGSVWIRIYTKILAKRLVETVKICSRQKGFISAPGCEENIAILDNLIKGAKRNGNEIAIVFVDLAKAFDSVGHGHIIAGLRRFGIDEHFIDIIRDLYDNCTTRVWVGDEATESILIRRGVKQGDPLSPILFNIAMDPLLTRLEVEGSGFYVKGNSVTSLAFADDVAILSSSYKGMIKNLGILEEFCKNTNLSVNVKKTKGFHILTKHKTYVVNPKDNWQIGSEKIEYVQPGDFEKYLGARIDPWIGVGGPVLKEKLKDWSENLIKAPLKPAQKILILQTYILPKLFYNLLLIEPPFNLLDDLDVLVRKIVKEILHLPQCTTDGIFYSRGRDGGLALTKFSVQIPNMLIRKWRRHIVSRDDWMDLSYLYAGENLVDKILSFSAVTSHPRKWREEEFLRWSELRCQGIGIKYFKNDLISNSIFRNSSKVKSSAYIAALQLRANIYPTRETLARGRGGVNALCRWCGKVRETVPHISGQCYKTKNARIKRHNRVVSAVVDKVGKLGWKAMIEPHLRNSKGELRKPDIIFIKGDTAVVVDVTVRWEDNAGSLEQAHSEKVAYYLELEEEIKNLTGGKNIHFFGFVLGARGKWSEGNNDLLQLLGMDRSKNFKESICRLVLYSTIGMMAIFSDR

SEQ ID NO: 9295 - protein, 1241 aa, Chrysemys picta
MEKSNLYFYTGLALDRVNNAPAVGFDAPADSVKYIRGVIRVAGPMDKMVWTIMKSHENESENQVLPVEHGEEVEENVCDDHGEEILSILPMVFTRDTFNDLTMDSFNPDFKYLSTFDDPYVRESSTDFNRDRNKDLNSIGSNINILESSSWKDGVFYLEYPVDSFNCPICPQILPTFGKWAKHINVVHKSKAIRVVCSKCGKSSQYHNIACHYPKCIPKKADTPMKSHTCSVCGLGFHTRSGLSQHCRHRHPAVRNEQRKEDMAAKSKIKEGSTRSRIWTKDEVAQLIQLERKYIGKRNINKCIESEMRTKTNKQISDKRRELAKKKLVVTGDREEVTEVEDIRVNILEIPPPRERIFPLKGHPEVDLVEKICKRGKQSREGREIINSLGEIEGLLKEDLTKALGWAMLEKLCYSLVEGQDPRNESQIELRNKGKGKIRKEGRRKQFNAIRRYATKKAKYKFYQQLFDKDRRRLTRIIMGEPDKAKCAIPMKEIEEYYVNILGTIGHGNMIGWPSSTENADNDILMSPISVDEIRIALTEIRKDSAPGPDKVKVSNLWDIFNLDSLILTKIFNIWFLNRQVPDEFKKNRTILIPKTQDEEEMKKLTSWRPLTIGSVWIRIYTKILAKRLVETVKICSRQKGFISAPGCEENIAILDNLIKGAKRNGNEIAIVFVDLAKAFDSVGHGHIIAGLRRFGIDEHFIDIIRDLYDNCTTRVWVGDEATESILIRRGVKQGDPLSPILFNIAMDPLLTRLEVEGSGFYVKGNSVTSLAFADDVAILSSSYKGMIKNLGILEEFCKNTNLSVNVKKTKGFHILTKHKTYVVNPKDNWQIGSEKIEYVQPGDFEKYLGARIDPWIGVGGPVLKEKLKDWSENLIKAPLKPAQKILILQTYILPKLFYNLLLIEPPFNLLDDLDVLVRKIVKEILHLPQCTTDGIFYSRGRDGGLALTKFSVQIPNMLIRKWRRHIVSRDDWMDLSYLYAGENLVDKILSFSAVTSHPKKWREEEFLRWSELRCQGIGIKYFKNDLISNSIFRNSSKVKSSAYIAALQLRANIYPTRETLARGRGGVNALCRWCGKVRETVPHISGQCYKTKNARIKRHNRVVSAVVDKVGKLGWKAMIEPHLRNSKGELRKPDIIFIKGDTAVVVDVTVRWEDNAGSLEQAHSEKVAYYLELEEEIKNLTGGKNIHFFGFVLGARGKWSEGNNDLLQLLGMDRSKNFKESICRLVLYSTIGMMAIFSDR

SEQ ID NO: 9296 - protein, 1241 aa, Chrysemys picta
MEKSNLYFYTGLALDRVNNAPAVGFDAPADSVKYIRGVIRVAGPMDKMVWTIMKSHENESENQVLPVEHGEEVEENVCDDHGEEILSILPMVFTRDTFNDLTMDSFNPDFKYLSTFDDPYVRESSTDFNRDRNKDLNSIGSNINILESSSWKDGVFYLEYPVDSFNCPICPQILPTFGKWAKHINVVHKSKAIRVVCSKYGKSSQYHNIACHYPKCIPKKADTPMKSHTCSVCGLGFHTRSGLSQHCRHRHPAVRNEQRKEDMAAKSKIKEGSTRSRIWSKDEVVQLIQLERKYIGKRNINKCIESEMRTKTNKQISDKRRELAKKKLVVTGDREEVTEVEDIRVNILEIPPPRERIFPLKGHPEVDLVEKICKRGKQSREGREIINSLGEIEGLLKEDLTKALGWAMLEKLCYSLVEGQDPRNESQIELRNKGKGKIRKEGRRKQFNAIRRYATKKAKYKFYQQLFDKDRRRLTRIIMGEPDKAKCAIPMKEIEEYYVNILGTIGHGNMIGWPSSTENADNDILMSPISVDEIRIALTEIRKDSAPGPDKVKVSNLWDIFNLDSLILTKIFNIWFLNRQVPDEFKKNRTILIPKTQDEEEMKKLTSWRPLTIGSVWIRIYTKILAKRLVETVKICSRQKGFISAPGCEENIAILDNLIKGAKRNGNEIAIVFVDLAKAFDSVGHGHIIAGLRRFGIDEHFIDIIRDLYDNCTTRVWVGDEATESVLIRRGVKQGDPLSPILFNIAMDPLLTRLEVEGSGFYVKGNSVTSLAFADDVAILSSSYKGMIKNLGILEEFCKNTNLSVNVKKTKGFHILTKHKTYVVNPKDNWQIGSEKIEYVQPGDFEKYLGARIDPWIGVGGPVLKEKLKDWSENLIKAPLKPAQKILILQTYILPKLFYNLLLIEPPFNLLDDLDVLVRKIVKEILHLPQCTTDGIFYSRGRDGGLALTKFSVQIPNMLIRKWRRHIVSRDDWMDLSYLYAGENLVDKILSFSAVTSHPKKWREEEFLRWSELRCQGIGIKYFKNDLISNSIFRNSSKVKSSAYIAALQLRANIYPTRETLARGRGGVNALCRWCGKVRETVPHISGQCYKTKNARIKRHNRVVSAVVDKVGKLGWKAMIEPHLRNSKGELRKPDIIFIKGDTAVVVDVTVRWEDNAGSLEQAHSEKVAYYLELEEEIKNLTGGKNIHFFGFVLGARGKWSEGNNDLLQLLGMDRSKNFKESICRLVLYSTIGMMAIFSDR

SEQ ID NO: 9297 - protein, 1260 aa, Terrapene carolina
MEKSNLYFYTGLALDRVNNAPAVGFDAPADSVKYIRGVIRVAGPMDKMVWTIMKSHEHESENQVLPVEHGAEVEENVCDDHGEEILSILPMVFTRDTFNDLTMQSFNPDFKYLSTFDDPYVSESGYLNAHLVNGSSLLNSFRPSTDFNRDRNKDLNSTGSNINILESSSWKDGVFYLEYPVDSFNCPICPQILPTFGKWAKHINVVHKSKAIRVVCSKCGKSSQYHNIACHYPKCIPKKADTPMKSHTCSVCGLGFHTRSGLSQHCRHRHPAVRNEQRKEDMAAKSKIKEGSTRSRIWTKDEVAQLIQLERKYIGKRNINKCIESEMRTKTNKQISDKRRELAKKKLVVTGDREEVTEVEDIRVNILEIPPPRERIFPLKGHPEVDLVEKICKRGKQSREGREIINSLGEIEGLLKEDLTKALGWAMLEKLCYSLVEGKDPRNESQIELRNKGKGKMRKEGRRKQFNAIRRYATKKAKYKFYQQLFDKDRRRLTRIIMGEPDKAKCAIPMKEIEEYYVNILGTIGHGNMIGWPSSTENADNDILMSPISVDEIRIALREIRKDSAPGPDKVKVSNLWDIFNLDSLILTKIFNIWFLNRQVPDEFKKNRTILIPKTQDEEEMKKLTSWRPLTIGSVWIRIYTKILAKRLVETVKICSRQKGFISAPGCEENIAILDNLIKGAKRNGNEIAIVFVDLAKAFDSVGHGHIIAGLRRFGIDEHFIDIIRDLYDNCTTRVWVGDEATESILIRRGVKQGDPLSPILFNIAMDPLLTRLEVEGSDFYVKGNGVTSLAFADDVAILSSSYKGMIKNLGILEEFCKNTNLSVNVKKTKGFHILTKHKTYVVNPKDNWQIGSEEIEYVQPGDFEKYLGARIDPWIGVGGPVLKEKLKDWSENLIKAPLKPAQKILILQTYILPKLFYNLLLIEPPFNLLDDLDVLVRKIVKEILHLPQCTTDGIFYSRGRDGGLALTKFSVQIPNMLIRKWRRHIVSRDDWMDLSYLYAGENLVDKILSFSAVISHPKKWREEEFLRWSELRCQGIGIKYFKNDLISNSIFRNSSKVKSSAYIAALQLRANIYPTRETLARGRGGVNALCRWCGKVRETVPHISGQCYKTKNARIKRHNRVVSAVVDKVGKLGWKAMIEPHLRNSKGELRKPDIIFIKGDTAVVVDVTVRWEDNAGSLEQAHSEKVAYYLELEEEIKNLTGGKNIHFFGFVLGARGKWSEGNNDLLQLLGMDRSKNFKESICRLVLYSTIGMMAIFSDR

SEQ ID NO: 9298 - protein, 1260 aa, Terrapene carolina
MEKSNLYFYTGLALDRVNNAPAVGFDAPADSVKYIRGVIRVAGPMDKMVWTIMKSHEHESENQVLPVEHGEEVEENVCDDHGEEILSILPMVFTRDTFNDLTMESFNPDFKYLSTFDDPYVSESGYLNAHLVNGSSLLNSFRPSTDFNRDRNKDLNSTGSNINILESSSWKDGVFYLEYPVDSFNCPICPQILPTFGKWAKHINVVHKSKAIRVVCSKCGKSSQYHNIACHYPKCIPKKADTPMKSHTCSVCGLGFHTRSGLSQHCRHRHPAVRNEQRKEDMAAKSKIKEGSTRSRIWTKDEVAQLIQLERKYIGKRNINKCIESEMRTKTNKQISDKRRELAKKKLVVTGDREEVTEVEDIRVNILEIPPPRERIFPLKGHPEVDLVEKICKRGKQSREGREIINSLGEIEGLLKEDLTKALGWAMLEKVCYSLVEGKDPRNESQIELRNKGKGKMRKEGRRKQFNAIRRYATKKAKYKFYQQLFDKDRRRLTRIIMGEPDKAKCAIPMKEIEEYYVNILGTIGHGNMIGWPSSTENADNDILMSPISVDEIRIALREIRKDSAPGPDKVKVNNLWDIFNLDSLILTKIFNIWFLNRQVPDEFKKNRTILIPKTQDEEEMKKLTSWRPLTIGSVWIRIYTKILAKRLVETVKICSRQKGFISAPGCEENIAILDNLIKGAKRNGNEIAIVFVDLAKAFDSVGHGHIIAGLRRFGIDEHFIDIIRDLYDNCTTRVWVGDEATESILIRRGVKQGDPLSPILFNIAMDPLLTRLEVEGSGFYVKGNGVTSLAFADDVAILSSSYKGMIKNLGILEEFCKNTNLSVNVKKTKGFHILTKHKTYVVNPKDNWQIGSEEIEYVQPGDFEKYLGARIDPWIGVGGPVLKEKLKDWSENLIKAPLKPAQKILILQTYILPKLFYNLLLIEPPFNLLDDLDVLVRKIVKEILHLPQCTTDGIFYSRGRDGGLALTKFSVQIPNMLIRKWRRHIVSRDDWMDLSYLYAGENLVDKILSFSAVTSHPKKWREEEFLRWSELRCQGIGIKYFKNDLISNSIFRNSTKVKSSAYIAALQLRANIYPTRETLARGRGGVNALCRWCGKVRETVPHISGQCYKTKNARIKRHNRVVSAVVDKVGKLGWKAMIEPHLRNSKGELRKPDIIFIKGDTAVVVDVTVRWEDNAGSLEQAHSEKVAYYLELEEEIKNLTGGKNIHFFGFVLGARGKWSEGNNDLLQLLGMDRSKNFKESICRLVLYSTIGMMAIFSDR

SEQ ID NO: 9299 - protein, 1303 aa, Terrapene carolina
MVPHGCPPGKGSLPQVRVSFPQVRVSFPLERVSFPLERVNLLAMEKSNLCFYTGLALDRVNNAPAVGFDAPADSVKYIRGVIRVAGPMDKMVWTIMKSHEHESENQVLPVEHGEEVEENVCDDHGEEILSILPMVFTRDTFNDLTMESFNPDFKYLSTFDDPYVSESGYLNAHLVNGSSLLNSFRPSTDFNRDRNKDLNSTGSNINILESSSWKDGVFYLEYPVDSFNCPICPQILPTFGKWAKHINVVHKSKAIRVVCSKCGKSSQYHNIACHYPKCIPKKADTPMKSHTCSVCGLGFHTRSGLSQHCRHRHPAVRNEQRKEDMAAKSKIKEGSTRSRIWTKDEVAQLIQLERKYIGKRNINKCIESEMRTKTNKQISDKRRELAKKKLVVTGDREEVTEVEDIRVNILEIPPPRERIFPLKGHPEVDLVEKICKRGKQSREGREIINSLGEIEGLLKEDLTKALGWAMLEKLCYSLVEGKDPRNESQIELRNKGKGKMRKEGRRKQFNAIRRYATKKAKYKFYQQLFDKDRRRLTRIIMGEPDKAKCAIPMKEIEEYYVNILGTIGHGNMIGWPSSTENADNDILMSPISVDEIRIALREIRKDSAPGPDKVKVSNLWDIFNLDSLILTKIFNIWFLNRQVPDEFKKNRTILIPKTQDEEEMKKLTSWRPLTIGSVWIRIYTKILAKRLVETVKICSRQKGFISAPGCEENIAILDNLIKGAKRNGNEIAIVFVDLAKAFDSVGHGHIIAGLRRFGIDEHFIDIIRDLYDNCTTRVWVGDEATESILIRRGVKQGDPLSPILFNIAMDPLLTRLEVEGSGFYVKGNGVTSLAFADDVAILSSSYKGMIKNLGILEEFCKNTNLSVNVKKTKGFHILTKHKTYVVNPKDNWQIGSEEIEYVQPGDFEKYLGARIDPWIGVGGPVLKEKLKDWSENLIKAPLKPAQKILILQTYILPKLFYNLLLIEPPFNLLDDLDVLVRKIVKEILHLPQCTTDGIFYSRGRDGGLALTKFSVQIPNMLIRKWRRHIVSRDDWMDLSYLYAGENLVDKILSFSAVTSHPKKWREEEFLRWSELRCQGIGIKYFKNDLISNSIFRNSSKVKSSAYIAALQLRANIYPTRETLARGRGGVNALCRWCGKVRETVPHISGQCYKTKNARIKRHNRVVSAVVDKVGKLGWKAMIEPHLRNSKGELRKPDIIFIKGDTAVVVDVTVRWEDNAGSLEQAHSEKVAYYLELEEEIKNLTGGKNIHFFGFVLGARGKWSEGNNDLLQLLGMDRSKNFKESICRLVLYSTIGMMAIFSDR

SEQ ID NO: 9300 - protein, 1055 aa, Trachemys scripta
MWPLKAIRVVCSKCGKSSQYHNIACHYPKCIPKKADTPMKSHTCSVCGLGFHTRSGLSQHCRHRHPAVRNEQRKEDMAAKSKIKEGSTRSRIWTKDEVAQLIQLERKYIGKRNINKCIESEMRTKTNKQVSDKRRELAKKKLVVPGDREEVTEVEDIRVNILEIPPPRERIFPLKGHPEVDLVEKICKRGKQSREGREIINSLGEIEGLLKEDLTKALGWAMLEKLCYSLVEGKDPRNESQIELRNKGKGKMRKEGRRKQFNAIRRYATKKAKYKFYQQLFDKDRRRLTRIIMGEPNKAKCAIPMKEIEEYYVNILGTIGHGNMIGWPSSTENADNDILMSPISVDEIRIALREIRKDSAPGPDKVKVSNLWDIFNLDSLILTKIFNIWFLNRQVPDEFKKNRTILIPKTQDEEEMKKLTSWRPLTIGSVWIRIYTKILAKRLVETVKICSRQKGFISAPGCEENIAILDNLIKGAKRNGNEIAIVFVDLAKAFDSVGHGHIIAGLRRFGIDEHFIDIIRDLYDNCTTRVWVGDEATESILIRRGVKQGDPLSPILFNIAMDPLLTRLEVEGSGFYVKGNSVTSLAFADDVAILSSSYKGMIKNLGILEEFCKNTNLSVNVKKTKGFHILTKHKTYVVNPKDNWQIGSEEIEYVQPGDFEKYLGARIDPWIGVGGPVLKEKLKDWSENLIKAPLKPAQKILILQTYILPKLFYNLLLIEPPFNLLDDLDVLVRKIVKEILHLPQCTTDGIFYSRGRDGGLALTKFSVQIPNMLIRKWRRHIVSRDDWMDLSYLYAGENLVDKILSFSAVTSHPKKWREEEFLRWSELRCQGIGIKYFKNDLISNSIFRNSSKVKSSAYIAALQLRANIYPTRETLARGRGGVNALCRWCGKVRETVPHISGQFYKTKNARIKRHNRVVSAVVDKVGKLGWKAMIEPHLRNSKGELRKPDIIFIKGDTAVVVDVTVRWEDNAGSLEQAHSEKVAYYLELEEEIKNLTGGKNIHFFGFVLGARGKWSEGNNDLLQLLGMDRSKNFKESICRLVLYSTIGMMAIFSDR

SEQ ID NO: 9301 - protein, 1260 aa, Actinemys marmorata
MEKSNLYFYTGLALDRVNNAPAVGFDAPADSVKYIRGVIRVAGPMDKTVWTIMKSHEHESENQVLPVEHGEEVEENVCDDHGEEILSILPMVFTRDTFNDLTMESFNPDFKYLSTFDDPYVRESGYLNAHLVNGSSLLNSFRPSTDFNRDRNKDLNSTGSNINILESSSWKDGVFYLEYPVDSFNCPICPQILPTFGKWAKHINVVLKSKAIRVVCSKCGKSSQYHNIACHYPKCIPKKADTPMKSHTCSVCGLGFHTRSGLSQHCRHRHPAVRNEQRKEDMAAKSKIKEGSIRSRIWTKDEVAQLIQLERKYIGKRNINKCIESEMRTKTNKQISDKRRELAKKKLVLTGDREEVTEVEDIRVNILEIPPPRERIFPLKGHPEVDLVEKICKRGKQSREGREIINSLGEIEGLLKEDLTKALGWAMLEKLCYSLVEGKDPRNESQIELRNKGKGKMRKEGRRKQFNAIRRYATKKAKYKFYQQLFDKDRRRLTRIIMGEPDKAKCAIPMKEIEEYYVNILGTIGHGNMIGWPSSTENADNDILMSPISVDEIRIALREIRKDSAPGPDKVKVSNLWDIFNLDSLILTKIFNIWFLNRQVPDEFKKNRTILIPKTQDEEEMKKLTSWRPLTIGSVWIRIYTKILAKRLVETVKICSRQKGFISAPGCEENIAILDNLIKGAKRNGNEIAIVFIDLAKAFDFVGHGHIIAGLRRFGIDEHFIDIIRDLYDNCTTRVWVGDEATESILIRRGVKQGDPLSPILFNIAMDPLLTRLEVEGSGFYVKGNSVTSLAFADDMAILSSSYKGMIKNLGILEEFCKNTNLSVNVKKTKGFHILTKHKTYVVNPKDNWQIGSEEIEYVQPGDFEKYLGARIDPWIGVGGPVLKEKLKDWSENLIKAPLKPAQKILILQTYILPKLFYNLLLIEPPFNLLDDLDVLVRKIVKEILHLPQCTTDGIFYSRGRDGGLALTKFSVQIPNMLIRKWRRHIVSRDDWMDLSYLYAGENLVDKILSFSAVTSHPKKWREEEFLRWSELRCQGIGIKYFKNDLISNSIFRNSSKVKSSAYIAALQLRANIYPTRETLARGRGGVNALCRWCGKVRETVPHISGQCYKTKNARIKRHNRVVSAVVDKVGKLGWKAMIEPHLRNSKGELRKPDIIFIKGDTAVVVDVTVRWEDNAGSLEQAHSEKVAYYLELEEEIKNLTGGKNIHFFGFVLGARGKWSEGNNDLLQLLGMDRSKNFKESICRLVLYSTIGMMAIFSDR

SEQ ID NO: 9302 - protein, 1241 aa, Chrysemys picta
MEKSNLYFYTGLALDRVNNAPAVGFDAPADSVKYIRGVIRVAGPMDKMVWTIMKSHENESENQVLPVEHREEVEENVCDDHGEEILSILPMVFTRDTFNDLTMDSFNPDFKYLSTFDDPYVRESSTDFNRDRNKDLNSTGSNINILESSSWKDGVFYLEYPVDSFNCPICPQILPTFGKWAKHINVVHKSKAIRVVCSKCGKSSQYHNIACHYPKCIPKKADTPMKSHTCSVCGLGFHTRSGLSQHCRHRHPAVRNEQRKEDMAAKSKIKEGSTRSRIWTKDEVAQLIQLERKYIGKRNINKCIESEMRTKTNKQISDKRRELAKKKLVVTGDREEVTEVEDIRVNILEIPPPRERIFPLKGHPEVDLVEKICKRGKQSREGREIINSLGEIEGLLKEDLTKALGWAMLEKLCYSLVEGQDPRNESQIELRNKGKGKMRKEARRKQFNAIRRYATKKAKYKFYQQLFDKDRRRLTRIIMAEPDKAKCAIPMKEIEEYYVNILGTIGHGNMIGWPSSTENADNDILMSPISVDEIRIALREIRKDSAPGPDKVKVSNLWDIFNLDSLILTKFFNIWFLNRQVPDEFKKNRTILIPKTQDEEEMKKLTSWRPLTIGSVWIRIYTKILAKRLVETVKICSRQKGFISAPGCEENIAILDNLIKGAKRNGNEIAIVFVDLAKAFDSVGHGHIIAGLRSFGIDEHFIDIIRDLYDNCTTRVWVGDEATESILIRRGVKQGDPLSPILFNIAMYPLLTRLEVEGSGFYVKGNSVTSLAFADDVAILSSSYKGMIKNLGILEEFCKNTNLSVNVKKTKGFHILTKHKTYVVNPKDNWQIGSEKIEYVQPGDFEKYLGARIDPWIGVGGPVLKEKLKDWSENLIKAPLKPAQKILILQTYILPKLFYNLLLIEPPFNLLDDLDVLVRKIVKEILHLPQCTTDGIFYSRGRDGGLALTTFSVQIPNMLIRKWRRHIVSRDDWMDLSYLYAGENLVDKILSFSAVTSHPKKWREEEFLRWSELICQGIGIKYFLNDLISNSIFRNSSKVKSSAYIAALQLRANIYPTRETLARGRGGVNALCRWCGKVRETVPHISGQCYKTKNARIKRHNRVVSAVVDKVGKLGWKAMIEPHLRNSKGELRKPDIIFIKGDTAVVVDVTVRWEDNAGSLEQAHSEKVSYYLELEEEIKNLTGGKNIHFFGFVLGARGKWSEGNNDLLQLLGMDRSKNFKESICRLVLYSTIGMMAIFSDR

SEQ ID NO: 9303 - protein, 979 aa, Chrysemys picta
MAAKSKIKEGSTRSRIWTKDEVAQLIQLERKYIGKRNINKCIESEMRTKTNKQISDKRRELAKKKLVVTGDREEVTEVEDIRVNILEIPPPRERIFPLKGHPEVDLVEKICKRGKQSREGREIINSLGEIEGLLKEDLTKALGWAMLEKLCYSLVEGQDPRNESQIELRNKGKGKIRKEGRRKQFNAIRRYATKKAKYKFYQQLFDKDRRRLTRIIMGEPDKAKCAIPMKEIEEYYVNILGTIGHGNMIGWPSSTENADNDILMSPISVDEIRIALTEIRKDSAPGPVKVKVSNLWDIFNLDSLILTKIFNIWFLNRQVPDEFKKNRTILIPKTQDEEEMKKLTSWRPLTIGSVWIRIYTKILAKRLVETVKICSRQKGFISAPGCEENIAILDNLIKGAKRNGNEIAIVFVDLAKAFDSVGHGHIIAGLRRFGIDEHFIDIIRDLYDNCTTRVWVGDEATESILIRRGVKQGDPLSPILFNIAMDPLLTRLEVEGSGFYVKGNSVTSLAFVDDVAILSSSYKGMIKNLGILEEFCKNTNLSVNVKKTKGFHILTKHKTYVVNPKDNWQIGSEKIEYVQPGYFEKYLGARIDPWIGVGGPVLKEKLKDWSENLIKAPLKPAQKILILQTYILPKLFYNLLLIEPPFNLLDDLDVLVRKIVKEILHLPQCTTDGIFYSRGRDGGLALTKFSVQIPNMLIRKWRRHIVSRDDWMDLSYLYAGENLVDKILSFSAVTSHPKKWREEEFLRWSELRCQGIGIKYFKNDLISNSIFRNSSKVKSSAYIAALQLRANIYPTRETLARGRGGVNALCRWCGKVRETVPHISGQCYKTKNARIKRHNRVVSAVVDKVGKLGWKAMIEPHLRNSKGELRKPDIIFIKGDTAVVVDVTVRWEDNAGSLEQAHSEKVAYYLELEEEIKNLTGGKNIHFFGFVLGARGKWSEGNNDLLQLLGMDRSKNFKESICRLVLYSTIGMMAIFSDR

SEQ ID NO: 9304 - protein, 1089 aa, Chrysemys picta
MGFFYLEYPVDSFNCPICPQILPTFGKWAKHINVVHKSKAIRVVCSKCGKSSQYHNIACHYPKCIPKKADTPMKSHTCSVCGLGFHTRSGLSQHCRHRHPAVRNEQRKEDMAAKSKIKEGSTRSRIWTKDEVAQLIQLERKYNGKRNINKCIESEMRTKTNKQISDKRRELAKKKLVVTGDREEVTEVEDIRVNILEIPPPRERIFPLKGHPEVDLVEKICKRGKQSREGREIINSLGEIEGLLKEDLTKALGWAMLEKLCYSLVEGQDPRNESQIELKNKGKGKIRKEGRRKQFNAIRRYATKKAKYKFYQQLFDKDRRRLTRIIMGEPDKAKCAIPMKEIEEYYVNILGTIGHGNMIGWPSSTENADSDILMSPISVDEIRIALTEIRKDSAPGPDKVKVSNLWDIFNLDSLILTKIFNIWFLNRQVPDEFKKNRTILIPKTQDEEEMKKLTSWRPLTIGSVWIRIYTKILAKRLVETVKICSRQKGFISAPGCEENIAILDNLIKGAKRNGNEIAIVFVDLAKAFDSVGHGHIIAGLRRFGIDEHFIDIIRDLYDNCTTRVWVGDEATESILIRRGVKQGDPLSPILFNIAMDPLLTRLEVEGSGFYVKGNSVTSLAFADDVAILSSSYKGMIKNLGILEEFCKNTNLSVNVKKTKGFHILTKHKTYVVNPKDNWQIGSEKIEYVQPGDFEKYLGARIDPWIGVGGPVLKEKLKDWSENLIKAPLKPAQKILILQTYILPKLFYNLLLIEPPFNLLDDLDVLVRKIVKEILHLPQCTTDGIFYSRGRDGGLALTKFSVQIPNMLIRKWRRHIVSRDDWMDLSYLYAGENLVDKILSFSAVTSHPKKWREEEFLRWSELRCQGIGIKYFKNDLISNSIFRNSSKVKSSAYIAALQLRANIYPTRETLARGRGGVNALCRWCGKVRETVPHISGQCYKTKNARIKRHNRVVSAVVDKVGKLGWKAMIEPHLRNSKGELRKPDIIFIKGDTAVVVDVTVRWEDNAGSLEQAHSEKVAYYLELEEEIKNLTGGKNIHFFGFVLGARGKWSEGNNDLLQLLGMDRSKNFKESICRLVLYSTIGMMAIFSDR

SEQ ID NO: 9305 - protein, 1260 aa, Terrapene carolina
MEKSNLYFYTGLALDRVNNAPAVGFDAPADSVKYIRGVIRVAGPMDKMVWTIMKSHEHESENQVLPVEHGEEVEENVCDDHGEEILSILPMVFTRDTFNDLTMESFNPDFKYLSTFDDPYVSESGYLNAHLVNGSSLLNSFRPSTDFNRDRNKDLNSTGSNINILESSSWKDGVFYLEYPVDSFNCPICPQILPTFGKWAKHINVVHKSKAIRVVCSKCGKSSQYHNIACHYPKCIPKKADTPMKSHTCSVCGLGFHTRSGLSQHCRHRHPAVRNEQRKEDMAAKSKIKEGSTRSRIWTKDEVAQLIQLERKYIGKRNINKCIESEMRTKTNKQISDKRRELAKKKLVVTGDREEVTEVEDIRVNILEIPPPRERIFPLKGHPEVDLVEKICKRGKQSREGREIINSLGEIEGLLKEDLTKALGWAMLEKLCYSLVEGKDPRNESQIELRNKGKGKMRKEGRRKQFNAIRRYATKKAKYKFYQQLFDKDRRRLTRIIMGEPDKAKCAIPMKEIEEYYVNILGTIGHGNMIGWPSSTENADNDILMSPISVDEIRIALREIRKDSAPGPDKVKVSNLWDIFNLDSLILTKIFNIWFLNRQVPDEFKKNRTILIPKTQDEEEMKKLTSWRPLTIGSVWIRIYTKILAKGLVETVKICSRQKGFISAPGCEENIAILDNLIKGAKRNGNEIAIVFVDLAKAFDSVGHGHIIAGLRRFGIDEHFIDIIRDLYDNCTTRVWVGDEATESILIRRGVKQGDPLSPILFNIAMDPLLTRLEVEGSGFYVKGNGVTSLAFADDVAILSSSYKGMIKNWGILEEFCKNTNLSVNVKKTKGFHILTKHKTYVVNPKDNWQIGSEEIEYVQPGDFEKYLGARIDPWIGVGGPVLKEKLKDWSENLIKAPLKPAQKILILQTYILPKLFYNLLLIEPPFNLLDDLDVLVRKIVKEILHLPQCTTDGIFYSRGRDGGLALTKFSVQIPNMLIRKWRRHIVSRDDWMDLSYLYAGENLVDKILSFSAVTSHPKKWREEEFLRWSELRCQGIGIKYFKNDLISNSIFRNSSKVKSSAYIAALQLRANIYPTRETLARGRGGVNALCRWCGKVRETVPHISGQCYKTKNARIKRHNRVVSAVVDKVGKLGWKAMIEPHLRNSKGELRKPDIIFIKGDTAVVVDVTVRWEDNAGSLEQAHSEKVAYYLELEEEIKNLTGGKNIHFFGFVLGARGKWSEGNNDLLQLLGMDRSKNFKESICRLVLYSTIGMMAIFSDR

SEQ ID NO: 9306 - protein, 1017 aa, Terrapene carolina
MKSHTCSVCGLGFHTRSGLSQHCRHRHPAVRNEQRKEDMAAKSKIKEGSTRSRIWTKDEVAQLIQLERKYIGKRNINKCIESEMRTKTNKQISDKRRELAKKKLVVTGDREEVTEVEDIRVNILEIPPPRERIFPLKGHPEVDLVEKICKRGKQSREGREIINSLGEIEGLLKEDLTKALGWAMLEKLCYSLVEGKDPRNESQIELRNKGKVKMRKEGRRKQFNAIRRYATKKAKYKFYQQLFDKDRRRLTRIIMGEPDKAKCAIPMKEIEEYYVNILGTIGHGNMIGWPSSTENADNDILMSPISVDEIRIALREIRKDSAPGPDKVKVSNLWDIFNLDSLILTKIFNIWFLNRQVPDEFKKNRTILIPKTQDEEEMKKLTSWRPLTIGSVWIRIYTKILAKRLVETVKICSRQKGFISAPGCEENIAILDNLIKGAKRNGNEIAIVFVDLAKAFDSVGHGHIIAGLRRFGIDEHFIDIIRDLYDNCTTRVWVGDEATESILIRRGVKQGDPLSPILFNIAMDPLLTRLEVEGSGFYVKGNGVTSLAFADDVAILSSSYKGMIKILGILEEFCKNTNLSVNVKKTKGFHILTKHKTYVVNPKDNWQIGSEEIEYVQPGDFEKYLGARIDPWIGVGGPVLKEKLKDWSENLIKAPLKPAQKILILQTYILPKLFYNLLLIEPPFNLLDDLDVLVRKIVKEILHLPQCTTDGIFYSRGRDGGLALTKFSVQIPNMLIRKWRRHIVSRDDWMDLSYLYAGENLVDKILSFSAVTSHPKKWREEEFLRWSELRCQGIGIKYFKNDLISNSIFRNSSKVKSSAYIAALQLRANIYPTRETLARGRGGVNALCRWCGKVRETVPHISGQCHKTKNARIKRHNRVVSAVVDKVGKLGWKAMIEPHLRNSKGELRKPDIIFIKGDTAVVVDVTVRWEDNAGSLEQAHSEKVAYYLELEEEIKNLTGGKNIHFFGFVLGARGKWSEGNNDLLQLLGMDRSKNFKESICRLVLYSTIGMMAIFSDR

SEQ ID NO: 9307 - protein, 1260 aa, Terrapene carolina
MEKSNLYFYTGLALDRVNNAPAVGFDAPADSVKYIRGVIRVAGPMDKMVWTIMKSHEHESENQVLPVEHGEEVEENVCDDHGEEILSILPMVFTRDTFNDLTMESFNPDFKYLSTFDDPYVSESGYLNAHLVNGSSLLNSFRPSTDFNRDRNKDLNSTGSNINILESSSWKDGVFYLEYPVDSFNCPICPQILPTFGKWAKHINVVHKSKAIRVVCSKCGKSSQYHNIACHYPKCIPKKADTPMKSHTCSVCGLGFHTRSGLSQHCRHRHPAVRNEQRKEDMAAKSKIKEGSTRSRIWTKDEVAQLIQLERKYIGKRNINKCIESEMRTKTNKQISDKRRELAKKKLVVTGDREEVTEVEDIRVNILEIPPPRERIFPLKGHPEVDLVEKICKQGKQSREGREIINSLGEIEGLLKEDLTKALGWAMLEKLCYSLVEGKDPRNESQIELRNKGKGKMRKEGRRKQFNAIRRYATKKAKYKFYQQLFDKDRRRLTRIIMGEPDKAKCAIPMKEIEEYYVNILGTIGHGNMIGWPSSTENADNDILMSPISVDEIRIALREIRKDSAPGPDKVKVSNLWDIFNLDSLILTKIFNIWFLNRQVPDEFKKNRTILIPKTQDEEEMKKLTSWRPLTIGSVWIRIYTKILAKRLVETVKICSRQKGFISAPGCEENIAILDNLIKGAKRNGNEIAIVFVDLAKAFDSVGHGHIVAGLRRFGIDEHFIDIIRDLYDNCTTRVWVGDEATESILIRRGVKQGDPLSPILFNIAMDPLLTRLEVEGSGFYVKGNGVTSLAFADDVAILSSSYKGMIKNLGILEEFCKNTNLSVNVKKTKGFHILTKHKTYVVNPKDNWQIGSEEIEYVQPGDFEKYLGARIDPWIGVGGPVLKEKLKDWSENLIKAPLKPAPKILILQTYILPKLFYNLLLIEPPFTLLDDLDVLVRKIVKEILHLSQCITDGIFYSRGRDGGLALTKFSVQIPNMLIRKWRRHIVSRDDWMDLSYLYAGENLVDKILSFSAVTSHPKKWREEEFLRWSELRCQGIGIKYFKNDLISNSIFRNSSKVKSSAYIAALQLRANIYPTRETLARGRGGVNALCRWCGKVRETVPHISGQCYKTKNARIKRHNRVVSAVVDKVGKLGWKAMIEPHLRNSKGELRKPDIIFIKGDTAVVVDVTVRWEDNAGSLEQAHSEKVAYYLELEEEIKNLTGGKNIHFFGFVLGARGKWSEGNNDLLQLLGMDRSKNFKESICRLVLYSTIGMMAIFSDR

SEQ ID NO: 9308 - protein, 1260 aa, Terrapene carolina
MEKSNLYFYTGLALDRVNNAPAVGFDAQADSVKYIRGVIRVAGPMDKMVWTIMKSHEHESENQVLPVEHGEEVEENVCDDHGEEILSILPMVFTRDTFNDLTMESFNPDFKYLSTFDDPYVSESGYLNAHLVNGSSLLNSFRPSTDFNRDRNKDLNSTGSNINILESSSWKDGVFYLEYPVDSFNCPICPQILPTFGKWAKHINVVHKSKAIRVVCSKCGKSSQYHNIACHYPKCIPKKADTPMKSHTCSVCGLGFRTRSGLSQHCRHRHPAVRNEQRKEDMAAKSKIKEGSTRSRIWTKDEVAQLIQLERKYIGKRNINKCIESEMRTKTNKQISDKRRELAKKKLVVTGDREEVTEVEDIRVNILEIPPPRERIFPLKGHPEVDLVEKICKRGKQSREGREIINSLGEIEGLLKEDLTKALGWAMLEKLCYSLVEGKDPRNESAIELRNIGKGKMRKEGRRKQFNAIRRYATKKAKYKFYQQLFDKDRRRLTRIIMGEPDKAKCAIPMKEIEEYYVNILGTIGHGNMIGWPSSTENADNDILMSPISVDEIRIALREIRKDSAPGPDKVKVSNLWDIFNLDSLILTKIFNIWFLNRQVPDEFKKNRTILIPKTQDEEEMKKLTSWRPLTIGSVWIRIYTKILAKRLVETVKICSRQKGFISAPGCEENIAILDNLIKGAKRNGNEIAIVFVDLAKAFDSVGHGHIIAGLRRFGIDEHFIDIIRDLYDNCTTRVWVGDEATESILIRRGVKQGDPLSPILFNIAMDPLLTRLEVEGSGFYVKGNGVTSLAFADDVAILSSSYKGMIKNLGILEEFCKNTNLSVNVKKTKGFHILTKHKTYVVNPKDNWQIGSEEIEYVQPGDFEKYLGARIDPWIGVGGPVLKKKLKDWSENLIKAPLKPAQKILILQTYILPKLFYNLLLIEPPFNLLDDLDVLVRKIVKEILHLPQCTTDGIFYSRGRDGGLALTKFSVQIPNMLIRKWRRHIVSRDDWMDLSYLYAGENLVDKILSFSAVTSHPKKWREEEFLRWSELRCQGIGIKYFKNDLISNSIFRNSSKVKSSTYIAALQLRANIYPTRETLARGRGGVNALCRWCGKVRETVPHISGQCYKTKNARIKRHNRVVSAVVDKVGKLGWKAMIEPHLRNSKGELRKPDIIFIKGDTAVVVDVTVRWEDNAGSLEQAHSEKVAYYLELEEEIKNLTGGKNIHFFGFVLGARGKRSEGNNDLLQLLGMDRSKNFKESICRLVLYSTIGMMAIFSDR

SEQ ID NO: 9309 - protein, 1241 aa, Trachemys scripta
MEKSNLYFYTGLALDRVNNAPAVGFDAPADSVKYIRGVIRVAGPMDKMVWTIMKSHENESENQVLPVEHGEEVEENVCDDHGEEILSILPMVFTRDTFNDLTMDSFNPDFKYLSTFDDPYVRESSTDFNRDRNKDLNSIGSNINLLESSSWKDGVFYLEYPVDSFNCPICPQILPTFGKWAKHINVVHKSKAIRVVCSKCGKSSQYHNIACHYPKCIPKKADTPMKSHMCSVCGLGFHTRSGLSQHCRHRHPAVRNEQRKEDMAAKSKIKEGSTRSRIWTKDEVAQLIQLERKYIGKRNINKCIESEMRTKTNKQISDKRRELAKKKLVVTGDREEVTEVEDIRVNILEIPPPRERIFPLKGHPEVDLVEKICKRGKQSREGREIINSLGEIEGLLKEDLTKAFGWAMLEKLCYSLVEGQDPRNESQIELRNKGKGKIRKEGRRKQFNAIRRYATKKAKYKFYQQLFDKDRRRLTRIIMGEPDKAKCAIPMKEIEEYYVNILGTIGHGNMIGWPSSTENADNDILMSPISVDEIRIALTEIRKDSAPGPDKVKVSNLWDIFNLDSLILTKIFNIWFLNRQVPDEFKKNRTILIPKTQDEEEMKKLTSWRPLTIGSVWIRIYTKILAKRLVETVKICSRQKGFISAPGCEENIAILDNLIKGAKRNGNEIAIVFVDLAKAFDSVGHGHIIAGLRRFGIDEHFIDIIRDLYDNCTTRVWVGDEATESILIRRGVKQGDPLSPILFNIAMDPLLTRLEVEGSGFYVKGNSVTSLAFADDVAILSSSYKGMIKNLGILEEFCKNTNLSVNVKKTKGFHILTKHKTYVVNPKDNWQIGSEKIEYVQPGDFEKYLGARIDPWIGVGGPVLKEKLKDWSENLIKAPLKPAQKILILQTYILPKLFYNLLLIEPPFNLLDDLDVLVRKIVKEILHLPQCTTDGIFYSRGRDGGLALTKFSVQIPNMLIRKWRRHIVSRDDWMDLSYLYAGENLVDKILSFSAVTSHPKKWREEEFLRWSELRCQGIGIKYFKNDVISNSIFRNSSKVKSSAYIAALQLRANIYPTRETLARGRGGVNALCRWCGKVRETVPHISGQCYKTKNARIKRHNRVVAAVVDKVGKLGWKAMIEPHLRNSKGELRKPDIIFIKGDTAVVVDVTVRWEDNARSLEQAHSEKVAYYLELEEEIKNLTGGKNIHFFGFVLGARGKWSEGNNDLLQLLGMDRSKNFKESICRLVLYSTIGMMAIFSDR

SEQ ID NO: 9310 - protein, 1260 aa, Actinemys marmorata
MEKRNLYFYTGLALDRVNNAPAVGFDAPADSVKYIRGVIRVAGPMDKMVWTIMKSHEHESENQVHPVEHGEEVEENVCDDHGEEILSILPMVFTRDTFNDLTMESFNPDFKYLSTFDDPYVRESGYLNTHLVNGSSLLNSFRPSTDFNRDRNKDLNSTGSNINILESSSWKDGVFYLEYPVDRFNCPICPQILPTFGKWAKHINVVHKSKAIRVVCSKCGKSSQYHNIACHYPKCIPKKADTPMKSHTCSVCGLGFHTRSGLSQHCRHRHPAVRNEQRKEDMAAKSKIKEGSTRSRIWTKDEVAQLIQLERKYIGKRNINKCIESEMRTKTNKQISDKRRELAKKKLVVTGDREEVTEVEDIRVNILEIPPPRERIFPLKGHPEVDLVEKICKRGKQSREGREIINSLGEIEGLLKEDLTKALGWAMLEKLCYSLVEGKDPRNESQIELRNKGKGKMRKEGRRKQFNAIRRYATKKAKYKFYQQLFDKDRRRLTRIIMGEPDKAKCAIPMKEIEEYYVNILGTIGHGNMIGWPSSTENADNDILMSPISVDEIRIALREIRKESAPGPDKVKVSNLWDIFNLDSLILTKIFNIWFLNRQVPDEFKKNRTILIPKTQDEEEMKKLTSWRPLTIGSVWIRIYTKILAKRLVETVKICSRQKGFISAPGCEENIAILDNLIKGAKRNGNEIAIVFVDLAKAFDSVGHGHIIAGLRRFGIDEHFIDIIRDLYDNCTTRVWVGDEATESILIRRGVKQGDPLSPILFNIAMDPLLTRLEVEGSGFYVKGNSVTSLAFADDVAILSSSYKGMIKNLGILEEFCKNTNLSVNVKKTKGFHILTKHKTYVVNPKDNWQIGSEEIEYVQPGDFEKYLGARIDPWIGVGGPVLKEKLKDWSENLIKAPLKPAQKILILQTYILPKLFYNLLLIEPPFNLLDDLDVLVRKIVKEILHLPQCTTDGIFYSRGRDGGLALTKFSVQIPNMLIRKWRRHIVSRDDWMDLSYLYAGENLVDKILSFSAVTSHPKKWREEEFLRWSELRCQGIGIKYFKNDLISNSIFRNSSKVKSSAYIAALQLRANIYPTRETLARGRGGVNALCRWCGKVRETVPHISGQCYKTKNARIKRHNRVVSAVVDKVGKLGWKAMIEPHLRNSKGELRKPDIIFIKGDTAVVVDVTVRWEDNAGSLEQAHSEKVAYYLELEEEIKNLTGGKNIHFFGFVLGARGKWSEGNNDLLQLLGMDRSKNFKESICRLVLYSTIGMMAIFSDR

SEQ ID NO: 9311 - protein, 920 aa, Chrysemys picta
MRTKTNKQISDKRRELAKKKLVVTGDREEVTEVEDIRVNILEIPPPRERIFPLKGHPEVDLVEKICKRGKQSREGREIINSLGEIEGLLKEDLTKALGWAMLEKLCYSLVEGKDPRNESQIELRNKGKGKMRKEGRRKQFNASRRYATKKAKYKFYQQLFDKDRRRLTRIIMGEPDKAKCAIPMKEIEEYYVNILGTIGHGNMIGWPSSTENADNDILMSPISVEEIRIALREIRKDSAPGPDKAKVSNLWDIFNLDSLILTQIFNIWFLNRQVPDEFKKNRTILIPKTQDEEEMKKLTSWRPLTIGSVWIRIYTKILAKRLVETVKICSRQKGFISAPGCEENIAILDNLIKGAKRNGNEIAIVFVDLAKAFDSVGHGHIIAGLRRFGIDEHFIDIIRDLYDNCTTRVWVGDEATESILIRRGVKQGDPLSPILFNIAMDPLLTRLEVEGSGFYVKGNSVTSLAFADDVAILSSSYKGMIKNLGILEEFCKNTNLSVNVKKTKGFHILTKHKTYVVNPKDNWQIGSEEIEYVQPGDFEKYLGARIDPWIGVVGPVLKEKLKDWSENLIKAPLKPAPKILILQTYILPKLFYNLLLIEPPFNLLDDLDVLVRKIVKEILHLPQCTTDGIFYSRGRDGGLALTKFSVQIPNMLIRKRRRHIVSRDDWMDLSYLYAGENLVDKILLFSAVTSHPKKWREEEFLRWSELRCQGIGIKYFKNDLISNSIFRNSSKVKSSAYIAALQLRANIYPTRETLARGRGGVNALCRWCGKVRETVPHISGQCYKTKNARIKRHNRVVSAVVDKVGKLGWKPIIEPHLRNSNGELRKPDIIFIKGDTAVVVDVTVRWEDNAGSLEQAHSEKVAYYLELEEEIKNLTGGKNIHFFGFVLGARGKWSEGNNDLLQLLGMDRSKNFKESICRLV

SEQ ID NO: 9312 - protein, 1260 aa, Chrysemys picta
MEKSNLYFYTGLALDRVNNAPAVGFDAPADSVKYIRGVIRVAGPMDKMVWTIMKSHENESENQVLPVEHGEEVEENVCDDHGEEILSILPMVFTRDTFNDLTMDSFNPDFKYLSTFDDPYVRESGYLNAHLVNGSSLLNSFRPSTDFNRDRNKDLNSTGSNINILESISWKDGVFYLEYPVDSFNCPICPQILPTFGKWAKHINVVHKSKAIRVVCSKCGKSSQYHNIACHYPKCIPKKADTPMKSHTCSVCGLGFHTRSGLSQHCRHRHPAVRNEQRKEDMAAKSKIKEGSTRSRIWTKDEVAQLIQLERKYIGKRNINKCIESEMRTKTNKQISDKRRELAKKKLVVTGDREEVTEVEDIRVNILEIPPPRERIFPLKGHPEVDLVEKICKRGKQSREGREIINSLGEIEGLLKEDLTKALGWAMLEKLCYSLVEGKDPRNESQIELRNKGKGKMRKEGRRKQFNAIRRYATKKAKYKFYQQLFDKDRRRLTRIIMGEPDKAKCFIPMKEIEEYYVNILGTIGHGNMIGWPSSTENADNDILMSPISVDEIRIALREIRKDSAPGPDKVKVSNLWDIFNLDSLILTKIFNIWFLNRQVPDEFKKNRTILIPKTQDEEEMKKLTSWRPLTIGSVWIRIYTKILAKRLVETVKICSRQKGFISAPGCEENIAILDNLIKGAKRNGNEIAIVFVDLAKAFDSVGHGHIIAGLRRFGIDEHFIDIIRDLYDNCITRVWVGDEATESILIRRGVKQGDPLSPILFNIAMDPLLTRLEVEGSGFYVKGNSVTSLAFADDVAILSSSYKGMIKNLGILEEFCKNTNLSVNVKKTKGFHILTKHKTYVVNPKDNWQIGSETIEYVQPGDFEKYLGARIDPWIGVGGPVLKEKLKDWSENLIKAPLKPAQKILILQTYILPKLFYNLLLIEPPFNLLDDLDVLLRKIVKEILHLPQCTTDGIFYSRGRDGGLALTKFSVQIPNMLIRKWRRHIVSRDDWMDLSYLYAGENLVDKILSFSAVTSHPKKWREEEFLRWSELRCQGIGIKYFKNDLISNSIFRNSSKVKSSAYIAALQLRANIYPTRETLARGRGGVNALCRWCDKVRETVSHISGQCYKTKNARIKRHNRVVSAVVDKVGKLGWKAMIEPHLRNSKGELRKPDIIFIKGDTAVVVDVTVRWEDNAGSLEQAHSEKVAYYLELEEEIKNLTGGKNIHFFGFVLGARGKWSEGNNDLLQLLGMDRSKNFKESICRLVLYSTIGMMAIFSDR

SEQ ID NO: 9313 - protein, 1241 aa, Chrysemys picta
MEKSNLYFYTGLALDRVNNAPAVGFDAPADSVKYIRGVIRVAGPMDKMVWTIMKSHENESENQVLPVEHGEEVEENVCDDHGEEILSILPMVFTRDTFNDLTMDSFNPDFKYLSTFDDPYVRESSTDFNRDRNKDLNSIGSNINILESSSWKDGVFYLEYPVDSFNCPICPQILPTFGKWAKHINVVHKSKAIRVVCSKCGKSSQYHNIACHYPKCIPKKVDTPMKSHTCSVCGLGFHTRSGLSQHCRHRHPAVRNEQRKEDMAAKSKIKEGSTRSRIWTKDEVAQLIQLERKYIGKRNINKCIESEMRTKTNKQISDKRRELAKKKLVVTGDREEVTEVEDIRVNILEIPPPRERIFPLKGHPEVDLVEKICKRGKQSREGREIINSLGEIEGLLKEDLTKALGWAMLEKLCYSLVEGQDPRNESQIELKNKGKGKIRKEGRRKQFNAIRRYATKKAKYKFYQQLFDKDRRRLTRIIMGEPDKAKCAIPMKEIEEYYVNILGTIGHGNMIGWPSSTENADNDILMSPISVDEIRIALTEIRKDSAPGPDKVKVSNLWDIFNLDSLILTKIFNIWFLNRQVPDEFKKNRTILIPKTQDEEEMKKLTSWRPLTIGSVWIRIYTKILAKRLVETVKICSRQKGFISAPGCEENIAILDNLIKGAKRNGNEIAIVFVDLAKAFDSVGHGHIIAGLRRFGIDEHFIDIIRDLYDNCTTRVWVGDEATESILIRRGVKQGDPLSPILFNIAMDPLLTRLEVEGSGFYVKGNSVTSLAFADDVAILSSSYKGMIKNLGILEEFCKNTNLSVNVKKTKGFHILTKHKTYVVNPKDNWQIGSEKIEYVQPGDFEKYLGARIDPWIGVGGPVLKEKLKDWSENLIKAPLKPAQKILILQTYILPKLFYNLLLIEPPFNLLDDLDVLVRKIVKEILHLPQCTTDGIFYSRGRDGGLALTKFSVQIPNMLIRKWRRHIVSRDDWMDLSYLYAGENLVDKILSFSAVTSHPKKWREEEFLRWSELRCQGIGIKYFKNDLISNSIFRNSSKVKSSAYIAALQLRANIYPTRETLARGRGGVNALCRWCGKVRETVPHISGQCYKTKNARIKRHNRVVSAVVDKVGKLGWKAMIEPHLRNSKGELRKPDIIFIKGDTAVVVDVTVRWEDNAGSLEQAHSEKVAYYLELEEEIKNLTGGKNIHFFGFVLGARGKWSEGNNDLLQLLGMDRSKNFKESICRLVLYSTIGMMAIFSDR

SEQ ID NO: 9314 - protein, 1260 aa, Terrapene carolina
MEKSNLYFYTGLALDRVNNAPAVGFDAPADSVKYIRGVIRVAGPMDKMVWTIMKSHEHESENQVLPVEHGEEVEENVCDDHGEEILSILPMVFTRDTFNDLTMESFNPDFKYLSTFDDPYVSESGYLNAHLVNGSSLLNSFRPSTDFNRDRNKDLNSTGSNINILESSSWKDGVFYLEYPVDSFNCPICPQILPTFGKWAKHINVVHKSKAIRVVCSKCGKSSQYHNIACHYPKCIPKKADTPMKSHTCSVCGLGFHTRSGLSQHCRHRHPAVRNEQRKEDMAAKSKIKEGSTRSRIWTKDEVAQLIQLERKYIGKRNINKCIESEMRTKTNKQISDKRRELAKKKLVVTGDREEVTEVEDIRVNILEIPPPRERIFPLKGHPEVDLVEKICKRGKQSREGREIINSLGEIEGLLKEDLTKALGWAMLEKLCYSLVEGKDPRNESQIELRNKGKGKMRKEGRRKQFNAIRRYATKKAKYKFYQQLFDKDRRRLTRIIMGEPDKAKCAIPMKEIEEYYVNILGTIGHGNMIGWPSSTENADNDILMSPISVDEIRIALREIRKDSAPGPDKVKVSNLWDIFNLDSLILTKIFNIWFLNRQVPDEFKKNRTILIPKTQDEEEMKKLTSWRPLTIGSVWIRIYTKILAKRLVETVKICSRQKGFISAPGCEENIAILDNLIKGAKRNGNEIAIVFVDLAKAFDSVGHGHIIAGLRRFGIDEHFIDIIRDLYDNCTTRVWVGDEATESILIRRGVKQGDPLSPILFNIAMDPLLTRLEVEGSGFYVKGNGVTSLAFADDVAILSSSYKGMIKNLGILEEFCKNTNLSVNVKKTKGFHILTKHKTYVVNPKDNWQIGSEEIEYVQPGDFEKYLGARIDPWIGVGGPVLKEKLKDWSENLIKAPLKPAQKILILQTYILPKLFYNLLLIEPPFNLLDDLDVLVRKIVKEILHLPQCTTDGIFYSRGRDGGLALTKFSVQIPNMLIRKWRRHIVSRDDWMDLSYLYAGENLVDKILSFSAVTSHPKKWREEEFLRWSELRCQGIGIKYFKNDLISNSIFRNSIKVKSSAYIAALQLRANIYPTRETLARGRGGVNALCRWCGKVRETVPHISGQCYKTKNARIKRHNRVVSAVVDKVGKLGWKAMIEPHLRNSKGELRKPDIIFIKGDTAVVVDVTVRWEDNAGSLEQAHSEKVAYYLELEEEIKNLTGGKNIHFFGFVLGARGKWSEGNNDLLQLLGMDRSKNFKESICRLVLYSTIGMMAIFSDR

SEQ ID NO: 9315 - protein, 1260 aa, Terrapene carolina
MEKSNLYFYTGLALDRVNNAPAVGFDAPADSVKYIRGVIRVAGPMDKMVWTIMKSHEHESENQVLPVEHGAEVEENVCDDHGEEILSILPMVFTRDTFNDLTMESFNPDFKYLSTFDDPYVSESGYLNAHLVNGSSLLNSFRPSTDFNRDRNKDLNSTGSNINILESSSWKDGVFYLEYPVDSFNCPICPQILPTFGKWAKHINVVHKSKAIRVVCSKCGKSSQYHNIACHYPKCIPKKADTPMKSHTCSVCGLGFHTRSGLSQHCRHRHPAVRNEQRKEDMAAKSKIKEGSTRSRIWTKDEVAQLIQLERKYIGKRNINKCIESEMRTKTNKQISDKRRELAKKKLVVTGDREEVTEVEDIRVNILEIPPPRERIFPLKGHPEVDLVEKICKRGKQSREGREIINNLGEIEGLLKEDLTKALGWAMLEKLCYSLVEGKDPRNESQIELRNKGKGKMRKEGRRKQFNAIRRYATKKAKYKFYQQLFDKDRRRLTRIIMGEPDKAKCAIPMKEIEEYYVNILGTIGHGNMIGWPSSTENADNDILMSPISVDEIRIALREIRKDSAPGPDKVKVSNLWDIFNLDSLILTKIFNIWFLNRQVPDEFKKNRMILIPKTQDEEEMKKLTSWRPLTIGSVWIRIYTKILAKRLVETVKICSRQKGFISAPGCEENIAILDNLIKGAKRNGNEIAIVFVDLAKAFDSVGHGHIIAGLRRFGIDEHFIDIIRDLYDNCTTRVWVGDEATESILIRRGVKQGDPLSPILFNIAMDPLLTRLEVEGSGFYVKGNGVTSLAFADDVAILSSSYKGMIKNLGILEEFCKNTNLSVNVKKTKGFHILTKHKTYVVNPKDNWQIGSEEIEYVQPGDFEKYLGARIDPWIGVGGPVLKEKLKDWSENLIKAPLKPAQKILILQTYILPKLFYNLLLIEPPFNLLDDLDVLVRKIVKEILHLPQCTTDGIFYSRGRDGGLALTKFSVQIPNMLIRKWRRHIVSRDDWMDLSYLYAGENLVDKILSFSAVTSHPKKWREEEFLRWSELRCQGIGIKYFKNDLISNSIFRNSSKVKSSAYIAALQLRANIYPTRETLARGRGGVNALCRWCGKVRETVPHISGQCYKTKNARIKRHNRVVSAVVDKVGKLGWKAMIEPHLRNSKGELRKPDIIFIKGDTAVVVDVTVRWEDNAGSLEQAHSEKVAYYLELEEEIKNLTGGKNIHFFGFVLGARGKWSEGNNDLLQLLGMDRSKNFKESICRLVLYSTIGMMAIFSDR

SEQ ID NO: 9316 - protein, 1260 aa, Terrapene carolina
MEKSNLYFYTGLALDRVNNAPAVGFDAPADSVIYIRGVIRVAGPMDKMVWTIMKSHEHESENQVLPVEHGEEVEENVCDDHGEEILSILPMVFTRDTFNDLTMESFNPDFKYLSTFDDPYVSESGYLNAHLVNGSSLLNSFRRSTDFNRDRNKDLNSTGSNINILESSSWKDGVFYLEYPVDSFNCPICPQILPTFGKWAKHINVVHKSKAIRVVYSKCGKSSQYHNIACHYPKCIPKKADTPMKSHTCSVCGLGFHTRSGLSQHCRHRHPAVRNEQRKEDMAAKSKIKEGSTRSRIWTKDEVAQLIQLERKYIGKRNINKCIESEMRTKTNKQISDKRRELAKKKLVVIGDREEVTEVEDIRVNILEIPPPRERIFPLKGHPEVDLVEKICKRGKQSREGREIINSLGEIEGLLKENLTKALGWAMLEKLCYSLVEGKDPRNESQIELRNKGKGKMRKEGRRKQFNAIRRYATKKAKYKFYQQLFDKDRRRLTRIIMGEPDKAKCAIPMKEIEEYYVNILGTIGHGNMIGWPSSTENADNDILMSPISVDEIRIALKEIRKDSAPGPDKVKVSNLWDIFNLDSLILTKIFNIWFLNRQVPDEFKKNRTILIPKTQDEEEMKKLTSWRPLTIGSVWIRIYTKILAKRLVETVKICSRQKGFISAPGCEENIAILDNLIKGAKRNGNEIAIVFVDLAKAFDSVGHGHIIAGLRRFGIDEHFIDIIRDLYDNCTTRVWVGDEATESILIRRGVKQGDPLSPILFNIAMDPLLTRLEVEGSGFYVKGNGVTSLAFADDVAILSSSYKGMIKNLGILEEFCKNTNLSVNVKKTKGFHILTKHKTYVVNPKDNWQIGSEEIEYVQPGDFEKYLGARIDPWIGVGGPVLKEKLKDWSENLIKAPLKPAPKILILQTYILPKLFYNLLLIEPPFNLLDDLDVLVRKIVKEILHLPQCTTDGIFYSRGRDGGLALTKFSVQIPNMLIRKWRRHIVSRDDWMDLSYLYAGENLVDKILSFSAVTSHPKKWREEEFLRWSELRCQGIGIKYFKNDLISNSIFRNSSKVKSSAYIAALQLRANIYPTRETLARGRGGVNALCRWCGKVRETVPHISGQCYKTKNARIKRHNRVVSAVVDKVGKLGWKAMIEPHLRNSKGELRKPDIIFIKGDTAVVVDVTVRWEDNAGSLEQAHSEKVAYYLELEEEIKNLTGGKNIHFFGFVLGARGKWSEGNNDLLQLLGMDRSKNFKESICRLVLYSTIGMMAIFSDR

SEQ ID NO: 9317 - protein, 1260 aa, Terrapene carolina
MEKSNLYFYTGLALDRVNNAPAVGFDAPADSVKYIRGVIRVAGPMDKMVWTIMKSHEHESENQVLPVEHGEEVEENVCDDHGEEILSILPMVFTRDTFNDLTMESFNPDFKYLSTFDDPYVSESGYLNAHLVNGSSLLNSFRPSTDFNRDRNKDLNSTGSNINILESSSWKDGVFYLEYPVDSFNCPICPQILPTFGKWAKHINVVHKSKAIRVVCSKCGKSSQYHNIACHYPKCIPKKADTPMKSHTCSVCGLGFHTRSGLSQHCRHRHPAVRNEQRKEDMAAKSKIKEGSTRSRIWTKDEVAQLIQLERKYIGKRNINKCIESEMRTKTNKQISDKRRELAKKKLVVTGDREEVSEVEDIRVNILEIPPPRERIFPLKGHPEVDLVEKICKRGKQSREGREIINSLGEIEGLLKEDLTKALGWAMLEKVCYSLVEGKEPRNESQIELRNKGKGKMRKEGRRKQFNAIRRYATKKAKYKFYQQLFDKDRRRLTRIIMGEPDKAKCAIPMKEIEEYYVNILGTIGHGNMIGWPSSTENADNDILMSPISVDEIKIALREIRKDSAPGPDKVKVSNLWDIFNLDSLILTKIFNIWFLNRQVPDEFKKNRTILIPKTQDEEEMKKLTSWRPLTIGSVWIRIYTKILAKRLVETVKICSRQKGFISAPGCEENIAILDNLIKGAKRNGNEIAIVFVDLAKAFDSVGHGHIIAGLRRFGIDEHFIDIIRDLYDNCTTRVWVGDEATESILIRRGVKQGDPLSPILFNIAMDPLLTRLEVEGSGFYVKGNGVTSLAFADDVAILSSSYKGMIKNLGILEEFCKNTNLSVNVKKTKGFHILTKHKTYVVNPKDNWQIGSEEIEYVQPGDFEKYLGARIDPWIGVGGPVLKEKLKDWSENLIKAPLKPAQKILILQTYILPKLFYNLLLIEPPFNLLDDLDVLVRKIVKEILHLPQCTTDGIFYSRGRDGGLALTKFSVQIPNMLICKWRRHIVSRDDWMDLSYLYAGENLVDKILSFSAVTSHPKKWREEEFLRWSELRCQGIGIKYFKNDLISNSIFRNFTKVKSSAYIAALQLRANIYPTRETLARGRGGVNALCRWCGKVRETVPHISGQCYKTKNARIKRHNRVVSAVVDKVGKLGWKAMIEPHLRNSKGELRKPDIIFIKGDTAVVVDVTVRWEDNAGSLEQAHSEKVAYYLELEEEIKNLTGGKNIHFFGFVLGARGKWSEGNNDLLQLLGMDRSKNFKESICRLVLYSTIGMMAIFSDR

SEQ ID NO: 9318 - protein, 1260 aa, Actinemys marmorata
MEKSNLYFYTGLALDRVNNAPAVGFDAPADSVKYIRGVIRVAGPMDKMVWTIMKSHEHESENQVLPVEHGEEVEENVCDDHGEEILSILPMVFTRDTFNDLTMESFNPDFKYLSTFDDPYVRESGYLNAHLVNGSSLLNSFRPSTDFNRDRNKDLNSTGSNINILESSSWKDGVFYLEYPVDSFNCPICPQILPTFGKWAKHINVVHKSKAIRVVCSKCGKSSQYHNIACHYPKCIPKKADTPMKSHTCSVCGLGFHTRSGLSQHCRHRHPAVRNEQRKEDMAAKSTIKEGSTRSRIWTKDEVAQLIQLERKYIGKRNINKCIESEMRTKTNKQISDKRRELAKKKLVVTGDREEVTEVEDIRVNILEIPPPRERIFPLKGHPEVDLVEKICKRGKQSREGREIINSLGEIEGLLKEDLTKALGWAMLEKLCYSLVEGKDPRNESQIELRNKGKGKMRKEGRRKQFNAIRRYATKKAKYKFYQQLFDKDRRRLTRIIMGEPDKAKCAIPMKEIEEYYVNILGTIGHGNMIGWPSSTENADNDILMSPISVDEIRIALREIRKDSAPGPDKVKVSNLWDIFNLDSLILTKIFNIWFLNRQVPDEFKKNRTILIPKTQDEEEMKKLTSWRPLTIGSVWIRIYTKILAKRLVETVKICSRQKGFISAPGCEENIAILDNLIKGAKRNGNEIAIVFVDLAKAFDSVGHGHIIAGLRRFGIDEHFIDIIRDLYDNCTTRVWVGDEATESILIRRGVKQGDPLSPILFNIAMDPLLTRLEVEGSGFYVKGNSVTSLAFADDVAILSSSYKGMIKNLGILEEFCKNTNLSVNVKKTKGFHILTKHKTYVVNPKDNWQIGSEEIEYVQPGDFEKYLGARIDPWIGVGGPVLKEKLKDWSENLIKAPLKPAQKILILQTYILPKLFYNLLLIEPPFNLLDDLDVLVRKIVKKILHLPQCTTDGIFYSRGRDGGLALTKFSVQIPNMLIRKWRRHIVSRDDWMDLSYLYAGENLVDKILSFSAVTSHPKKWREEEFLRWSELRCQGIGIKYFKNDLISNSIFRNSSKVKSSAYIAALQLRANIYPTRETLARGRGGVNALCRWCGKVRETVPHISGQCYKTKNARIKRHNRVVSAVVDKVGKLGWKAMIEPHLRNSKGELRKPDIIFIKGDTAVVVDVTVRWEDNAGSLEQAHSEKVAYYLELEEEIKNLTGGKNIHFFGFVLGARGKWSEGNNDLLQLLGMDRSKNFKESICRLVLYSTIGMMAIFSDR

SEQ ID NO: 9319 - protein, 1260 aa, Chrysemys picta
MEKSNLYFYTGLALDRVNNAPAVGFDAPADSVKYIRGVIRVAGPMDKMVWTIMKSHENESENQVLPVEHGEEVEENVCDDHGEEILSILPMVFTRDTFNDLTMDSFNPDFKYLSTFDDPYVRESGYLNAHLVNGSSLLNSFRPSTDFNRDRNKDLNSTGSNINILESNSWKDGVFYLEYPVDSFNCPICPQILPTFGKWAKHINVVHKSKAIRVVCSKCGKSSQYHNIACHYPKCIPKKADTPMKSHTCSVCGLGFHTRSGLSQHCRHRHPAVRNEQRKEDMAAKSKIKEGSTRSRIWTKDEVAQLIQLERKYIGKRNINKCIESEMRTKTNKQISDKRRELAKKKLVVTGDREEVTEVEDIRVNILEIPPPRERIFPLKGHPEVDLVEKICKRGKQSREGREIINSLGEIEGLLKEDLTKALGWAMLEKLCYSLVEGKDPRNESQIELRNKGKGKMRKEGRRKQFNAIRRYATKKAKYKFYQQLFDKDRRRLTRIIMGEPDKAKCAIPMKEIEEYYVNILGTIGHGNMIGWPSSTENADNDILMSPISVDEIRIALREIRKDSAPGPDKVKVSNLWDIFNLDSLIVTKIFNIWFLNRQVPDEFKKNRTILIPKTQDEEEMKKLTSWRPLTIGSVWIRIYTKILAKRLVETVKICSRQKGFISAPGCEENIAILDNLIKGAKRNGNEIAIVFVDLAKAFDSVGHGHIIAGLRRFGIDEHFIDIIRDLYDNCTTRVWVGDEATESILIRRGVKQGDPLSPILFNIAMDPLLTRLEVEGSGFYVKGNSVTSLAFADDVAILSSSYKGMIKNLGILEEFCKNTNLSVNVKKTKGFHILTKHKTYVVNPKDNWQIGSEEIEYVQPGDFEKYLGARIDPWIGVGGPVLKEKLKDWSENLIKAPLKPAPKILILQTYILPKLFYNLLLIEPPFNLLDDLDVLVRKIVKEILHLPQCTTDGIFYSRGRDGGLALTKFSVQIPNMLIRKWRRHIVSRDDWMDLSYLYAGENLVDKILLFSAVTSHPKKWREEEFLRWSELRCQGVGIKYFKNDLISNSIFRNSSKVKSSAYIAALQLRANIYPTRETLARGRGGVNALCRWCVKVRETVPHISGQCYKTKNARIKRHNRVVSAVVDKVGKLGWKAMIEPHLRNSKGELRKPDILFIKGGTAVVVDVTVRWEDNAGSLEQAHSEKVAYYLELEEEIKNLTGGKNIHFFGFVLGARGKWSEGNNDLLQLLGMDRSKNFKESICRLVLYSTIGMMAIFSDR

SEQ ID NO: 9320 - protein, 1131 aa, Chrysemys picta
MEKSNLYFYTGLALDWVNNAPAVGFDAPADSVKYIRGVIRVAGPMDKMVWTKMKSHENESENQVLPVEHGEKVEENVCDDHGEEILSILPMVFTRDTFNDLTMDSFNPDFKYLSTFDDPYVRESGYLNAHLVNGSSLLNSFRPSTDFNRDRNKDLNSTGSNINILESSSWKDGVFYLEYPVDSFNCPICPQILPTFGKWAKHINVVHKSKAIQVVCSKCGKSSQYRNIACHYLKCIPKKADTPMKSHMCSVCGLGFHTRSRLSQHCRHRHPAVRNEQRKEDMAAKSKIKEGSTRSRAMLEKLCYSLVEGKDPRNESQIELRNKGKGKLRKEGRRKQFNAIRRYATKKAKYKFYQQLFDKDRRRLTRIIMGEPDKAKCAIPIKEIEEYYVNILGTIGHGNMIGWPSSTENADNDILMSPISVDEIRIALREIRKDSAPGPDKVKVSNLWDIFNLDSLILTKIFNIWFLNRQVPDEFKKNRTILIPKTQDEEEMKKLTSWRPLTIGSVWIRIYTKILAKRLVETVKICSRQKGFISAPGCEENIAILDNLIKGAKQNGNEIAIVFVDLAKAFDSVGHGHIIAGLRRFGIDEHFIDIIRDLYDNCTTRVWVGDEATESILIRRGVKQGDPLSPILFNIAMDPLLTRLEVEGSGFYVKGNSVTSLAFADDVAILSSSYKGMIKNLGILEEFCKNTNLSVNVKKTKGFHILTKYKTYVVNPKDNWQIGSEEIEYVQPGDFEKYLGARIDPWIGVGGPVLKEKLKDWSENLIKAPLKPAPKILILQTYILPKLFYNLLLIEPPFNLLDDLDVLVRKIVKEILHLPQCTTDGIFYSRGRDGGLALTKFSVQIPNMLIRKWRRHIVSRDDWMDLSYLYAGENLVDKILLFSAVTSHPKKWREEEFLRWSELRCQGVGIKYFKNDLISNSIFRNSSKVKSSAYIAALQLRANIYPTRETLARGRGGVNALCRWCGKVRETVPHISGQCYKTKNARIKRHNRVVSAVVDKVGKLGWKAIIESHLRNSKGELRKPDIIFIKGDTAVVVDVTVRWEDNAGSLEQAHSEKVAYYLELEEEIKNLTGGKNIHFFGFVLGARGKWSEGNNDLLQLLGMDRSKNFKESICRLVLYSTIGMMAIFSDR

SEQ ID NO: 9321 - protein, 1241 aa, Chrysemys picta
MEKSNLYFYTGLALDRVNNAPAVGFDAPADSVKYIRGVIRVAGPMDKMVWTIMKSHENESENQVLPVEHGEEVEENVCDDHGEEILSILPMVFTRDTFNDLTMDSFNPDFKYLSTFDDPYVRESSTDFNRDRNKDLNSIGSNINILESSSWKDGVFYLEYPVDSFNCPICPQILPTFGKWAKHINVVHKSKAIRVVCSKCGKSSQYHNIACHYPKCIPKKADTPMKSHTCSVCGLGFHTRSGLSQHCRHRHPAVRNEQRKEDMAAKSKIKEGSIRSRIWTKDEVAQLIQLERKYIGKRNINKCIESEMRTKTNKQISDKRRELAKKKLVVTGDREEVTEVEDIRVNILEIPPPRERIFPLKGHPEVDLVEKICKRGKQSREGREIINSLGEIEGLLKEDLTKALGWAMLEKLCYSLVEGQDPRNESQIELRNKGKGKIRKEGRRKQFNAIRRYATKKAKYKFYQQLFDKDRRRLTRIIMGEPDKAKCAIPMKEIEEYYVNILGTIGHGNMIGWPSSTENADNDILMSPISVDEIRIALTEIRKDSAPGPDKVKVSNLWDIFNLDSLILTKIFNIWFLNRQVPDEFKKNRTILIPKTQDEEEMKKLTSWRPLTIGSVWIRIYTKILAKRLVEIVKICSRQKGFISAPGCEENIAILDNLIKGAKRNGNEIAIVFVDLAKAFDSVGHGHIIAGLRRFGIDEHFIDIIRDLYDNCTTRVWVGDEATESILIRRGVKQGDPLSPILFNIAMDPLLTRLEVEGSGFYVKGNSVTSLAFADDVAILSSSYKGMIKNLGILEEFCKNTNLSVNVKKTKGFHILTKHKTYVVNPKDNWQIGSEKIEYVQPGDFEKYLGARIDPWIGVGGPVLKEKLKDWSENLIKAPLKPAQKILILQTYILPKLFYNLLLIEPPFNLLDDLDVLVRKIVKEILQLPQCTTDGIFYSRGRDGGLALTKFSVQIPNMLIRKWRRHIVSRDDWMDLSYLYAGENLVDKILSFSAVTSHPKKWREEEFLRWSELRCQGIGIKYFKNDLISNSIFRNSSKVKSSAYIAALQLRANIYPTRETLARGRGGVNALCRWCGKVRETVPHISGQCYKTKNARIKRHNRVVSAVVDKVGKLGWKAMIEPHLRNSKGELRKPDIIFIKGDTAVVVDVTVRWEDNAGSLEQAHSEKVAYYLELEEEIKNLTGGKNIHFFGFVLGARGKWSEGNNDLLQLLGMDRSKNFKESICRLVLYSTIGMMAIFSDR

SEQ ID NO: 9322 - protein, 1241 aa, Chrysemys picta
MEKSNLYFYTGLALDRVNNAPAVGFDAPADSVKYIRGVIRVAGPMDKMVWTIMKSHENESENQVLPVEHGEEVEENVCDDHGEEILSILPMVFTRDTFNDLTMDSFNPDFKYLSTFDDPYVRESSIDFNRDRNKDLNSIGSNINILESSSWKDGFFYLEYPVDSFNCPICPQILPTFGKWAKHINVVHKSKAIRVVCSKCGKSSQYHNIACHYPKCIPKKADTPMKSHTCSVCGLGFHTRSGLSQHCRHRHPAVRNEQRKEDMAAKSKIKEGSTRSRIWTKDEVAQLIQLERKYIGKRNINKCIESEMRTKTNKQISDKRRELAKKKLVVTGDREEVTEVEDIRVNILEIPPPRERIFPLKGHPEVDLVEKICKRGKQSREGREIINSLGEIEGLLKEDLTKALGWAMLEKLCYSLVEGQDPRNESQIELRNKGKGKIRKEGRRKQFNAIRRYATKKAKYKFYQQLFDKDRRRLTRIIMGEPDKAKCAIPMKEIEEYYVNILGTIGHGNMIGWPSSTENADNDILMSPISVDEIRIALTEIRKDSAPGPDKVKVSNLWDIFNLDSLILTKIFNIWFLNRQVPDEFKKNRTILIPKTQDEEEMKKLTSWRPLTIGSVWIRIYTKILAKRLVETVKICSRQKGFISAPGCEENIAILDNLIKGAKRNGNEIAIVFVDLAKAFDSVGHGHIIAGLRRFGIDEHFIDIIRDLYDNCTTRVWVGDEATESILIRRGVKQGDPLSPILFNIAMDPLLTRLEVEGSGFYVKGNSVTSLAFADDVAILSSSFKGMIKNLGILEEFCKNTNLSVNVKKTKGFHILTKHKTYVVNPKDNWQIGSEKIEYVQPGDFEKYLGARIDPWIGVGGPVLKEKLKDWSENLIKAPLKPAQKILILQTYILPKLFYNLLLIEPPFNLLDDLDVLVRKIVKEILHLPQCTTDGIFYSRGRDGGLALTKFSVQIPNMLIRKWRRHIVSRDDWMDLSYLYAGENLVDKILSFSAVTSHPKKWREEEFLRWSELRCQGIGIKYFKNDLISHSIFRNSSKVKSSAYIAALQLRANIYPTRETLARGRGGVNALCRWCGKVRETVPHISGQCYKTKNARIKRHNRVVSAVVDKVGKLGWKAMIEPHLRNSKGELRKPDIIFIKGDTAVVVDVTVRWEDNAGSLEQAHSEKVAYYLELEEEIKNLTGGKNIHFFGFVLGARGKWSEGNNDLLQLLGMDRSKNFKESICRLVLYSTIGMMAIFSDR

SEQ ID NO: 9323 - protein, 1314 aa, Terrapene carolina
MDAPLVRVRFPLVRVRFPQARVSFPQARVSFPQVRVSFPLERVSFPLRRVNLLAMEKSNLYFYTGLALDRVNNAPAVGFDAPADSVKYIRGVIRVAGPMDKMVWTIMKSHEHESENQVLPVEHGEEVEENVCDDHGEEILSILPMVFTRDTFNDLTMESFNPDFKYLSTFDDPYVSESGYLNAHLVNGSSLLNSFRPSTDFNRDRNKDLNSIGSNINILESSSWKDGVFYLEYPVDSFNCPICPQILPTFGKWAKHINVVHKSKAIRVVCSKCGKSSQYHNIACHYPKCIPKKADTPMKSHTCSVCGLGFHTRSGLSQHCRHRHPAVRNEQRKEDMAAKSKIKEGSTRSRIWTKDEVAQLIQLERKYIGKRNINKCIESEMRTKTNKQISDKRRELAKKKLVVTGDREEVTEVEDIRVNILEIPPPRERIFPLKGHPEVDLVEKICKRGKQSREGREIINSLGEIEGLLKEDLTKALGWAMLEKVCYSLVEGKDPRNESQIELRNKGKGKMRKEGRRKQFNAIRRYATKKAKYKFYQQLFDKDRRRLTRIIMGEPDKAKCAIPMKEIEEYYVNILGTIGHGNMIGWPSSTENADNDILMSPISVDEIRIALREIRKDSAPGPDKVKVSNLWDIFNLDSLILTKIFNIWFLNRQVPDEFKKNRTILIPKTQDEEEMKKLTSWRPLTIGSVWIRIYTKILAKRLVETVKICRRQKGFISAPGCEENIVILDNLIKGAKRNGNEIAIVFVDLAKAFDSVGHGHIIAGLRRFGIDEHFIDIIRDLYDNCTTRVWVGDEATESILIRRGVKQGDPLSPILFNIAMDPLLTRLEVEGSGFYVKGNGVTSLAFADDVAILSSSYKGMIKNLGILEEFCKNTNLSVNVKKTKGFHILTKHKTYVVNPKDNWQIGSEEIEYVQPGDFEKYLGARIDPWIGVGGPVLKEKLKDWSENLIKAPLKPAQKILILQTYILPKLFYNLLLIEPPFNLLDDLDVLVRKIVKEILHLPQCTTDGIFYSRGRDGGLALTKFSVQIPNMLIRKWRRHIVSRDDWMDLSYLYAGENLVDKILSFSAVTSHPKKWREEEFLRWSELRCQGIGIKYFKNDLISNSIFRNSTKVKSSAYIAALQLRANIYPTRETLARGRGGVNALCRWCGKVRETVPHISGQCYKTKNARIKRHNRVVSAVVDKVGKLGWKAMIEPHLRNSKGELRKPDIIFIKGDTAVVVDVTVRWEDNAGSLEQAHSEKVAYYLELEEEIKNLTGGKNIHFFGFVLGARGKWSEGNNDLLQLLGMDRSKNFKESICRLVLYSTIGMMAIFSDR

SEQ ID NO: 9324 - protein, 1260 aa, Terrapene carolina
MEKSNLYFYTGLALDRVNNAPAVGFDAPADSVKYIRGVIRVAGPMDKMVWTIMKSHEHESENQVLPVEHGEEVEENVCDDHGEEILSILPMVFTRDTFNDLIMESFNPDFKYLSTFDDPYVSESGYLNAHLVNGSSLLNSFRPSTDFNRDRNKDLNSTGSNINILESSSWKDGVFYLEYPVDSFNCPICPQILPTFGKWAKHINVVHKSKAIRVVCSKCGKSSQYHNIACHYPKCIPKKADTPMKSHTCSVCGLGFHTRSGLSQHCRHRHPAVRNEQRKEDMAAKSKIKEGSTRSRIWTKDEVAQLIQLERKYIGKRNINKCIESEMRTKTNKQISDKRRELAKKKLVVTGDREEVTEVEDIRVNILEIPPPRERIFPLKGHPEVDLVEKICKRGKQSREGREIINSLGEIEGLLKEDLTKALGWAMLEKVCYSLVEGKDPRNESQIELRNKGKGKMRKEGRRKQFNAIRRYATKKAKYKFYQQLFDKDRRRLTRIIMGEPDKAKCAIPMKEIEEYYVNILGTIGHGNMIGWPSSTENADNDILMSPISVDEIRIALREIRKDSAPGPDKVKVSNLWDIFNLDSLILTKIFNIWFLNRQVPDEFKKNRTILIPKTQDEEEMKKLTSWRPLTIGSVWIRIYTKILAKRLVETVKICSRQKGFISAPGCEENIAILDNLIKGAKRNGNEIAIVFVDLAKAFDSVGHGHIIAGLRRFGIDEHFIDIIRDLYDNCTTRVWVGDEATESILIRRGVKQGDPLSPILFNIAMDPLLTRLEVEGSGFYVKGNGVTSLAFADDVAILSSSYKGMIKNLGILEEFCKNTNLSVNVKKTKGFHILTKHKTYVVNPKDNWQIGSEEIEYVQPGDFEKYLGARIDPWIGVGGPVFKEKLKDWSENLIKAPLKPAQKILILQTYILPKLFYNLLLIEPPFNLLDDLDVLVRKIVKEILHLPQCTTDGIFYSRGRDGGLALTKFSVQIPNMLIRKWRRHIVSRDDWMDLSYLYAGENLVDKILSFSAVTSHPKKWREEEFLRWSELRCQGIGIKYFKNDLISNSIFRNSTKVKSSAYIAALQLRANIYPTRETLARGRGGVNALCRWCGKVRETVPHISGQCYKTKNARIKRHNRVVSAVVDKVGKLGWKAMIEPHLRNSKGELRKPDIIFIKGDTAVVVDVTVRWEDNAGSLEQAHSEKVAYYLELEEEIKNLTGGKNIHFFGFVLGARGKWSEGNNDLLQLLGMDRSKNFKESICRLVLYSTIGMMAIFSDR

SEQ ID NO: 9325 - protein, 1260 aa, Terrapene carolina
MEKSNLYFYTGLALDRVNNAPAVGFDAPADSVKYIRGVIRVAGPMDKMVWTIMKSHEHESENQVLPVEHGEEVEENVCDDHGEEILSILPMVFTRDTFNDLTMESFNPDFKYLSTFDDPYVSESGYLNAHLVNGSSLLNSFRPSTDFNRDRNKDLNSTGSNINILESSSWKDGVFYLEYPVDSFNCPICPQILPTFGKWAKHINVVHKSKAIRVVCSKCGKSSQYHNIACHYPKCIPKKADTPMKSHTCSVCGLGFHTRSGLSQHCRHRHPAVRNEQRKEDMAAKSKIKEGSTRSRIWTKDEVAQLIQLERKYIGKRNINKCIESEMRTKTNKQISDKRRELAKKKLVVTGDREEVTEVEDIRVNILEIPPPRERIFPLKGHPEVDLVEKICKRGKQSREGREIINSLGEIEGLLKEDLTKALGWAMLEKVCYSLVEGKDPRNESQIELRNKGKGKMRKKGRRKQFNAIRRYATKKAKYKFYQQLFDKDRRRLTRIIMGEPDKAKCAIPMKEIEEYYVNILGTIGHGNMIGWPSSTENADNDILMSPISVDEIRIALREIRKDSAPGPDKVKVSNLWDIFNLDSLILTKIFNIWFLNRQVPDEFKKNRTILIPKTQDEEEMKKLTSWRPLTIGSVWIRIYTKILAKRLVETVKICSRQKGFISAPGCEENIAILDNLIKGAKRNGNEIAIVFVDLAKAFDSVGHGHIIAGLRRFGIDEHFIDIIRDLYDNCTTRVWVGDEATESILIRRGVKQGDPLSPILFNIAMDPLLTRLEVEGSGFYVKGNGVTSLAFADDVAILSSSYKGMIKNLGILEEFCKNTNLSVNVKKTKGFHILTKHKTYVVNPKDNWQIGSEEIEYVQPGDFEKYLGARIDPWIGVGGPVLKEKLKDWSENLIKAPLKPAQKILILQTYILPKLFYNLLLIEPPFNLLDDLDVLVRKIVKEILHLPQCTTDGIFYSRGRDGGLALTKFSVQIPNMLIRKWRRHIVSRDDWMDLSYLYAGENLVDKILSFSAVTSHPKKWREEEFLRWSELRCQGIGIKYFKNDLISNSIFRNSTKVKSSAYIAALQLRANIYPTRETLARGRGGVNALCRWCGKVRETVPHISGQCYKTKNARIKRHNRVVSAVVDKVGKLGWKAMIEPHLRNSKGELRKPDIIFIKGDTAVVVDVTVRWEDNAGSLEQAHSEKVAYYLELEEEIKNLTGGKNIHFFGFVLGARGKWSEGNNDLLQLLGMDRSKNFKESICRLVLYSTIGMMAIFSDR

SEQ ID NO: 9326 - protein, 1252 aa, Terrapene carolina
MEKSNLYFYTGLALDRVNNAPAVGFDAPADSVKYIRGVIRVAGPMDKMVWTIMKSHEHESENQVLPVEHGEEVEENVCDDYGEEILSILPMVFTRDTFNDLTMESFNPDFKYLSTFDDPYVSESGYLNAHLVNGSSLLNSFRPSTDFNRDRNKDLNSTGSNINILESSSWKDGVFYLEYPVDSFNCPICPQILPTFGKWAKHINVVHKSKAIRVVCSKCGKSSQYHNIACHYPKCIPKKADTPMKSHTCSVCGLGFHTRSGLSQHCRHRHPAVRNEQRKEDMTAKSKIKEGSTRSRIWTKDEVAQLIQLERKYIGKRNINKCIESEMRTKTNKQISDKRRELAKKKLVVTGDREEVTEVEDIRVNILEIPPPRERIFPLKGHPEVDLVEKICKRGKQSREGREIINSLGEIEGLLKEDLTKALGWAMLEKLCYSLVEGKDPRNESQIELRNKGKGKMRKEGRRKQFNAIRRYATKKAKYKFYQQLFDKDRRRLTRIIMGEPDKAKCAIPMKEIEEYYVNILGTIGHGNMIGWPSSTENADNDILMSPISVDEIRIALREIRKDSAPGPDKVKVSNLWDIFNLDSLILTKIFNIWFLNRQVPDEFKKNRTILIPKTQDEEEMKKLTSWRPLTIGSVWIRIYTKILAKRLVETVKICSRQKGFISAPGCEENIAILDNLIKGAKRNGNEIAIVFVDLAKAFDSVGHGHIIAGLRRFGIDEHFIDIIRDLYDNCTTRVWVGDEATESILIRRGVKQGDPLSPILFNIAMDPLLTRLEVEGSGFYVKGNGVTSLAFADDVAILSSSYKGMIKSLGILEEFCKNTNLSVNVKKTKGFHILTKHKTYVVNPKDNWQIGSEEIEYVQPGDFEKYLGARIDPWIGVGGPVLKEKLKDWSENLIKAPLKPAQKILILQTYILPKLFYNLLLIEPPFNLLDDLDVLVRKIVKEILHLPQCTTDGIFYSRGRDGGLALTKFSVQIPNMLIRKWRRHIVSRDDWMDLSYLYAGENLVDKILSFSAVTSHPKKWREEEFLRWSELRCQGIGIKYFKNDLISNSIFRNSSKVKSSAYIAALQLRANIYPTRETLARGRGGVNALCRWCGKVRETVPHISGQCYKTKNARIKRHNRVVSAVVDKVGKLGWKAMIEPHLRNSKGELRKPDIIFIKGDTAVVVDVTVRWEDNAGSLEQAHSEKVAYYLELEEEIKNLREVKIFTSLVLCLGRVASGVKVIMICYNYWEWTEVKILRRVYVDLFYIPLLV

SEQ ID NO: 9327 - protein, 1259 aa, Actinemys marmorata
MEKSNLYFYTGLALDRVNNAPAVGFDAPADSVKYIRGVIRVAGPMDKMVWTIMKSHEHESENQVLPVEHGEEVEENVCDDHGEEILSILPMVFTRDTFNDLTMESFNPDFKYLSTFDDPYVRESGYLNAHLVNGSSLLNSFRPSTDFNRDRNKDLSTGSNINILESSSWKDGVFYLEYPVDSFNCPICPQILPTFGKWAKHINVVHKSKAIRVVCSKCGKSSQYHNIACHYPKCIPKKADTPMKSHTCLVCGLGFHTRSGLSQHCRHRHPAVRNEQRKEDMAAKSKIKEGSTRSRIWTKDEVAQLIQLERKYIGKRNINKCIESEMRTKTNKQISDKRRELAKKKLVVTGDREEVTEVEDIRVNILEIPPPRERIFPLKGHPEVDLVEKICKRGKQSREGREIINSLGEIEGLLKEDLTKALGWAMLEKLCYSLVEGKDPRNESQIELRNKGKGKMRKEGRRKQFNAIRRYATKKAKYKFYQQLFDKDRRRLTRIIMGEPDKAKCAIPMKEIEEYYVNILGTIGHGNMIGWPSSTENADNDILMSPISVDEIRIALREIRKDSAPGPDKVKVSNLWDIFNLDSLILTKIFNIWFLNRQVPDEFKKNRMILIPKTQDEEEMKKLTSWRPLTIGSVWIRIYTKILAKRLVETVKICSRQKGFISAPGCEENIAILDNLIKGAKRNGNEIAIVFVDLAKAFDSVGHGHIIAGLRRFGIDEHFIDIIRDLYDNCTTRVWVGDEATESILIRRGVKQGDPLSPILFNIAMDPLLTRLEVEGSGFYVKGNSVTSLAFADDVAILSSSYKGMIKNLGILEEFCKNTNLSVNVKKTKGFHILTKHKTYVVNPKDNWQIGSEEIEYVQPGDFEKYLGARIDPWIGVGGPVLKEKLKDWSENLIKAPLKPAQKILILQTYILPKLFYNLLLIEPPFNLLDDLDVLVRKIVKEILHLPQCTTDGIFYSRGRDGGLALTKFSVQIPNMLIRKWRRHIVSRDDWMDLSYLYAGENLVDKILSFSAATSHPKKWREEEFLRWSELRCQGIGIKYFKNDLISNSIFRNSSKVKSSAYIAALQLRANIYPTRETLARGRGGVNALCRWCGKVRETVPHISGQCYKTKNARIKRHNRVVSAVVDKIGKLGWKAMIEPHLRNSKGELRKPDIIFIKGDTAVVVDVTVRWEDNAGSLEQAHSEKVAYYLELEEEIKNLTGGKNIHFFGFVLGARGKWSEGNNDLLQLLGMDRSKNFKESICRLVLYSTIGMMAIFSDR

SEQ ID NO: 9328 - protein, 1241 aa, Chrysemys picta
MEKSNLYFYTGLALDRVNNAPAVGFDAPADSVKYIRGVIRVAGPMDKMVWTIMKSHENESENQVLPVEHGEEVEENVCDDHGEEILSILPMVFTRDTFNDLTMDSFNPDFKYLSTFDDPYVRESSTDFNRDRNKDLNSIGSNINILESSSWKDGVFYLEYPVDSFNCPICPQILPTFGKWAKHINVVHKSKAIRVVCSKCGKSSQYHNIACHYPKCIPKKADTPMKSHTCSVCGLGFHTRSGLSQHCRHRHPAVRNEQRKEDMAAKSKIKEGSTRSRIWTKDEVAQLIQLERKYIGKRNINKCIESEMRTKTNKQISDKRRELAKKKLVVTGDREEVTEVEDIRVNILEIPPPRERIFPLKGHPEVDLVEKICKRGKQSREGREIINSLGEIEGLLKEDLTKALGWAMLEKLCYSLVEGQDPRNESQIELRNKGKGKIRKEGRRKQFNAIRRYATKKAKYKFYQQLFDKDRRRLTRIIMGEPDKAKCAIPMKEIEEYYVNILGTIGHGNMIGWPSSTENADNDILMSPISVDEIRIALTEIRKDSAPGPDKVKVSNLWDIFNLDSLILTKIFNIWFLNRQVPDEFKKNRTILIPKTQDEEEMKKLTSWRPLTIGSVWIRIYTKILAKRLVEIVKICSRQKGFISAPGCEENIAILDNLIKGAKRNGNEIAIVFVDLAKAFDSVGHGHIIAGLRRFGIDEHFIDIIRDLYDNCTTRVWVGDEATESILIRRGVKQGDPLSPILFNIAMDPLLTRLEVEGSGFYVKGNSVTSLAFADDVAILSSSYKGMIKNLGILEEFCKNTNLSVNVKKTKGFHILTKHKTYVVNPKDNWQIGSEKIEYVQPGDFEKYLGARIDPWIGVGGPILKEKLKDWSENLIKAPLKPAQKILILQTYILPKLFYNLLLIEPPFNLLDDLDVLVRKIVKEILHLPQCTTDGIFYSRGRDGGLALTKFSVQIPNMLIRKWRRHIVSRDDWMDLSYLYAGENLVDKILSFSAVTSHPKKWREEEFLRWSELRCQGIGIKYFKNDLISNSIFRNSSKVKSSAYIAALQLRANIYPTRETLARGRGGVNALCRWCGKVRETVPHISGQCYKTKNARIKRHNRVVSAVVDKVGKLGWKAMIEPHLRNSKGELRKPDIIFIKGDTAVVVDVTVRWEDNAGSLEQAHSEKVAYYLELEEEIKNLTGGKNIHFFGFVLGARGKWSEGNNDLLQLLGMDRSKNFKESICRLVLYSTIGMMAIFSDR

SEQ ID NO: 9329 - protein, 1241 aa, Chrysemys picta
MEKSNIYFYTGLALDRVNNAPAVGFDAPADSVKYIRGVIRVAGPMDKMVWTIMKSHENESENQVLPVEHGEEVEENVCDDHGEEILSILPMVFTRDTFNDLTMDSFNPDFKYLSTFDDPYVRESSTDFNRDRNKDLNSIGSNINILESSSWKDGVFYLEYPVDSFNCPICPQILPTFGKWAKHINVVHKSKAIRVVCSKCGKSSQYHNIACHYPKCIPKKVDTPMKSHTCSVCGLGFHTRSGLSQHCRHRHPAVRNEQRKEDMAAKSKIKEGLTRSRIWTKDEVAQLIQLERKYIGKRNINKCIESEMRTKTNKQISDKRRELAKKKLVVTGDREEVTEVEDIRVNILEIPPPRERIFPLKGHPEVDLVEKICKRGKQSREGREIINSLGEIEGLLKEDLTKALGWAMLEKLCYSLVEGQDPRNESQIELRNKGKGKIRKEGRRKQFNAIRRYATKKAKYKFYQQLFDKDRRRLTRIIMGEPDKAKCAIPMKEIEEYYVNILGTIGHGNMIGWPSSTENADNDILMSPISVDEIRIALTEIRKDSAPGPDKVKVSNLWDIFNLDSLILTKIFNIWFLNRQVPDEFKKNRTILIPKTQDEEEMKKLTSWRPLTIGSVWIRIYTKILAKRLVETVKICSRQKGFISAPGCEENIAILDNLIKGAKRNGNEIAIVFVDLAKAFDSVGHGHIIAGLRRFGIDEHFIDIIRDLYDNCTTRVWVGDEATESILIRRGVKQGDPLSPILFNIAMDPLLTRLEVEGSGFYVKGNSVTSLAFADDVAILSSSYKGMIKNLGILEEFCKNTNLSVNVKKTKGFHILTKHKTYVVNPKDNWQIGSEKIEYVQPGDFEKYLGARIDPWIGVGGPVLKEKLKDWSENLIKAPLKPAQKILILQTYILPKLFYNLLLIEPPFNLLDDLDVLVRKIVKEILHLPQCTTDGIFYSRGRDGGLALTKFSVQIPNMLIRKWRRHIVSRDDWMDLSYLYAGENLVDKILSFSAVTSHPKKWREEEFLRWSELRCQGIGIKYFKNYLISNSIFRNSSKVKSSAYIAALQLRANIYPTRETLARGRGGVNALCRWCGKVRETVPHISGQCYKTKNARIKRHNRVVSAVVDKVGKLGWKAMIEPHLRNSKGELRKPDIIFIKGDTAVVVDVTVRWEDNAGSLEQAHSEKVAYYLELEEEIKNLTGGKNIHFFGFVLGARGKWSEGNNDLLQLLGMDRSKNFKESICRLVLYSTIGMMAIFSDR

SEQ ID NO: 9330 - protein, 1260 aa, Terrapene carolina
MEKSNLYFYTGLALDRVNNAPAVGFDAPADSVKYIRGVIRVAGPMDKMVWTIMKSHEHESENQVLPVEHGEEVEENVCDDHGEEILSILPMVFTRDTFNDLTMESFNPDFKYLSTFDDPYVSESGYLNAHLVNGSSLLNSFRPSTDFNRDRNKDLNSTGSNINILESSSWKDGVFYLEYPVDSFNCPICPQILPTFGKWAKHINVVHKSKAIRVVCSKCGKSSQYHNIACHYPKCIPKKADTPMKSHTCSVCGLGFHTRSGLSQHCRHRHPAVRNEQRKEDMAAKSKIKEGSTRSRIWTKDEVAQLIQLERKYIGKRNINKCIESEMRTKTNKQISDKRRELAKKKLVVTGDREEVTEVEDIRVNILEIPPPRERIFPLKGHPEVDLVEKICKRGKQSREGREIINSLGEIEGLLKEDLTKALGWAMLEKLCYSLVEGKDPRNESQIELRNKGKGKMRKEGRRKQFNAIRRYATKKAKYKFYQQLFDKDRRRLTRIIMGEPDKAKCAIPMKEIEEYYVNILGTIGHGNMIGWPSSTENADNDILMSPISVDEIRIALREIRKDSAPGPDKVKVSNLWDIFNLDSLILTNIFNIWFLNRQVPDEFKKNRTILIPKTQDEEEMKKLTSWRPLTIGSVWIRIYTKILAKRLVETVKICSRQKGFIFAPGCEENIAILDNLIKGAKRNGNEIAIVFVDLAKAFDSVGHGHIIAGLRRFGIDEHFIDIIRDLYDNCTTRVWVGDEATESILIRRGVKQGDPLSPILFNIAMDPLLTRLEVEGSGFYVKGNGVTSLAFADDVAILSSSYKGMIKNLGILEEFCKNTNLSVNVKKTKGFHILTKHKTYVVNPKDNWQIGSEEIEYVQPGDFEKYLGARIDPWIGVGGPVLKEKLKDWSENLIKAPLKPAPKILILQTYILPKLFYNLLLIEPPFNLLDDLDVLVRKIVKEILHLPQCITDGIFYSRGRDGGLALTKFSVQIPNMLIRKWRRHIVSRDDWMDLSYLYAGENLVDKILSFSAVTSHPKKWREEEFLRWSELRCQGIGIKYFKNDLISNSIFRNSSKVKSSAYIAALQLRANIYPTRETLARGRGGVNALCRWCGKVRETVPHISGQCYKTKNARIKRHNRVVSAVVDKVGKLGWKAMIEPHLRNSKGELRKPYIIFIKGDTAVVVDVTVRWEDNAGSLEQAHSEKVAYYLELEEEIKNLTGGKNIHFFGFVLGARGKWSEGNNDLLQLLGMDRSKNFKESICRLVLYSTIGMMAIFSDR

SEQ ID NO: 9331 - protein, 1259 aa, Terrapene carolina
MEKSNLYFYTGLALDRVNNAPAVGFDAPADSVKYIRGVIRVAGPMDKMVWTIMKSHEHESENQVLPVEHGEEVEENVCDDHGEEILSILPMVFTRDTFNDLTMESFNPDFKYLSTFDDPYVSESGYLNAHLVNGSSLLNSFRPSTDFNRDCNKDLNSTGSNINILESSSWKDGVFYLEYPVDSFNCPICPQILPTFGKWAKHINVVHKSKAIRVVCSKCGKSSQYHNIACHYPKCIPKKADTPMKSHTCSVCGLGFHTRSGLSQHCRHRHPAVRNEQRKEDMAAKSKIKEGSTRSRIWTKDEVAQLIQLERKYIGKRNINKCIESEMRTKTNKQISDKRRELAKKKLVVTGDREEVTEVEDIRVNILEIPPPRERIFPLKGHPEVDLVEKICKRGKQSREGREIINSLGEIEGLLKEDLTKALGWAMLEKLCYSLVEGKDPRNESQIELRNKGKGKMRKEGRRKQFNAIRRYATKKAKYKFYQQLFDKDRRRLTRIIMGEPDKAKCAIPMKEIEEYYVNILGTIGHGNMIGWPSSTENADNDILMSPISVDEIRIALREIRKDSAPGPDKVKVSNLWDIFNLDSLILTKIFNIWFLNRQVPDEFKKNRTILIPKTQDEEMKKLTSWRPLTIGSVWIRIYTKILAKRLVETVKICSRQKGFISAPGCEENIAILDNLIKGAKRNGNEIAIVFVDLAKAFDSVGHGHIIAGLRRFGIDEHFIDIIRDLYDNCTTRVWVGDEATESILIRRGVKQGDPLSPILFNIAMDPLLTRLEVEGSGFYVKGNGVTSLAFADDVAILSSSYKGMIKNLGILEEFCKNTNLSVNVKKTKGFHILTKHKTYVVNPKDNWQIGSEEIEYVQPGDFEKYLGARIDPWIGVGGPVLKEKLKDWSENLIKAPLKPAQKILILQTYILPKLFYNLLLIEPPFNLLEDLDVLVRKIVKEILHLPQCTTDGIFYSRGRDGGLALTKFSVQIPNMLIRKWRRHIVSRDDWMDLSYLYAGENLVDKILSFSAVTSHPKKWREEEFLRWSELRCQGIGIKYLKNDLISNSIFRNSSKVKSSAYIAALQLRANIYPTRETLARGRGGVNALCRWCGKVRETVPHISGQCYKTKNARIKKHNRVVSAVVDKVGKLGWKAMIEPHLRNSKGELRKPDIIFMKGDTAVVVDVTVRWEDNAGSLEQAHSEKVAYYLELEEEIKNLTGGKNIHFFGFVLGARGKWSEGNNDLLQLLGMDRSKNFKESICRLVLYSTIGMMAIFSDR

SEQ ID NO: 9332 - protein, 1260 aa, Terrapene carolina
MEKSNLYFYTGLALDRVNNAPAVGFDAPADSVKYIRGVIRVAGPMDKMVWTIMKSHEHESENQVLPVEHGEEVEENVCDDHGEEILSILPMVFTRDTFNDLTMESFNPDFKYLSTFDDPYVSESGYLNAHLVNGSSLLNSFRPSTDFNRDRNKDLNSTGSNINILESSSWKDGVFYLEYPVDSFNCPICPQILPTFGKWAKHINVVHKSKAIRVVCSKCGKSSQYHNIACHYPKCIPKKADTPMKSHTCSVCGLGFHTRSGLSQHCRHRHPAVRNEQRKEDMAAKSKIKEGSTRSRIWTKDEVAQLIQLERKYIGKRNINKCIESEMRTKTNKQISDKRRELAKKKLVVTGDREEVTEVEDIRVNILEIPPPRERIFPLKGHPEVDLVEKICKRGKQSREGREIINSLGEIEGLLKEDLTKALGWAMLEKLCYSLVEGKDPRNESQIELRNKGKGKMRKEGRRKQFNAIRRYATKKAKYKFYQQLFDKDRRRLTRIIMGEPDKAKCAIPMKEIEEYYVNILGTIGHGNMIGWPSSTENADNDILMSPISVDEIRIALREIRKDSAPGPDKVKVSNLWDIFNLDSLILTKIFNIWFLNRQVPDEFKKNRTILIPKTQDEEEMKKLTSWRPLTIGSVWIRIYTKILAKRLVETVKICSRQKGFISAPGCEENIAILDNLIKGAKRNGNEIAIVFVDLAKAFDSVGHGHIIAGLRRFGIDEHFIDIIRDLYDNCTTRVWVGDEVTASILIRRGVKQGDPLSPILFNIAMDPLLTRLEVEGSGFYVKGNGVTSLAFADDVAILSSSYKGMIKNLGILEEFCKNTNLSVNVKKTKGFHILTKHKTYVVNPKDNWQIGSEEIEYVQPGDFEKYLGARIDPWIGVGGPVLKEKLKDWSENLIKAPLKPAQKILILQTYILPKLFYNLLLIEPPFNLLDDLDVLVRKIVKEILHLPQCTTDGIFYSRGRDGGLALTKFSVQIPNMLIRKWRRHIVSRDDWMDLSYLYAGENLVDKILSFSAVTSHPKKWREEEFLRWSELRCQGIGIKYFKNDLISNSIFRNSSKVKSSAYIAALQLRANIYPTRETLARGRGGVNALCRWCGKVRETVPHISGQCYKTKNARIKRHNRVVSAVVDKVGKLGWKAMIEPHLRNSKGELRKPDIIFIKGDTAVVVDVTVRWEDNAGTLEQAHSEKVAYYLELEEEIKNLTGGKNIHFFGFVLGARGKWSEGNNDLLQLLGMDRSKNFKESICRLVLYSTIGMMAIFSDR

SEQ ID NO: 9333 - protein, 934 aa, Terrapene carolina
MRTKTNKQISDKRRELAKKKLVVTGDREEVTEVEDIRVNILEIPPPRERIFPLKGHPEVDLVEKICKRGKQSREGREIINSLGEIEGLLKEDLTKALGWAMLEKLCYSLVEGKDPRNESQIELRNKGKGKMRKEGRRKQFNAIRRYATKKAKYKFYQQLFDKDRRRLTRIIMGEPDKAKCAIPMKEIEEYYVNILGTIGHGNMIGWPSSTENADNDILMSPISVDEIRIALREIRKDSAPGPDKVKVSNLWDIFNLDSLILTKIFNIWFLNRQVPDEFKKNRTILIPKTQDEEEMKKLTSWRPLTIGSVWIRIYTKILAKRLVETVKICSRQKGFISAPGCEENIAILDNLIKGAKRNGNEIAIVFVDLAKAFDSVGHGHIIAGLRRFGIDEHFIDIIRDLYDNCTTRVWVGDEATESILIRRGVKQGDSLSPILFNIAMDPLLTRLEVEGSGFYVKGNGVTSLAFADDVAILSSSYKGMIKNLGILEEFCKNTNLSVNVKKTKGFHILTKHKTYVVNPKDNWQIGSEEIEYVRPGDFEKYLGARIDPWIGVGGPVLKEKLKDWSENLIKAPLKPAQKILILQTYILPKLFYNLLLIEPPFNLLDDLDVLVRKIVKEILHLPQCITDGIFYSRGRDGGLALTKFSVQIPNMLIRKWRRHIVSRDDWMDLSYLYAGENLVDKILSFSAVTSHPKKWREEEFLRWSELRCQGIGIKYFKNDLISNSIFRNSSKVKSSAYIAALQLRANIYPTKETLARGRGGVNALCRWCGKVRETVPHISGQCYKTKNARIKRHNRVVSAVVDKVGKLGWKAMIEPHLRNSKGELRKPDIIFIKGDTAVVVDVTVRWEDNAGSLEQAHSEKVAYYLELEEEIKNLTGGKNIHFFGFVLGARGKWSEGNNDLLQLLGMDRSKNFKESICRLVLYSTIGMMAIFSDR

SEQ ID NO: 9334 - protein, 1170 aa, Actinemys marmorata
MEKSNLYFYTGLALDRVNNAPAVGFDAPADSVKYIRGVIRVAGPMDKMVWTIMKSHEHESENQVLPVEHGEEVEENVCDDHGEEILSILPMVFTRDTFNDLTMESFNPDFKYLSTFDDPYVRESGYLNAHLVNGSSLLNSFRPSTDFNRDRNKDLNSTGSNINILESSSWKDGVFYLEYPVDSFNCPICPQILPTFGKWAKHINVVHKSKAIRVVCSKCGKSSQYHNIACHYPKCIPKKADTPMKSHTCSVCGLGFHTRSGLSQHCRHRHPAVRNEQRKEDMAAKSKIKEGSTRSRIWTKDEVAQLIQLERKYIGKRNINKCIESEMRTKTNKQISDKRRELAKKKLVVTGDREEVTEVEDIRVNILEIPPPRERIFPLKGHPEVDLVEKICKWGKQSREGREIINSLGEIEGLLKEDLTKALGWAMLEKLCYSLVEGKDPRNESQIELRNKGKGKMRKEGRRKQFNAIRRYATKKAKYKFYQQLFDKDRRRLTRIIMGEPDKAKCAIPMKEIEEYYVDILGTIGHGNMIGWPSSTENADNYILMSPISVDEIRIALREIRKDSAPGPDKVKVSNLWDIFNLDSLILTKIFNIWFLNRQVPDEFKKNRTILIPKTQDEEEMKTLTSWRPLTIGSVWIRIYTKILAKRLVETVKICSRQKGFISAPGCEENIAILDNLIKGAKRNGNEIAIVFVDLAKAFDSVGHGHIIAGLRRFGIDEHFIDIIRDLYDNCTTRVWVGDEATESILIRRGVKQGDPLSPILFNIAMDPLLTRLEVEGSGFYVKGNSVTSLAFADDVAILSSSYKGMIKNLGILEEFCKNTNLSVNVKKTKGFHVLTKHKTYVVNPKDNWQTGSEEIEYVQPGDFEKYLGARIDPWIGVGGPVLKEKLKDWSENLIKAPLKPAQKILILQTYILPKLFYNLLLIEPPFNLLDDLDVLVRKIVKEILHLPQCTTDGIFYSRGRDGGLALTKFSVQIPNMLIRKWRRHIVSRDDWMDLSYLYAGENLVDKILSFSAVTSHPKKWREEEFLRWSELRCQGIGIKYFKNDLISNSIFRNSSKVKSSAYIAALQLRANIYPTRETLARGRGGVNALCRWCGKVRETVPHISGQCYKTKNARIKRHNRVVSAVVDKVGKLGWKAMIEPHLRNSKGELRKPDIIFIKGDTAVVVDVTV

SEQ ID NO: 9335 - protein, 1171 aa, Chrysemys picta
MEKSNLYFYTGLALDRVNNAPAVGFDAPADSVKYIRGVMRVAGPMDKMVWTIMKSHENESENQVLPVEHGEEVEENVCDDHGEEILSILPMVFTRDTFNDLTMDSFNPDFKYLSTFDDPYVRESGYLNAHLVNGSSLLNSFRPSTDFNRDRNKDLNSTGSNINILESSSWKDGVFYLEYPVDSFNCPICPQILPTFGKWAKHINVVHKSKAIRVVCSKCGKSSQYHNIACHYPKCIPKKADTPMKSHTCSVCGLGFHTRSGLSQHCRHRHPAVRNEQRKEDMAAKSKIKEGSIRSRIWTKDEVAQLIQLERKYIGKRNINKCIESEMRTKMNKQISDKRRELAKKKLVVTGDREEVTEVEDIRVNILEILPPRERIFPLKGHPEVDLVEKICKRGKQSREGREIINSLGEIEGLLKEDLTKALGWAMLEKLRCSLVEGKDPRNESQIELRNKGKGKMRKEGRRKQFNAIRRYATKKAKYKFYQQLFDKDRRRLTRIIMREPDKAKCAIPMKEIEEYYVNILGTIGHGNMIGWPSSTGNADNDILMSPISVDEIRIALREIRKDSAPGPDKVKVSNLWDIFNLDSLILTKNFNIWFLNRQVPDEFKKNRTILIPKTQDEEEMKKLTSWRPLTIGSVWIRIYTKILAKRLVETVKICSRQKGFISAPGCEENIAILDNLIKGAKRNGNEIAIVFVDLAKAFDSVGHGHIIAGLRRFGIDEHFIDIIRDLYDNCTTRVWVGDEATESILIRRGVKQGDPLSPILFNIAMDPLLTRLEVEGSGFYVKGNSVTSLAFADDVAILSSSYKGMIKNLGILEEFCKNTNLSVNVKKTKGFHILTKHKTYVVNPKDNWQIGSEEIEYVQPGDFEKYLGARIDPWIGVGGPVLKEKLKDWSENLIKAPLKPAQKILILQTYILPKLFYNLLLIEPPFNLLDDLDVLVRKIVKEILHLPQCTTDGIFYSRGRDGGLALTKFSVQIPNMLIRKWRRHIVSRDDWMDLSYLYAGENLVDKILLFSAVTSHPKKWREEEFLRWSELRCQGVGIKYFKNDLISHSIFRNSSKVKSSAYIAALQLRANIYPTRETLARGRGGVNALCRWCGKVRETVPHISGQCYKTKNARIKRHNRVVSAVVDKVGKLGWKAMIEPHLRNSKGELRKPDIIFIKGDTAVVVDVTVR

SEQ ID NO: 9336 - protein, 1241 aa, Chrysemys picta
MEKSNLYFYTGLALDRVNNAPAVGFDAPADSVKYIRGVIRVAGPMDKMVWTIMKSHENESENQVLPVEHGVEVEENVCDDHGEEILSILPMVFTRDTFNDLTMDSFNPDFKYLSTFDDPYVRESSTDFNRDRNKDLNSIGSNINILESSSWKDGVFYLEYPVDSFNCPICPQILPTFGKWAKHINVVHKSKAIRVVCSKCGKSSQYHNIACHYPKCIPKKADTPMKSHTCSVCGLGFHTRSGLSQHCRHRHPAVRNEQRKEDMAAKSKIKEGSTRSRIWTKDEVAQLIQLERKYIGKRNINKCIESEMRTKTNKQISDKRRELAKKKLVVTGDREEVTEVEDIRVNILEIPPPRERIFPLKGHPEVDLVEKICKRGKQSREGREIINSLGEIEGLLKEDLTKALGWAMLEKLCYSLVEGQDPRNESQIELRNKGKGKIRKEGRRKQFNAIRRYATRKAKYKFYQQLFDKDRRRLTRIIMGEPDKAKCAIPMKEIEEYYVNILGTIGHGNMIGWPSSTENADNDILMSPISVDEIRIALTEIRKDTAPGPDKVKVSNLWDIFNLDSLILTKIFNIWFLNRQVPDEFKKNRTILIPKTQDEEEMKKLTSWRPLTIGSVWIRIYTKILAKRLVETVKICSRQKGFISAPGCEENIAILDNLIKGAKRNGNEIAIVFVDLAKAFDSVGHGHIIAGLRRFGIDEHFIDIIRDLYDNCTTRVWVGDEATESILIRRGVKQGDPLSPILFNIAMDPLLTRLEVEGSGFYVKGNSVTSLAFADDVAILSSSYKGMIKNLGILEEFCKNTNLSVNVKKTKGFHILTKHKTYVVNPKDNWQIGSEKIEYVQPGDFEKYLGARIDPWIGVGGPVLKEKLKDWSENLIKAPLKPAQKILILQTYILPKLFYNLLLIEPPFNLLDDLDVLVRKIVKEILHLPQCTTDGIFYSRGRDGGLALTKFSVQIPNMLIRKWRRHIVSRDDWMDLSYLYAGENLVDKILSFSAVTSHPKKWREEEFLRWSELRCQGIGIKYFKNDLISNSIFRNSSKVKSSAYIAALQLRANIYPTRETLARGRGGVNALCRWCGKVRETVPHISGQCYKTKNARIKRHNRVVSAVVDKVGKLGWKAMIEPHLRNSKGELRKPDIIFIKGDTAVVVDVTVRWEDNAGSLEQAHSEKVAYYLELEEEIKNLTGGKNIHFFGFVLGARGKWSEGNNDLLQLLGMDRSKNFKESICRLVLYSTIGMMAIFSDR

SEQ ID NO: 9337 - protein, 1240 aa, Chrysemys picta
MEKSNLYFYTGLALDRVNNAPAVGFDAPADSVKYIRGVIRVAGPMDKMVWTIMKSHENESENQVLPVEHGEEVEENVCDDHGEILSILPMVFTRDTFNDLTMDSFNLDFKYLSTFDDPYVRESSTDFNRDRNKDLNSIGSNINILESSSWKDGVFYLEYPVDSFNCPICPQILPTFGKWAKHINVVHKSKAIRVVCSKCGKSSQYHNIACHYPKCIPKKADTPMKSHTCSVCGLGFHTRSGLSQHCRHRHPAVRNEQRKEDMAAKSKIKEGSTRSRICTKDEVAQLIQLERKYIGKRNINKCIESEMRTKTNKQISDKRRELAKKKLVVTGDREEVTEVEDIRVNILEIPPPRERIFPLKGHPEVDLVEKICKRGKQSREGREIINSLGEIEGLLKEDLTKALGWAMLEKLCYSLVEGQDPRNESQIELRNKGKGKIRKEGRRKQFNAIRRYATKKAKYKFYQQLFDKDRRRLTRIIMGEPDKAKCAIPMKEIEEYYVNILGTIGHGNMIGWPSSTENADNDILMSPISVDEIRIALTEIRKDSAPGPDKVKVSNLWDIFNLDSLILTKIFNIWFLNRQVPDEFKKNRTIIIPKTQDEEEMKKLTSWRPLTIGSVWIRIYTKILAKRLVETVKICSRQKGFISAPGCEENIAILDNLIKGAKRNGNEIAIVFVDLAKAFDSVGHGHIIAGLRRFGIDEHFIDIIRDLYDNCTTRVWVGDEATESILIRRGVKQGDPLSPILFNIAMDPLLTRLEVEGSGFYVKGNSVTSLAFADDVAILSSSYKGMIKNLGILEEFCKNTNLSVNVKKTKGFHILTKHKTYVVNPKDNWQIGSEKIEYVQPGDFEKYLGARIDPWIGVGGPVLKEKLKDWSENLIKAPLKPAQKILILQTYILPKLFYNLLLIEPPFNLLDDLDVLVRKIVKEILHLPQCTTDGIFYSRGRDGGLALTKFSVQIPNMLIRKWRRHIVSRDDWMDLSYLYAGENLVDKILSFSAVTSHPKKWREEEFLRWSELRCQGIGIKYFKNDLISNSIFRNSSKVKSSAYIAALQLRANIYPTRETLARGRGGVNALCRWCGKVRETVPHISGQCYKTKNARIKRHNRVVSAVVDKVGKLGWKAMIEPHLRNSKGELRKPDIIFIKGDTAVVVDVTVRWEDNAGSLEQAHSEKVAYYLELEEEIKNLTGGKNIHFFGFVLGARGKWSEGNNDLLQLLGMDRSKNVKESICRLVLYSTIGMMAIFSDR

SEQ ID NO: 9338 - protein, 1260 aa, Terrapene carolina
MEKSNLYFYTGLALDRVNNAPAVGFDAPADSVKYIRGVIRVAGPMDKMVWTIMKSHEHESENQVLPVEHGEEVEENVCDDHGEEILSILPMVFTRDTFNDLTMESFNPDFKYLSTFDDPYVSESGYLNAHLVNGSSLLNSFRPSTDFNRDRNKDLNSTGSNINILESSSWKDGVFYLEYPVDSFNCPICPQILPTFGKWAKHINVVHKSKAIRVVCSKCGKSSQYHNIACHYPKCIPKKADTPMKSHTCSACGLGFHTRSGLSQHCRHRHPAVRNEQRKEDMAAKSKIKEGSTRSRIWTKDEVAQLIQLERKYIGKRNINKCIESEMRTKTNKQISDKRRELAKKKLVVTGDREEVTEVEDIRVNILEIPPPRERIFPLKGHPEVDLVEKICKRGKQSREGREIINSLGEIEGLLKEDLTKALGWAMLEKLCYSLVEGKDPRNESQIELRNKGKGKMRKEGRRKQFNAIRRYATKKAKYKFYQQLFDKDRRRLTRIIMGEPDKAKCAIPMKEIEEYYVNILGTIGHGNMIGWPSSTENADNDILMSPISVDEIRIALREIRKDSAPGPDKVKVSNLWDIFNLDSLILTKIFNIWFLNRQVPDEFKKNRTILIPKTQDEEEMKKLTSWRPLTIGSVWIRIYTKILAKRLVETVKICSRQKGFISAPGCEENIAILDNLIKGAKRNGNEIAIVFVDLAKAFDSVGHGHIIAGLRRFGIDEHFIDIIRDLYDNCTTRVWVGDEATESILIRRGVKQGDPLSPILFNIAMDPLLTRLEVEGSGFYVKGNGVTSLAFADDVAILSSSYKGMIKNLGILEEFCKNTNLSVNVKKTKGFHILTKHKTYVVNPKDNWQIGSEEIEYVQPGDFEKYLGARIDPWIGVGGPVLKEKLKDWSENLIKAPLKPAQKILILQTYILPKLFYNLLLIEPPFNLLDDLDVLVRKIVKEILHLPQCTTDGIFYSRGRDGGLALTKFSVQIPNMLIRKWRRHIVSRDDWMDLSYLYAGENLVDKILSFSAVTSHPKKWREEEFLRWSELRCQGIGIKYFKNDLISNSIFRNSSKVKSSAYIAALQLRANIYPTRETLARGRGGVNALCRWCSKVRETVPHISGQCYKTKNARIKRHNRVVSAVVDKVGKLGWKAMIEPHLRNSKGELRKPDIIFIKGDTAVVVDVTVRWEDNAGSLEQAHSEKVAYYLELEEEIKNLTGGKNIHFFGFVLGARGKWSEGNNDLLQLLGMDRSKNFKESICRLVLYSTIGMMAIFSDR

SEQ ID NO: 9339 - protein, 1260 aa, Terrapene carolina
MEKSNLYFYTGLALDRVTNAPAVGFDAPADSVKYIRGVIRVAGPMDKMVWTIMKSHEHESENQVLPVEHGEEVEENVCDDHGEEILSILPMVFTRDTFNDLTMESFNPDFKYLSTFDDPYVSESGYLNAHLVNGSSLLNSFRPSTDFNRDRNKDLNSTGSNINILESSSWKDGVFYLEYPVDSFNCPICPQILPTFGKWAKHINVVHKSKAIRVVCSKCGKSSQYHNIACHYPKCIPKKADTPMKSHTCSVCGLGFHTRSGLSQHCRHRHPAVRNEQRKEDMAAKSKIKEGSTRSRIWTKDEVAQLIQLERKYIGKRNINKCIESEMRTKTNKQISDKRRELAKKKLVVTGDREEVTEVEDIRVNILEIPPPRERIFPLKGHPEVDLVEKICKRGKQSREGREIINSLGEIEGLLKEDLTKALGWAMLEKVCYSLVEGKDPRNESQIELRNKGKGKMRKEGRRKQFNAIRRYATKKAKYKFYQQLFDKDRRRLTRIIMGEPDKAKCAIPMKEIEEYYVNILGTIGHGNMIGWPSSTENADNDILMSPISVDEIRIALREIRKDSAPGPDKVKVSNLWDIFNLDSLILTKIFNIWFLNRQVPDEFKKNRTILIPKTQDEEEMKKLTSWRPLTIGSVWIRIYTKILAKRLVETVKICSRQKGFISAPGCEENIAILDNLIKGAKRNGNEIAIVFVDLAKAFDSVGHGHIIAGLRRFGIDEHFIDIIRDLYDNCTTRVWVGDEATESILIRRGVKQGDPLSPILFNIAMDPLLTRLEVEGSGFYVKGNGVTSLAFADDVAILSSSYKGMIKNLGILEEFCKNTNLSVNVKKTKGFHILTKHKTYVVNPKDNWQIGSEEIEYVQPGDFEKYLGARIDPWIGVGGPVLKEKLKDWSENLIKAPLKPAQKILILQTYILPKLFYNLLLIEPPFNLLDDLDVLVRKIVKEILHLPQCTTDGIFYSRGRDGGLALTKFSVQIPNMLIRKWRRHIVSRDDWMDLSYLYAGENLVDKILSFSAVTSHPKKWREEEFLRWSELRCQGIGIKYFKNDLISNSIFRNSTKVKSSAYIAALQLRANIYPTRETLARGRGGVNALCRWCGKVRETVPHISGQCYKTKNARIKRHNRVVSAVVDKVGKLGWKAMIEPHLRNSKGELRKPDIIFIKGDTAVVVDVTVRWEDNAGSLEQAHSEKVAYYLELEEEIKNLTGGKNIHFFGFVLGARGKWSEGNNDLLQLLGMDRSKNFKESICRLVLYSTIGMMAIFSDR

SEQ ID NO: 9340 - protein, 1216 aa, Terrapene carolina
MDKMVWTIMKSHEHESENQVLPVEHGEEVEENVCDDHGEEILSILPMVFTRDTFNDLTMESFNPDFKYLSTFDDPYVSESGYLNAHLVNGSSLLNSFRPSTDFNRDRNKDLNSTGSNINILESSSWKDGVFYLEYPVDSFNCPICPQILPTFGKWAKHINVVHKSKAIRVVCSKCGKSSQYHNIACHYPKCIPKKVDTPMKSHTCSVCGLGFHTRSGLSQHCRHRHPAVRNEQRKEDMAAKSKIKEGSTRSRIWTKDEVAQLIQLERKYIGKRNINKCIESEMRTKTNKQISDKRRELAKKKLVVTGDREEVTEVEDIRVNILEIPPPRERIFPLKGHPEVDLVEKICKRGKQSREGREIINSLGEIEGLLKEDLTKALGWAMLEKLCYSLVEGKDPRNESQIELRNKGKGKMRKEGRRKQFNAIRRYATKKAKYKFYQQLFDKDRRRLTRIIMGEPDKAKCAIPMKEIEEYYVNILGTIGHGNMIGWPSSTENADNDILMSPISVDEIRIALREIRKDSAPGPDKVKVSNLWDIFNLDSLILTKIFNIWFLNRQVPDEFKKNRTILIPKTQDEEEMKKLTSWRPLTIGSVWIRIYTKILAKRLVETVKICSRQKGFISAPGCEENIAILDNLIKGAKRNGNEIAIVFVDLAKAFDSVGHGHIIAGLRRFGIDEHFIDIIRDLYDNCTTRVWVGDEATESILIRRGVKQGDPLSPILFNIAMDPLLTRLEVEGSGFYVKGNGVTSLAFADDVAILSSSYKGMIKNLGILEEFCKNTNLSVNVKKTKGFHILTKHKTYVVNPKDNWQIGSEEIEYVQPGDFEKYLGARIDPWIGVGGPVLKEKLKDWSENLIKAPLKPAQKILILQTYILPKLFYNLLLIEPPFNLLDDLDVLVRKIVKEILHLPQCITDGIFYSRGRDGGLALTKFSVQIPNMLIRKWRRHIVSRDDWMDLSYLYAGENLVDKILSFSAVTSHPKKWREEEFLRWSELRCQGIGIKYFKNDLISNSIFRNSSKVKSSAYIAALQLRANIYPTRETLARGRGGVNALCRWCGKVRETVPHISGQCYKTKNARIKRHNRVVSAVVDKVGKLGWKAMIEPHLRNSKGELRKPDIIFIKGDTAVVVDVTVRWEDNAGSLEQAHSEKVAYYLELEEEIKNLTGGKNIHFFGFVLGARGKWSEGNNDLLQLLGMDRSKNFKESICRLVLYSTIGMMAIFSDR

SEQ ID NO: 9341 - protein, 1252 aa, Actinemys marmorata
MEKSNLYFYTGLALDRVNNAPAVGFDAPADSVKYIRGVIRVAGPMDKMVWTIMKSHEHESENQVLPVEHGEEVEEDVCDDHGEEILSILLMVFTRDTFNPDFKYLSTFDDPYVRESGYLNAHLVNGSSLLNSFRPSTDFNRDRNKDLNSTGSNINILESSSWKDGVFYLEYPVDSFNCPICPQILPTFGKWAKHINVVHKSKAIRVVCSKCGKSSQYHNIACHYPKCIPKKADTPMKSHTCSVCGLGFHTRSGLSQHCRHRHPAVRNEQRKEDMAAKSKIKEGSTRSRIWTKDEVAQLIQLERKYIGKRNINKCIESEMRTKTNKQISDKRRELAKKKLVVTGDREEVTEVEDIRVNILEIPPPRERIFPLKGHPEVDLVEKICKRGKQSREGREIINSLGEIEGLLKEDLTKALGWAMLEKLCYSLVEGKDPRNESQIELRNKGKGKMRKEGRRKQFNAIRRYATKKAKYKFYQQLFDKDRRRLTRIIMGEPDKAKCAIPMKEIEEYYVNILGTIGHGNMIGWPSSTENADNDILMSQISVDEIRIALREIRKDSAPGPDKVKVSNLWDIFNLDSLILTKIFNRWFLNRQVPDEFKKNRTILIPKTQDEEEMKKLTSWRPLTIGSVWIRIYTKILAKRLVETVKICSRQKGFISAPGCEENIAILDNLIKGAKRNGNEIAIVFVDLAKAFDSVGHGHIIAGLRRFGIDEHFIDIIRDLYDNCTTRLWVGDEATESILIRRGVKQGDPLSPILFNIAMDPLLTRLEVEGSGFYVKGNSVKSLAFADDVAILSSSYKGMIKNLGILEEFCKNTNLSVNVKKTKGFHILTKHKTYVVNPKDNWQIGSEEIEYVQPGDFEKYLGARIDPWIGVGGPVLKEKLKDWSENLIKAPLKPAQKILILQTYILPKLFYNLLLIEPPFNLLDDLDVLVRKIVKEILHLPQCTTDGIFYSRGRDGGLALTKFSVQIPNMLIRKWRRHIVSRDDWMDLSYLYAGENLVDKILSFSAVTSHPKKWREEEFLRWLELRCQGIGIKYFKNDLISNSIFRNSSKVKSSAYIAALQLRANIYPTRETLARGRGGVNALCRWCSKVRETVPHISGQCYKTKNARIKRHNRVVSAVVDKVGKLGWKAMIEPHLRNSKGELRKPDIIFIKGDTAVVVDVTVRWEDNAGSLEQAHSEKVAYYLELEEEIKNLTGGKNIHFFGFVLGARGKWSEGNNDLLQLLGMDRSKNFKESICRLVLYSTIGMMAIFSDR

SEQ ID NO: 9342 - protein, 1196 aa, Chrysemys picta
MDKMVWTIMKSHENESENQVLPVEYGEEVEENVCDDHGEEILSILPMVFTRDTFNDLTMDSFNPDFKYLSTFDDPYVRESSTDFNRDRNKDLNSTGSNINILESSSWKDGVFYLEYPVDSFNCPICPQILPTFGKWAKHINVVHKSKAIRVVCSKCGKSSQYHNIACHYPRCIPKKADTPMKSHTCSVCGLGFHTRSGLSQHCRHRHPAVRNEQRKEDMAAKSKIKEGSTRSRIWTKDEVAQLIQLERKYIGERNINKCIESEMRTKTNKQISDKRRELAKKKLVVTGDREEVTEVEDIRVNILEIPPPRERIFPLKGHPEVDLVEKICKRGKQSREGREIINSLGEIEGLLKEDLTKALGWAMLEKLYYSLVEGQDPRNESQIELRNKGKGKIRKEGRRKQFNAIRRYATKKAKYKFYQQLFDKDRRRLTRIIMGEPDKAKCAIPMKEIEEYYVNILGTIGHGNMIGWPSSTENADNDILMSPISVDEIRIALTEIRKDSAPGPDKVKVSNLWDIFNLDSLILTKNFNIWFLNRQVPDEFKKNRTILIPKTQDEEEMKKLTSWRPLTIGSVWIRIYTKILAKRLVETVKICSRQKGFISAPGCEENIAILDNLIKGAKRNGNEIAIVFVDLAKAFDSVGHGHIIAGLRRFGIDEHLIDIRDLYDNCTTRVWVGDEATESILIRRGVKQGDPLSPILFNIAMDPLLTRLEVEGSGFYVKGNSVTSLAFADDVAILSSSYKGMIKNLGILEEFCKNTNLSVNVKKTKGFHILTKHKTYVVNPKDNWQIGSEKIEYVQPGNFDKYLGARIDPWIGVGGPVLKEKLKDWSENLIKAPLKPAQKILILQTYILPKLFYNLLLIEPPFNLLDDLDVLVRKIFKEILHLPQCTTDGIFYSRGRDGGLALTKFSVQIPNMLIHKWRRHIVSRDDWMDLSYLYAGENLVDKILSFSAVTSHPKKWREEEFLRWSELRCQGIGIKYFKNDLISNSIFRNSSKVKSSAYIAALQLRANIYPTRETLARGRGGVNALCRWCGKVRETVPHISGQCYKTKNARIKRHNRVVSAVVDKVGKLGWKAMIEPHLRNSKGELRKPDIIFIKGDTAVVVDVTVRWEDNAGSLEQAHSEKVAYYLELEEEIKNLTGGKNIHFFGFVLGARGKWSEGNNDLLQLLGMDRSKNFKESICRLVLYSTIGMMAIFSDR

SEQ ID NO: 9343 - protein, 1291 aa, Chrysemys picta
MVPHGCPPGKGSLPQARVSFPLERVSFPQVRVSFPLERVSFPLRRVNLLAMEKSNLYFYTGLALDRVNNAPAVGFDAPADSVKYIRGVIRVAGPMDKMVWTIMKSHENESENQVLPVEHGEEVEENVCDDHGEEILSILPMVFTRDTFNDLTMDSFNPDFKYLSTFDDPYVRESSTDFNRDRNKDPNSIGSNINILESSSWKDGVFYLEYPVDSFNCPICPQILPTFGKWAKHINVVHKSKAIRVVCSKCGKSSQYHNIACHYPKCIPKKADTPMKSHTCSVCGLGFHTRSGLSQHCRHRHPAVRNEQRKEDMAAKSKIKEGSTRSRIWTKDEVAQLIQLERKYIGKRNINKCIESEMRTKTNKQISDKRRELAKKKLVVTGDREEVTEVEDIRVNILEIPPPRERIFPLKGHPEVDLVEKICKRGKQSREGREIINSLGEIEGLLKEDLTKALGWAMLEKLCYSLVEGQDPRNESQIELRNKGKGKIRKEGRRKQFNAIRRYATKKAKYKFYQQLFDKDRRRLTRIIMGEPDKAKCAIPMKEIEEYYVNILGTIGHGNMIGWPSSTENADNDILMSPISVDEIRIALTEIRKDSAPGPDKVKVSNLWDIFNLDSLILTKIFNIWFLNRQVPDEFKKNRTILIPKTQDEEEMKKLTSWRPLTIGSVWIRIYTKILAKRLVETVKICSRQKGFISAPGCEENIAILDNLIKGAKRNGNEIAIVFVDLAKAFDSVGHGHIIAGLRRFGIDEHFIDIIRDLYDNCTTRVWVGDEATESILIRRGVKQGDPLSPILFNIAMDPLLTRLEVEGSGFYVKGNSVTSLAFADDVAILSSSYKGMIKNLGILEEFCKNTNLSVNVKKTKGFHILTKHKTYVVNPKDNWQIGSEKIEYVQPGDFEKYLGARIDPWIGVGGPVLKEKLKDWSENLIKAPLKPAQKILILQTYILPKLFYNLLLIEPPFNLLDDLDVLVRKIVKEILHLPQCTTDGIFYSRGRDGGLALTKFSVQIPNMLIRKWRRHIVSRDDWMDLSYLYAGENLVDKILSFSAVTSHPKKWREEEFLRWSELRCQGIGIKYFKNDLISNSIFRNSSKVKSSAYIAALQLRANIYPTRETLARGRGGVNALCRWCGKVRETVPHISGQCYKTKNARIKRHNRVVSAVVDKVGKLGWKAMIEPHLRNSKGELRKPDIIFIKGDTAVVVDVTVRWEDNAGSLEQAHSEKVAYYLELEEEIKNLTGGKNIHFFGFVLGARGKWSEGNNDLLQLLGMDRSKNFKESICRLVLYSTIGMMAIFSDR

SEQ ID NO: 9344 - protein, 1260 aa, Chrysemys picta
MEKSNLYFYTGLALDRVNNAPAVGFDAPADSVKYIRGVIRVAGPMDKMVWTIMKSHENESENQVLPVEHGEEVEENVCDDRGEEILSILPMVFTRDTFNDLTMDSFNPDFKYLSTFDDPYVRESGYLNAHLVNGSSLLNSFRPSTDFNRDRNKALNSTGSNINILESSSWKDGFFYLEYPVDSFNCPICPQILPTFGKWAKHINVVHKSKAIRVVCSKCGKSSQYRNIACHYPKCIPKKADTPMKSHTCSVCGLGFHTRSGLSQHCRHRHPAVRNEQRKEDMAAKSKIKEESIRTRIWTKDEVAQLIQLERKYIGKRNINKCIESEMRTKTNKQISDKRRELAKKKLVVTGDREEVTEVEDIRVNILESPPPRERIFPLKGHPEVDLVEKICKRGKQSREGREIINSLGEIEGLLKEDLTKALGWAMLEKLCYSLVEGKDPRNESQIELRNKGKGKMRKEGRRKQFNASRRYATKKAKYKFYQQLFDKDRRRLTRIIMGEPDKAKCAIPMKEIEEYYVNILGTIGHGNMIGWPSSTENADNDILMSPISVDEIRIALREIRKDSAPGPDKVKVSNLWDIFNLDCLILTKIFNIWFLNRQVPDEFKKNRTILIPKTQDEEEMKKLTSWRPLTIGSVWIRIYTKILAKRLVETVKICSRQKGFISAPGCEENIAILDNLIKGAKRNGNEIAIVFVDLAKAFDSVGHGHIIAGLRRFGIDEHFIDIIRDLYDNCTTRVWVGDEATESILIRRGVKQGDPLSPILFNIAMDPLLTRLEVEGSDFYVKGNSVMSLAFADDVAILSSSYKGMIKNVGILEEFCKNTNLSVNVKKTKGFHILTKHKTYVVNPKDNWQIGSEEIEYVQPGDFEKYLGARIDPWIGVGGPVLKEKLKDWSENLIKAPLKPAPKILILQTYILPKLFYNLLLIEPPFNLLDDLDVLVRKIVKEILHLPQCTTDGIFYSRGRDGGLALTKFSVQIPNMLIRKWRRHIVSRDDWMDLSYLYAGENLVDKILLFSAVTSHPKKWREEEFLRWSELRCQGIGIKYFKNDLISHSIFRNSSKVKSSAYIAALQLRANIYPTRETLARGRGGVNALCRWCGKVRETVPHISGQCYKTKNARIKRHNRVVSAVVDKVGKLGWKAIIEPHLRNSKGELRKPDIIFIKGDTAVVVDVTVRWEDNAGSLEQAHSEKVAYYLELEEEIKNLTGGKNIHFFGFVLGACGKWSEGNNDLLQLLGMDRSKNFKESICRLVLYSNIGMMAIFSDR

SEQ ID NO: 9345 - protein, 1260 aa, Terrapene carolina
MEKSNLYFYTGLALDRVNNAPAVGFDAPADSVKYIRGVIRVAGPMDKMVWTIMKSHEHESENQVLPVEHGEEVEENVCDDHGEEILSILPMVFTRDTFNDLTMESFNPDFKYLSTFDDPYVSESGYLNAHLVNGSSLLNSFRPSTDFNRDRNKDLNSTGSNINILESSSWKDGVFYLEYPVDSFNCPICPQILPTFGKWAKHINVVHKSKAIRVVCSKCGKSSQYHNIACHYPKCIPKKADTPMKSHTCSVCGLGFHTRSGLSQHCRHRHPAVRNEQRKEDMAAKSKIKEGSTRSRIWTKDEVAQLIQLERKYIGKRNINKCIESEMRTKTNKQISDKRRELAKKKLVVTGDREEVTEVEDIRVNILEIPPPRERIFPLKGHPEVDLVEKICKRGKQSREGREIINSLGEIEGLLKEDLTKALGWAMLEKLCYSLVEGKDPRNESQIELRNKGKGKMRKEGRRKQFNAIRRYATKKAKYKFYQQLFDKDRRRLTGIIMGEPDKAKCAIPMKEIEEYYVNILGTIGHGNMIGWPSSTENADNDILMSPISVDEIRIALREIRKDSAPGPDKVKVSNLWDIFNLDSLILTKIFNIWFLNRQVPDEFKKNRTILIPKTQDEEEMKKLTSWRPLTIGSVWIRIYTKILAKRLVETVKICSRQKGFISAPGCEENIAILDNLIKGAKRNGNEIAIVFVDLAKAFDSVGHGHIIAGLRRFGIDEHFIDIIRDLYDNCTTRVWVGDEATESILIRRGVKQGDPLSPILFNIAMDPLLTRLEVEGSGFYVKGNGVTSLAFADDVAILSSSYKGMIKNLGILEEFCKNTNLSVNVKKTKGFHILTKHKTYVVNPKDNWQIGSEEIEYVQPGDFEKYLGARIDPWIGVGGPVLKEKLKDWSENLIKAPLKPAQKILILQTYILPKLFYNLLLIEPPFNLLDDLDVLVRKIVKEILHLPQCITDGIFYSRGRDGGLALTKFSVQIPNMLIRKWRRHIVSRDDWMDLSYLYAGENLVDKILSFSAVTSHPKKWREEEFLRWSELRCQGIGIKYFKNDLISNSIFRNSSKVKSSAYIAALQLRANIYPTRETLARGRGGVNALCRWCGKVRETVPHISGQCYKTKNARIKRHNRVVSAVVDKVGKLGWKAMIEPHLRNSKGELRKPDIIFIKGDTAVVVDVTVRWEDNAGSLEQAHSEKVAYYLELEEEIKNLTGGKNIHFFGFVLGARGKWSEGNNDLLQLLGMDRSKNFKESICRLVLYSTIGMMAIFSDR

SEQ ID NO: 9346 - protein, 1260 aa, Terrapene carolina
MEKSNLYFYTGLALDRVNNAPAVGFDAPADSVKYIRGVIRVAGPMDKMVWTIMKSHEHESENQVLPVEHGEEVEENVCDDHGEEILSILPMVFTRDTFNDLTMESFNPDFKYLSTFDDPYVSESGYLNAHLVNGSSLLNSFRPSTDFNRDRNKDLNSTGSNINILESSSWKDGVFYLEYPVDSFNCPICPQILPTFGKWAKHINVVHKSKAIRVVCSKCGKSSQYHNIACHYPKCIPKKADTPMKSHTCSVCGLGFHTRSGLSQHCRHRHPAVRNEQRKEDMAAKSKIKEGSTRSRIWTKDEVAQLIQLERKYIGKRNINKCIESEMRTKTNKQISDKRRELAKKKLVVTGDREEVTEVEDIRVNILEIPPPRERIFPLKGHPEVDLVEKICKRGKQSREGREIINSLGEIEGLLKEDLTKALGWAVLEKLCYSLVEGKDPRNESQIELRNKGKGKMRKEGRRKQFNAIRRYATKKAKYKFYQQLFDKDRRRLTRIIMGEPDKAKCAIPMKEIEEYYVNILGTIGHGNMIGWPSSTENADNDILMSPISVDEIRIALREIRKDSAPGPDKVKVSNLWDIFNLDSLILTKIFNIWFLNRQVPDEFKKNRTILIPKTQDEEEMKKLTSWRPLTIGSVWIRIYTKILAKRLVETVKICSRQKGFISAPGCEENIAILDNLIKGAKRNGNEIAIVFVDLAKAFDSVGHGHIIAGLRRFGIDEHFIDIIRDLYDNCTTRVWVGDEATESILIRRGVKQGDPLSPILFNIAMDPLLTRLEVEGSGFYVKGNGVTSLAFADDVAILSSSYKGMIKNLGILEEFCKNTNLSVNVKKTKGFHILTKHKTYVVNPKDNWQIGSEEIEYVQPGDFEKYLGARIDPWIGVGGPVLKEKLKDWSENLIKAPLKPAQKILILQTYILPKLFYNLLLIEPPFNLLDDLDVLVRKIVKEVLHLPQCTTDGIFYSRGRDGGLALTKFSVQIPNMLIRKWRRHIVSRDDWMDLSYLYAGENLVDKILSFSAVTSHPKKWREEEFLRWSELRCQGIGIKYFKNDLISNLIFRNSSKVKSSAYIAALQLRANIYPTRETLARGRGGVNALCRWCGKVRETVPHISGQCYKTKNARIKRHNRVVSAVVDKVGKLGWKAMIEPHLRNSKGELRKPDIIFIKGDTAVVVDVTVRWEDNAGSLEQAHSEKVAYYLELEEEIKNLTGGKNIHFFGFVLGARGKWSEGNNDLLQLLGMDRSKNFKESICRLVLYSTIGMMAIFSDR

SEQ ID NO: 9347 - protein, 1260 aa, Terrapene carolina
MEKSNLYFYTGLALDRVNNAPAVGFDAPADSVKYIRGVIRVAGPMDKMVWTIMKSHEHESENQVLPVEHGEEVEENVCDDHGEEILSILPMVFTRDTFNDLTMESFNPDFKYLSTFDDPYVSESGYLNAHLVNGSSLLNSFRPSTDFNRDRNKDLNSTGSNINILESSSWKDGVFYLEYPVDSFNCPICPQILPTFGKWAKHINVVHKSKAIRVVCSKCGKSSQYHNIACHYPKCIPKKADTPMKSHTCSVCGLGFHTRSGLSQHCRHRHPAVRNEQRKEDMAAKSNIKEGSTRSRIWTKDEVAQLIQLERKYIGKRNINKCIESEMRTKTNKQISDKRRELAKKKLVVTGDREEVTEVEDIRVNILEIPPPRERIFPLKGHPEVDLVEKICKRGKQSREGREIINSLGEIEGLLKEDLTKALGWAMLEKLCYSLVEGKDPRNESQIELRNKGKGKMRKEGRRKQFNAIRRYATKKAKYKFYQQLFDKDRRRLTRIIMGEPDKAKCAIPMKEIEEYYVNILGTIGHGNMIGWPSSTENADNDILMSPISVDEIRIALREIRKDSAPGPDKVKVSNLWDIFNLDSLILTKIFNIWFLNRQVPDEFKKNRTILIPKTQDEEEMKKLTSWRPLTIGSVWIRIYTKILAKRLVETVKICSRQKGFISAPGCEENIAILDNLIKGAKRNGNEIAIVFVDLAKAFDSVGHGHIIAGLRRFGIDEHFIDIIRDLYDNCTTRVWVGDEATESILIRRGVKQGDPLSPILFNIAMDPLLTRLEVEGSGFYVKGNGVTSLAFADDVAILSSSYKGMIKNLGILEEFCKNTNLSVNVKKTKGFHILTKHKTYVVNPKDNWQIGSEEIEYVQPGDFEKYLGARIDPWIGVGGPVLKEKLKDWSENLIKAPLKPAQKILILQTYILPKLFYNLLLIEPPFNLLDDLDVLVRKIVKEILHLPQCITDGIFYSRGRDGGLALTKFSVQIPNMLIRKWRRHIVSRDDWMDLSYLYAGENLVDKILSFSAVTSHPKKWREEEFLRWSELRCQGIGIKYFKNDLISNSIFRNSSKVKSSAYIAALQLRANIYPTRETLARGRGDVNALCRWCGKVRETVPHISGQCYKTKNARIKRHNRVVSAVVDKVGKLGWKAMIEPHLRNSKGELRKPDIIFIKGDTAVVVDVTVRWEDNAGSLEQAHSEKVAYYLELEEEIKNLTGGKNIHFFGFVLGARGKWSEGNNDLLQLLGMDRSKNFKESICRLVLYSTIGMMAIFSDR

SEQ ID NO: 9348 - protein, 1259 aa, Terrapene carolina
MEKSNLYFYTGLALDRVNNAPAVGFDAPADSVKYIRGVIRVAGPMDKMVWTIMKSHEHESENQVLPVEHGEEVEENVCDDHGEEILSILPMVFTRDTFNDLTMESFNPDFKYLSTFDDPYVSESGYLNAHLVNGSSLLNSFRPSTDFNRDRNKDLNSTGSNINILESSLWKDGVFYLEYPVDSFNCPICLQILPTFGKWAKHINVVHKSKAIRVVCSKCGKSSQYHNIACHYPKCIPKKADTPMKSHTCPVCGLGFHTRSGLSQHCRHRHPAVRNEQRKEDMAAKSKIKEGSTRSRIWTKDEVAQLIQLERKYIGKRNINKCIESEMRTKTNKQISDKRRELAKKKLVVTGDREEVTEVEDIRVNILEIPPPRERIFPLKGHPEVDLVEKICKRGKQSREGREIINSLGEIEGLLKEDLTKALGWAMLEKLCYSLVEGKDPRNESQIELRNKGKGKMRKGRRKQFNAIRRYATKKAKYKFYQQLFDKDRRRLTRIIMGETDKAKCAIPMKEIEEYYVNISGTIGHGNMIGWPSSTENADNDILMSPISVDEIRIALREIRKDSAPGPDKVKVSNLWDIFNLDSLILTKIFNIWFLNRQVPDEFKKNRTILIPKTQDEEEMKKLTSWRPLTIGSVWIRIYTKILAKRLVETVKICSRQKGFISAPGCEENIAILDNLIKGAKRNGNEIAIVFVDLAKAFDSVGHGHIIAGLRRFGIDEHFIDIIRDLYDNCTTRVWVGDEATESILIRRRVKQGDPLSPILFNIAMDPLLTRLEVEGSGFYVKGNGVTSLAFADDVAILSSSYKGMIKNLGILEEFCKNTNLSVNVKKTKGFHILTKHKTYVVNPKDNWQIGSEEIEYVQPGDFEKYLGARIDPWIGVGGPVLKEKLKDWSENLIKAPLKPAQKILILQTYILPKLFYNLLLIEPPFNLLDNLDVLVRKIVKEILHLPQCTTDGIFYSRGRDGGLALTKFSVQIPNMLIRKWRRHIVSRDDWMDLSYLYAGENLVDKILSFSAVTSHPKKWREEELLRWSELRCQGIGIKYFKNDLISNSIFRNSSKVKSSAYIAALQLRANIYPTRETLARGRGGVNALCRWCGKVRETVPHISGQCYKTKNARIKRHNRVVSAVVDKVGKLEWKAMIEPHLRNSKGELRKPDIIFIKGDTAVVVDVTVRWEDNAGSLEQAHSEKVAYYLELEEEIKNLTGGKNIHFFGFVLGARGKWSEGNNDLLQLLGMDRSKNFKESICRLVLYSTIGMMAIFSDR

SEQ ID NO: 9349 - protein, 1216 aa, Actinemys marmorata
MDKMVWTIMKSHEHESENQVLPVEHGEEVEENVCDDHGEEILSILPMVFTRDTFNDLTMESFNPDFKYLSTFDDPYVRESGYLNAHLVNGSSLLNSFRPSTDFNRDRNKDLNSTGSNINILESSSWKDGVFYLEYPVDSFNCPICPQILPTFGKWAKHINVVHKSKAIRVVCSKCGKSSQYHNIACHYPKCIPKKADTPMKSHTCSVCGLGFHTRSGLSQHCRHRHPAVRNEQRKEDMAAKSKIKEGSTRSRIWTKDEVAQLIQLERKYIGKRNINKCIESEMRTKTNKQIPDKRRELAKKKLVVTGDREEVTEVEDIRVNILEIPPPRERIFQLKGHPEVDLVEKICKRGKQSREGREIINSLGEIEGLLKEDLTKALGWAMLEKLCYSLVEGKDPRNESQIELRNKGKGKMRKEGRRKQFNAIRRYATKKAKYKFYQQLFDKDRRRLTRIIMGEPDKAKCAIPMKEIEEYYVNILGTIGHGNMIGWPSSTENADNDILMSPISVDEIRIALREIRKDSAPGPDKVKVSNLWDIFNLDPLILTKIFNIWFLNRQVPDEFKKNRTILIPKTQDEEEMKKLTSWRPLTIGSVWIRIYTKILAKRLVETVKICSRQKGFIAAPGCEENIAILDNLIKGAKRNGNEIAIVFVDLAKAFDSVGHGHIIAGLRRFGIDEHFIDIIRDLYDNCTTRVWVGDEATESILIRRGVKQGDPLSPILFNIAIDPLLTRLEVEGSGFYVKGNSVTSLAFADDVTILSSSYKGMIKNLGILEEFCKNTNLSVNVKKTKGFHILTKHKTYVVNPKDNWQIGSEEIEYVQPGDFEKYLGARIDPWIGVGGPVLREKLKDWSENLIKAPLKPAQKILILQTYILPKLFYNLLLIEPPFNLLDDLDVLVRKIVKEILHLPQCTTDGIFYSRGRDGGLALTKFSVQIPNMLIRKWRRHIVSRDDWMDLSYLYAGENLVDKILSFSAVTSHPKKWREEEFLRWSELRCQGIGIKYFKNDLISNSIFRNSSKVKSSAYIAALQLRANIYPTRETLARGRGGVNALCRWCGKVRETVPHISGQCYKTKNARIKRHNRVVSAVVDKVGKLGWKAMIEPHLRNSKGELRKPDIIFIKGDTAVVVDVTVRWEDNAGSLEQAHSEKVAYYLELEEEIKNLTGGKNIHFFGFVLGARGKWSEGNNDLLQLLGMDRSKNFKESICRLVLYSTIGMMAIFSDR

SEQ ID NO: 9350 - protein, 1017 aa, Chrysemys picta
MKSHMCSVCGLGFHTRSGLSQHCRHRHPAVRNEQRKEDMAAKSKIKEGSTRSRIWTKDEVAQLIQLERKYIGKRNINKCIESEMRTKTNKQISDKRRELAKKKLVVTGDREEVTEVEDIRVNILEIPPPRERIFPLKGHPEVDLVEKICKRGKQSREGREIINSLGEIEGLLKEDLTKALGWAMLEKLCYSLVEGQDPRNESQIELRNKGKGKIRKEGRRKQFNAIRRYATKKAKYKFYQQLFDKDRRRLTRIIMGEPDKAKCAIPMKEIEEYYVNILGTIGHGNMIGWPSSTENADNDILMSPISVDEIRIALTEIRKDSAPGPDKVKVSNLWDIFNLDSLILTKIFNIWFLNRQVPDEFKKNRTILIPKTQDEEEMKKLTSWRPLTIGSVWIRIYTKILAKRLVETVKICSRQKGFISAPGCEENIAILDNLIKGAKRNGNEIAIVFVDLAKAFDSVGHGHIIAGLRRFGIDEHFIDIIRDLYDNCTTRVWVGDEATESILIRRGVKQGDPLSPILFNIAMDPFLTRLEVEGSGFYVKGNSVTSLAFADDVAILSSSYKGMIKNLGILEEFCKNTNLSVNVKKTKGFHILTKHKTYVVNPKDNWQIGSEKIEYVQPGDFEKYLGARIDPWIGVGGPVLKEKLKDWSENLIKAPLKPAQKILILQTYILPKLFYNLLLIEPPFNLLDDLDVLVRKIVKEILHLPQCTTDGIFYSRGRDGGLALTKFSVQIPNMLIRKWRRHIVSRDDWMDLSYLYAGENLVDKILSFSAVTSHPKKWREEEFLRWSELRCQGIGIKYFKNDLISNSIFRNSSKVKSSAYIAALQLRANIYPTRETLARGRGGVNALCRWCGKVRETVPHISGQCYKTKNARIKRHNRVVSAVVDKVGKLGWKAMIEPHLRNSKGELRKPDIIFIKGDTAVVVDVTVRWEDNAGSLEQAHSEKVAYYLELEEEIKNLTGGKNIHFFGFVLGARGKWSEGNNDLLQLLGMDRSKNFKESICRLVLYSTIGMMAIFSDR

SEQ ID NO: 9351 - protein, 1260 aa, Chrysemys picta
MEKSNLYFYTGLALDRVNNAPAAGFDAPADSVKYIRGVIRVAGPMDKMVWTIMKSHENESENQVLPVEHGEEVEENVCDDNGEEILSILPMVFTRDTFNDLTMDSFNPDFKYLSTFDDPYVRESGYLNAHLVNGSSLLNSFRPSTDFNRDRNKDLNSTGSNINILESSSWKDGFFYLEYPVDSFNCPICPQILPTFGKWAKHINVVHKSKAIRVVCSKCGKSSQYRNIACHYPKCIPKKADTPMKSHTCSVCGLGFHTRSGLSQPCRHRHPAVRNEQRKEDMAAKSKIKEGSTRSRIWTKDEVAQLIQLERKYIGKRNINKCIESEMRTKTNKQISDKRRELAKKKLVVTGDREEVTEVEDIRVNILEIPPPRERIFPLKGHPEVDLVEKICKRGKQSREGREIINSLGEIEGLLKEDLTKALRWAMLEKLCYSLVEGKDPRNESQIELRNKGKGKMRKEGRRKQFNAIRRYATKKAKYKFYQQLFDKDRRRLTRIIMGEPDKAKCAIPMKEIEEYYVNILGTIGHGNMIGWPSSTENADNDILMSPISVDEIRIALREIRKDSAPGPDKVKVSNLWDIFNLDSLILTKIFNIWFLNRQVPDEFKKNRTILIPKTQDEEEMKKLTSWRPLTIGSVWIRIYTKILAKRLVETVKICSRQKGFISAPGCEENIAILDNLIKGAKRNGNEIAIVFVDLAKAFDSVGHGHIIAGLRRFGIDEHFIDIIRDLYDNCTTRVWVGDEATESILIRRGVKQGDPLSPILFNIAMDPLLTRLEVEGSGFYVKGNSVTSLAFADDVAILSSSYKGMIKNLGILEEFCKNTNLSVNVKKTKGFHILTKHKTYVVNPKDNWQIGSEKIEYVQPGDFEKYLGARIDPWIGVGGPVLKEKLKDWSENLIKAPLKPAQKILILQTYILPKLFYNLLLIEPPFNLLDNLDVLVRKIVKEILHLPQCTTDGIFYSRGRDGGLALTKFSVQIPNMLIRKWRRHIVSRDDWMDLSYLYAGENLVDKILSFSAVTSHPKKWREEEFLRWSELRCQGIGIKYFKNDLISNSIFRNSSNVKSSAYIAALQLRANIYPTRETLARGRGGVNALCRWCGKVRETVPHISGQCYKTKNARIKRHNRVVSAVVDKVGKLGWKAMIEPHLRNSKGELRKPDIIFIKGDTAVVVDVTVRWEDNAGSLEQAHSEKVAYYLELEEEIKNLTGGKNIHFFGFVLGARGKWSEGNNDLLQLLGMDRSKNFKENICRLVLYSTIGMMAIFSDR

SEQ ID NO: 9352 - protein, 1028 aa, Chrysemys picta
MSQEGAVRGQGTGRLTCSVCGLGFHTRSGLSQHCRHRHPAVRNEQRKEDMAAKSKIKEGSTRSRIWTKDEVAQLIQLERKYIGKRNINKCIESEMRTKTNKQISDKRRELAKKKLVVTGDREEVTEVEDIRVNILEIPPPRERIFPLKGHPEVDLVEKICKRGKQSREGREIINSLGEIEGLLKEDLTKALGWAMLEKLCYSLVEGKDPRNESQIELRNKGKGKMRKEGRRKQFNAIRRYATKKAKYKFYQQLFDKDRRRLTRIIMGEPDKAKCAIPMKEIEEYYVNILGTIGHGNMIGWPSSTENADNDILMSPISVDEIRIALREIRKDSAPGPDKVKVSNLWDIFNLDSLILTKIFNIWFLNRQVPDEFKKNRTILIPKTQDEEEMKKLTSWRPLTIGSVWIRIYTKILAKRLVETVKICSRQKGFISAPGCEENIAILDNLIKGAKRNGNEIAIVFVDLAKAFDSVGHGHIIAGLRRFGIDEHFIDIIRDLYDNCTTRVWVGDEATESILIRRGVKQGDPLSPILFNIAMDPLLTRLEVEGSGFYVKGNSVTSLAFADDVAILSSSYKGMIKNLGILEEFCKNTNLSVNVKKTKGFHILTKHKTYVVNPKDNWQIGSEKIEYVQPGDFEKYLGARIDPWIGVGGPVLKEKLKDWNENLIKAPLKPAQKILILQTYILPKLFYNLLLIEPPFNLLDDLDVLVRKIVKEILHLPQCTTDGIFYSRGRDGGLALTKFSVQIPNMLIRKWRRHIVSRDDWMDLSYLYAGENLVDKILSFSAVTSHPKKWREEEFLRWSELRCQGIGIKYFKNDLISNSIFRNSSKVKSSAYIAALQLRANIYPTRETLARGRGGVNALCRWCGKVRETVPHISGQCYKTKNARIKRHNRVVSAVVDKVGKLGWKAMIEPHLRNSKGELRKPDIIFIKGDTAVVVDVTVRWEDNAGSLEQAHSEKVAYYLELEEEIKNLTGGKNIHFFGFVLGARGEWSEGNNDLLQLLGMDRSKNFKENICRLVLYSTIGMMAIFSDR

SEQ ID NO: 9353 - protein, 1241 aa, Chrysemys picta
MEKSNLYFYTGLALDRVNNAPAVGFDAPADSVKYIRGVIRVAGPMDKMVWTIMKSHENESENQVLPVEHGEEVEENVCDDHGEEILSILPMVFTRDTFNDLTMDSFNPDFKYLSTFDDPYVRESSTDFNRDRNKDLNSIGSNINILESSSWKDGVFYLEYPVDSFNCPICPQILPTFGKWAKHINVVHKSKAIRVVCSKCGKSSQYHNIACHYPKCIPKKADTPMKSHTCSVCGLGFHTRSGLSQHCRHRHPAVRNEQRKEDMAAKSKIKEGSTRSRIWTKDEVAQLIQLERKYIGKRNINKCIESEMRTKTNKQISDKRRELAKKKLVVTGDREEVTEVEDIRVNILEIPPPRERIFPLKGHPEVDLVEKICKRGKQSREGREIINSLGEIEGLLKEDLTKALGWAMLEKLCYSLVEGQDPRNESQIELRNKGKGKIRKEGRRKQFNAIRRYATKKAKYKFYQQLFDKDRRRLTRIIMGEPDKAKCAIPMKEIEEYYVNILGTIGHGNMIGWPSSTENADNDILMSPISVDEIRIALTEIRKDSAPGPDKVKVSNLWDIFNLDSLILTKIFNIWFLNRQVPDEFKKNRTILIPKTQDEEEMKKLTSWRPLTIGSVWIRIYTKILAKRLVETVKICSRQKGFIFAPGCEENIAILDNLIKGAKRNGNEIAIVFVDLAKAFDSVGHGHIIAGLRRFGIDEHFIDIIRDLYDNCTTRVWVGDEATESILIRRGVKQGDPLSPILFNIAMDPLLTRLEVEGSGFYVKGNSVTSLAFADDVAILSSSYKGMINNLGILEEFCKNTNLSVNVKKTKGFHILTKHKTYVVNPKDNWQIGSEKIEYVQPGDFEKYLGARIDPWIGVGGPVLKEKLKDWSENLIKAPLKPAQKILILQTYILPKLFYNLLLIEPPFNLLDDLDVLVRKIVKEILHLPQCTTDGIFYSRGRDGGLALTKFSVQIPNMLIRKWRRHIVSRDDWMDLSYLYAGENLVDKILSFSAVTSHPKKWREEEFLRWSELRCQGIGIKYFKNDLISNSIFRNSSKVKSSAYIAALQLRANIYPTRETLARGRGGVNALCRWCGKVRETVPHISGQCYKTKNARIKRHNRVVSAVVDKVGKLGWKAMIEPHLRNSKGELRKPDIIFIKGDTAVVVDVTVRWEDNAGSLEQAHSEKVAYYLELEEEIKNLTGGKNIHFFGFVLGARGKWSEGNNDLLQLLGMDRSKNFKESICRLVLYSTIGMMAIFSDR

SEQ ID NO: 9354 - protein, 1260 aa, Terrapene carolina
MEKSNLYFYTGLALDRVNNAPAVGFDAPADSVKYIRGVIRVAGPMDKMVWTIMKSHEHESENQVLPVEHGEEVEENVCDDHGEEILSILPMVFTRDTFNDLTMESFNPDFKYLSTFDDPYVSESGYLNAHLVNGSSLLNSFRPSTDFNRDRNKDLNSTGSNINILESSSWKDGVFYLEYPVDSFNCPICPQILPTFGKWAKHINVVHKSKAIRVVCSKCGKSSQYHNIACHYPKCIPKKADTPMKSHTCSVCGLGFHTRSGLSQHCRHRHPAVRNEQRKEDMAAKSKIKEGSTRSRIWTKDEVAQLIQLERKYIGKRNINKCIESEMRTKTNKQISDKRRELAKKKLVVTGDREEVTEVEDIRVNILEIPPPRERIFPLKEHPEVDLVEKICKRGKQSREGREIINSLGEIEGLLKEDLTKALGWAMLEKLCYSLVEGKDPRNESQIELRNKGKGKMRKEGRRKQFNAIRRYATKKAKYKFYQPLFDKDRRRLTRIIMGEPDKAKCAIPMKEIEEYYVNILGTIGHGNMIGWPSSTENADNDILMSPISVDEIRIALREIRKDSAPGPDKVKVSNLWDIFNLDSLILTKIFNIWFLNRQVPDEFKKNRTILIPKTQDEEEMKKLTSWRPLTIGSVWIRIYTKILAKRLVETVKICSRQKGFISAPGCEENIAILDNLIKGAKRNGNEIAIVFVHLAKAFDSVGHGHIIAGLRRFGIDEHFIDIIRDLYDNCTTRVWVGDEATESILIRRGVKQGDPLSPILFNIAMDPLLTRLEVEGSGFYVKGNGVTSLAFADDVAILSSSYKGMIKNLGILEEFCKNTNLSVNVKKTKGFHILTKHKTYVVNPKDNWQIGSEEIEYVQPGDFEKYLGARIDPWIGVGGPVLKEKLKDWSENLIKAPLKPAQKILILQTYILPKLFYNLLLIEPPFNLLDDLDVLVRKIVKEILHLPQCTTDGIFYSRGRDGGLALTKFSVQIPNMLIRKWRRHTVSRDDWMDLSYLYAGENLVDKILSFSAVTSHPKKWREEEFLRWSELRCQGIGIKYFKNDLISNSIFRNSSKVKSSAYIAALQLRANIYPTRETLARGRGGVNALCRWCGKVRETVPHISGQCYKTKNARIKRHNRVVSAVVDKVGKLGWKAMIEPHLRNSKGELRKPDIIFIKGDTAVVVDVTVRWEDNAGSLEQAHSEKVAYYLELEEEIKNLTGGKNIHFFGFVLGARGKWSEGNNDLLQLLGMDRSKNFKESICRLVLYSTIGMMAIFSDR

SEQ ID NO: 9355 - protein, 934 aa, Terrapene carolina
MRTKTNKQISDKRRELAKKKLVVTGDREEVTEVEDIRVNILEIPPPRERIFPLKGHPEVDLVEKICKRGKQSREGREIINSLGEIEGLLKEDLTKALGWAMLEKLCYSLVEGKDPRNESQIELRNKGKGKMRKEGRRKQFNAIRRYATKKAKYKFYQQLFDKDRRRLTRIIMGEPDKAKCAIPMKEIEEYYVNILGTIGHGNMIGWPSSTENADNDILMSTISVDEIRIALREIRKDSAPGPDKVKVSNLWDIFNLDSLILTKIFNIWFLNRQVPDEFKKNRTILIPKTQDEEEMKKLTSWRPLTIGSVWIRIYTKILAKRLVETVKICSRQKGFISAPGCEENIAILDNLIKGAKQNGNEIAIVFVDLAKAFDSVGHGHIIAGLRRFGIDEHFIDIIRDLYDNCTTRVWVGDEATESILIRRGVKQGDPLSPILFNIAMDPLLTRLEVEGSGFYVKGKDVTSLAFADDVAILSSSYKGMIKNLGILEEFCKNTNLSVNVKKTKGFHILTKHKTYVVNPKDNWQIGSEEIKYVQPGDFEKYLGARIDPWIGVGGPVLKEKLKDWSENLIKAPLKPAQKILILQTYILPKLFYNLLLIEPPFNLLDDLDVLVRKIVKEILHLPQCTTDGIFYSRGRDGGLALTKFSVQIPNMLIRKWRRHIVSRDDWMDLSYLYAGENLVDKILSFSAVTSHPKKWREEEFLRWLELRCQGIGIKYFKNDLISNSIFRNSSKVKSSAYIAALQFRANIYPTRETLARGRGGVNALCRWCSKVRETVPHISGQCYKTKNARIKRHNRVVSAVVDKVGKLGWKAMIEPHLRNSKGELRKPDIIFIKGDTAVVVDVTVRWEDNAGSLEQAHSEKVAYYLELEEEIKNLTGGKNIHFFGFVLGARGKWSEGNNDLLQLLGMDRSKNFKESICRLVLYSTIGMMAIFSDR

SEQ ID NO: 9356 - protein, 1258 aa, Chrysemys picta
MEKSNLYFYTGLALDRVNNAPAVGFDAPADSVKYIRGVIRVAGPMDKMVWTIMKSHEHESENQVLPVEHGEEVEENVCDDHGEEILSILPMVFTRDTFNDLTMESFNPDFKYLSTFDDPYVRESGYLNAHLVNGSSLLNSFRPSTDFNRDRNKDLNSTGSNINILESSSWKDGVFYLEYPVDSFNCPICPQILPTFGKWAKHINVVHKSKAIRVVCSKCGKSSQYHNIACHYPKCIPKKADTPMKSHTCSVCGLGFHTRSGLSQHCRHRHPAVRNEQRKEDMAAKSKIKEGSTRSRIWTKDEVAQLIQLERKYIGKRNINKCIESEMRTKTNKQISDKRRELAKKKLVVTGDREEVTEVEDIRVNILEIPPPRERIFPLKGHPEVDLVEKICKRGKQSREGREIINSLGEIEGLLKEDLTKALGWAMLEKLCYSLVEGKDPRNESQIELRNKGKGKMRKEGRRKQFNAIRRYATKKAKYKFYQQLFDKDRRRLTRIIMGEPDKAKCAIPMKEIEEYYGNILGTIGHGNMIGWPSSTENADNDILMSPISVDEIRIALREIRKDSAPGPDKVKVSNLWDIFNLDSLILTKNFNIWFLNRQVPDEFKKNRTILIPKTQDEEEMKKLTSWRPLTIGSVWIRIYTKILAKRLVETVKICSRQKGFISAPGCEENIAILDNLIKGAKRNGNEIAIVFVDLAKAFDSVGHGHIIAGLRRFGIDEHFIDIIRDLYDNCTTRVWVGDEATESILIRRGVKQGDPLSPILFNIAMDPLLTRLEVEGSGFYVKGNSVTSLAFADDVAILSSSYKGMIKNLGILEEFCKNTNLSVNVKKTKGFHILTKHKTYVLNPKDNWQIGSEEIEYVQPGDFEKYLGARIDPWIGVGGPILKEKLKDWSENLIKAPLKPAQKILILQTYILPKLFYNLLLIEPPFNLLDDLDVLVRKIVKEILHLPQCTTDGIFYSRGRDGGLALTKFSVQIPNMLIRKWRRHIVSRDDWMDLSYLYAGENLVDKILSFSAVTSHPKKWREEEFLRWSELRCQGIGIKYFKNDLISNSIFRNSSKVKSSAYIAALQLRANIYPTRETLARGRGGVNALCRWCGKVRETVPHISGQCYKTKNARIKRHNRVVSAVVDKVGKLGWKAMIEPHLRNSKGELRKPDIIFIKGDTAVVVDVTVRWEDNAGSLEQAHSEKVAYYLELEEEIKNLTGGKNIHFFGFVLGARGKWSEGNNDLLQLLGMDRSKNFKESICRLVLYSTMMAIFSDR

SEQ ID NO: 9357 - protein, 1241 aa, Chrysemys picta
MEKSNLYFYTGLALDRVNNAPAVGFDAPADSVKYIRGVIRVAGPMDKMVWTIMKSHENESENQVLPVEHGEEVEENVCDDHGEEILSILPMVFTRDTFNDLTMDSFNPDFKYLSTFDDPYVRESSTDFNRDRNKDLNSIGSNINILESSSWKDGVFYLEYPVDSFNCPICPQILPTFGKWAKHINVVHKSKAIRVVCSKCGKSSQYHNIACHYPKCIPKKAETPMKSHTCSVCGLGFHTRSGLSQHCRHRHPAVRNEQRKEDMAAKSKIKEGSTRSRIWTKDEVAQLIQLERKYIGKRNINKCIESEMRTKTNKQISDKRRELAKKKLVVTGDREEVTEVEDIRVNILEIPPPRERIFPLKGHPEVDLVEKICKRGKQSREGREIINSLGEIEGLLKEDLTKALGWAMLEKLCYSLVEGQDPRNESQIELRNKGKGKIRKEGRRKQFNAIRRYATKKAKYKFYQQLFDKDRRRLTRIIMGEPDKAKCAIPMKEIEEYYVNILGTIGHGNMIGWPSSTENADNDILMSPISVDEIRIALTEIRKDSAPGPDKVKVSNLWDIFNLDSLILTKIFNIWFLNRQVPDEFKKNRTILIPKTQVEEEMKKLTSWRPLTIGSVWIRIYTKILAKRLVETVKICSRQKGFISAPGCEENIAILDNLIKGAKRNGNEIAIVFVDLAKAFDSVGHGHIIAGLRRFGIDEHFIDIIRDLYDNCTTRVWVGDEATESILIRRGVKQGDPLSPILFNIAMDPLLTRLEVEGSGFYVKGNSVTSLAFADDVAILSSSYKGMIKNLGILEEFCKNTNLSVNVKKTKGFHILTKHKTYVVNPKDNWQIGSEKIEYVQPGDFEKYLGARIDPWIGVGGPVLKEKLKDWSENLIKAPLKPAQKILILQTYILPKLFYNLLLIEPPFNLLDDLDVLVRKIVKEILHLPQCTTDGIFYARGRDGGLALTKFSVQIPNMLIRKWRRHIVSRDDWMDLSYLYAGENLVDKILSFSAVTSHPKKWREEEFLRWSELRCQGIGIKYFKNDLISNSIFRNSSKVKSSAYIAALQLRANIYPTRETLARGRGGVNALCRWCGKVRETVPHISGQCYKTKNARIKRHNRVVSAVVDKVGKLGWKPMIEPHLRNSKGELRKPDIIFIKGDTAVVVDVTVRWEDNAGSLEQAHSEKVAYYLELEEEIKNLTGGKNIHFFGFVLGARGKWSEGNNDLLQLLGMDRSKNFKESICRLVLYSTIGMMAIFSDR

SEQ ID NO: 9358 - protein, 1241 aa, Chrysemys picta
MEKSNLYFYTGLALDRVNNAPAVGFDAPADSVKYIRGVIRVAGPMDKMVWTIMKSHENESENQVLPVEHGEEVEENVCDDHGEEILSILPMVFTRDTFNDLTMDSFNPDFKYLSTFDDPYVRESSTDFNRDRNKDLNSIGSNINILESSSWKDGVFYLEYPVDSFNCPICPQILPTFGKWAKHINVVHKSKAIRVVCSKCGKSSQYHNIACHYPKCIPKKAETPMKSHTCSVCGLGFHTRSGLSQHCRHRHPAVRNEQRKEDMAAKSKIKEGSTRSRIWTKDEVAQLIQLERKYIGKRNINKCIESEMRTKTNKQISDKRRELAKKKLVVTGDREEVTEVEDIRVNILEIPPPRERIFPLKGHPEVDLVEKICKRGKQSREGREIINSLGEIEGLLKEDLTKALGWAMLEKLCYSLVEGQDPRNESQIELRNKGKGKIRKEGRRKQFNAIRRYATKKAKYKFYQQLFDKDRRRLTRIIMGEPDKAKCAIPMKEIEEYYVNILGTIGHGNMIGWPSSTENADNDILMSPISVDEIRIALREIRKDSAPGPDKVKVSNLWDIFNLDSLILTKIFNIWFLNRQVPDEFKKNRTILIPKTQDEEEMKKLTSWRPLTIGSVWIRIYTKILAKRLVETVKICSRQKGFISAPGCEENIAILDNLIKGAKRNGNEIAIVFVDLAKAFDSVGHGHIIAGLRRFGIDEHFIDIIRDLYDNCTTRVWVGDEATESILIRRGVKQGDPLSPILFNIAMDPLLTRLEVEGSGFYVKGNSVTSLAFADDVAILSSSYKGMIKNLGILEEFCKNTNLSVNVKKTKGFHILTKHKTYVVNPKDNWQIGSEKIEYVQPGDFEKYLGARIDPWIGVGGPVLKEKLKDWSENLIKAPLKPAQKILILQTYILPKLFYNLLLIEPPFNLLDDLDVLVRKIVKEILHLPQCTTDGIFYSRGRDGGLALTKFSVQIPNMLIRKWRRHIVSRDDWMDLSYLYAGENLVDKILSFSAVTSHPKKWREEEFLRWSELRCQGIGIKYFKNDLISNSIFRNSSKVKSSAYIAALQLRANIYPTRETLARGRGGVNALCRWCGKVRETVPHISGQCYKTKNARIKRHNRVVSAVVDKVGKLGWKAMIEPHLRNSKGELRKPDIIFIKGDTAVVVDVTVRWEDNAGSLEQAHSEKVAYYLELEEEIKNLTGGKNIHFFGFVLGARGKWSEGNNDLLQLLGMDRSKNFKESICRLVLYSTIGMMAIFSDR

SEQ ID NO: 9359 - protein, 1107 aa, Chrysemys picta
MEKSNLYFYTGLALDRVNNAPAVGFDAPADSVKYIRGVIRVAGPMDKMVWTIMKSHENESENQVLPVEHGEEVEENVCDDHGEEILSILPMVFTRDTFNDLTMDSFNPDFKYLSTFDDPYVRESSTDFNRDRNKDLNSIGSNINILESSSWKDGVFYLEYPVDSFNCPICPQILPTFGKWAKHINVVHKSKAIRVVCSKCGKSSQYHNIACHYPKCIPKKADTPMKSHTCLVCGLGFHTRSGLSQHCRHRHPAVRNEQRKEDMAAKSKIKEGSTRSRIWTKDEVAQLIQLERKYIGKRNINKCIESEMRTKTNKQISDKRRELAKKKLVVTGDREEVTEVEDIRVNILEIPPPRERIFPLKGHPEVDLVEKICKRGKQSREGREIINSLGEIEGLLKEDLTKALGWAMLEKLCYSLVEGQDPRNESQIELRNKGKGKIRKEGRRKQFNAIRRYATKKAKYKFYQQLFDKDRRRLTRIIMGEPDKAKCAIPMKEIEEYYVNILGTIGHGNMIGWPSSTENADNDILMSPISVDEIRIALTEIRKDSAPGPDKVKVSNLWDIFNLDSLILTKIFNIWFLNRQVPDEFKKNRTILIPKTQDEEEMKKLTSWRPLTIGSVWIRIYTKILAKRLVETVKICSRQKGFISAPGCEENIAILDNLIKGAKRNGNEIAIVFVDLAKAFDSVGHGHIIAGLRRFGIDEHFIDIIRDLYDNCTTRVWVGDEATESILIRRGVKQGDPLSPILFNIAMDPLLTRLEVEGSGFYVKGNSVTSLAFADDVAILSSSYKGMIKNLGILEEFCKNTNLSVNVKKTKGFHIVTKHKTYVVNPKDNWQIGSEKIEYVQPGDFEKYLGARIDPWIGVGGPVLKEKLKDWSENLIKAPLKPAQKILILQTYILPKLFYNLLLIEPPFNLLDDLDVLVRKIVKEILHLPQCTTDGIFYSRGRDGGLALTKFSVQIPNMLIRKWRRHIVSRDDWMDLSYLYAGENLVDKILSFSAVTSHPKKWREEEFLRWSELRCQGIGIKYFKNDLISNSIFRNSSKVKSSAYIAALQLRANIYPTRETLARGRGGVNALCRWCGKVRETVPHISGQCYKTKNARIKRHNRVVSAV

SEQ ID NO: 9360 - protein, 1260 aa, Terrapene carolina
MEKSNLYFYTGLALDRVNNAPAVGFDAPADSVKYIRGVIRVAGPMDKMVWTIMKSHEHESENQVLPVEHGEEVEENVCDDHGEEILSILPMVFTRDTFNDLTMESFNPDFKYLSTFDDPYVSESGYLNAHLVNGSSLLNSFRPSTDFNRDRNKDLNSTGSNINILESSSWKDGVFYLEYPVDSFNCPICPQILPTFGKWAKHINVVHKSKAIRVVCSKCGKSSQYHNIACHYPKCIPKKADTPMKSHTCSVCGLGFHTRSGLSQHCRHRHPAVRNEQRKEDMAAKSKIKEGSTRSRIWTKDEVAQLIQLERKYIGKRNINKCIESEMRTKTNKQISDKRRELAKKKLVVTGDREEVTEVEDIRVNILEIPPPRERIFPLKGHPEVDLVEKICKRGKQSREGREIINSLGEIEGLLKEDLTKALGWAMLEKLCYSLVEGKDPRNESQIELRNKGKGKMRKEGRRKQFNAIRRYATKKAKYKFYQQLFDKDRRRLTRIIMGEPDKAKCAIPMKEIEEYYVNILGTIGHGNMIGWPSSTENADNDILMSPISVDEIRIALREIRKDSAPGPDKVKVSNLWDIFNLDSLILTKIFNIWFLNRQVPDEFKKNRRILIPKTQDEEEMKKLTSWRPLTIGSVWIRIYTKILAKRLVETVKICSRQKGFISAPGCEENIAILDNLIKGAKRNGNEIAIVFVDLAKAFDSVGHGHIIAGLRRFGIDEHFIDIIRDLYDNCTTKVWVGDEATESILIRRGVKQGDPLSPILFNIAMDPLLTRLEVEGSGFYVKGNGVTSLAFADDVAILSSSYKGMIKNLGILEEFCKNTNLSVNVKKTKGFHILTKHKTYVVNSKDNWQIGSEEIEYVQPGDFEKYLGARIDPSIGVGGPVLKEKLKDWSENLIKAPLKPAQKILILQTYILPKLFYNLLLIEPPFNLLDDLDVLVRKIVKEILHLPQCTTDGIFYSRGRDGGLALTKFSVQIPNMLIRKWRRHIVSRDDCMDLSYLNAGENLVDKILSFSAVTSHPKKWREEEFLRWSELRCQGIGIKYFKNDLISNWIFRNSSKVKSSAYIAALQLRANIYPTRETLARGRGGVNALCRWCGKVRETVPHISGQCYKTKNARIKRHNRVVSAVVDKVGKLGWKAMIEPHLRNSKGELRKPDIIFIKGDTAVVVDVTVRWEDNAGSLEQAHSEKVAYYLELEEEIKNLTGGKNIHFFGFVLGARGKWSEGNNDLLQLLGMDRSKNFKESICRLVLYSTIGMMAIFSDR

SEQ ID NO: 9361 - protein, 1260 aa, Terrapene carolina
MEKSNLYFYTGLALDRVNNAPAVGFDAPADSVKYIRGVIRVAGPMDKMVWTIMKSHEHESENQVLPVEHGEEVEENVCDDHGEEILSILPMVFTRDTFNDLTMESFNPDFKYLSTFDDPYVSESGYLNAHLVNGSSLLNSFRPSTDFNRDRNKDLNSTGSNINILESSSWKDGVFYLEYPVDSFNCPICPQILPTFGKWAKHIHVVHKSKAIRVVCSKCGKSSQYHNIACHYPKCIPKKADTPMKSHTCSVCGLGFHTRSGLSQHCRHRHPAVRNEQRKEDMAAKSKIKEGSTRSRIWTKDEVAQLIQLERKYIGKRNINKCIESEMRTKMNKQISDKRRELAKKKLVVTGDREEVTEVEDIRVNILEIPPPRERIFPLKGHPEVDLVEKICKRGKQSREGREIINSLGEIEGLLKEDLTKALGWAMLEKLCYSLVEGKDPRNESQIELRNKGKGKMRKEGRRKQFNAIRRYATKKAKYKFYQQLFDKDRRRLTRIIMGEPDKAKCAIPMKEIEEYYVNILGTIGHGNMIGWPSSTENADNDILMSPISVDEIRIALREIRKDSAPGPDKVKVSNLWDIFNLDSLILTKIFNIWFLNRQVPDEFKKNRTILIPKTQDEEEMKKLTSWRPLTIGSVWIRIYTKILAKRLVETVKICSRQKGFISAPGCEENIAILDNLIKGAKRNGNEIAIVFVDLAKAFDSVGHGHIIAGLRRFGIDEHFIDIIRDLYDNCTTRVWVGDEATESILIRRGVKQGDPLSPILFNIAMNPLLTRLEVEGSGFYVKGNGVTSLAFADDVAILSSSYKGMIKNLGILEEFCKNTNLSVNVKKTKGFHILTKHKTYVVNPKDNWQIGSEEIEYVQPGDFEKYLGARIDPWIGVGGPVLKEKLKDWSENLIKAPLKPAPKILILQTYILPKLFYNLLLIEPPFNLLDDLDVLVRKIVKEILHLPQCTTDGIFYSRGRDGGLALTKFSVQISNMLIRKWRRHIVSRDDWMDLSYLYAGENLVDKILSFSAVTSHPKKWREEEFLRWSELRCQGIGIKYFKNDLISNSIFRNSSKVKSSAYIAALQLRANIYPTRETLARGRGGVNALCRWCGKVRETVPHISGQCYKTKNARIKRHNRVVSALVDKVGKLGWKAMIEPHLRNSKGELRKPDIIFIKGDTAVVVDVTVRWEDNAGSLEQAHSEKVAYYLELEEEIKNLTGGKNIHFFGFVLGARGRWSEGNNDLLQLLGMDRSKNFKESICRLVLYSTIGMMAIFSDR

SEQ ID NO: 9362 - protein, 1260 aa, Terrapene carolina
MEKSNLYFYTGLALDRVNNAPAVGFDAPADSVKYIRGVIRVAGPMDKMVWTIMKSHEHESENQVLPVEHGEEVEENVCDDHGEEFLSILPMVFTRDTFNDLTMESFNPDFKYLSTFDDPYVSESGYLNAHLVNGSSLLNSFRPSTDFNRDRNKDLNSTGSNINILESSSWKDGVFYLEYPVDSFNCPICPQILPTFGKWAKHINVVHKSKAIRVVCSKCGKSSQYHNIACHYPKCIPKKADTPMKSHTCSVCGLGFHTRSGLSQHCRHRHPAVRNEQRKEDMAAKSKIKEGSTRSRIWTKDEVAQLIQLERKYIGKRNINKCIESEMRTKTNKQISDKRRELAKKKLVVTGDREEVTEVEDIRVNILEILPPRERIFPLKGHPEVDLVEKICKRGKQSREGREIINSLGEIEGLLKEDLTKALGWAMLEKLCYSLVEGKDPRNESQIELRNKGKGKMRKEGRRKQFNAIRRYATKKAKYKFYQQLFDKDRRRLTRIIMGEPDKAKCAIPMKEIEEYYVNILGTIGHGNMIGWPSSTENADNDILMSPISVDEIRIALREIRKDSAPGPDKVKVSNLWDIFNLDSLILTKIFNIWFLNRQVPDEFKKNRTILIPKTQDEEEMKKLTSWRPLTIGSVWIRIYTKILAKRLVETVKICSRQKGFISAPGCEENIAILDNLIKGAKRNGNEIAIVFVDLAKAFDSVGHGHIIAGLRRFGIDEHFIDIIRDLYDNCTTRVWVGDEATESILIRRGVKQGDPLSPILFNIAMDPLLTRLEVEGSGFYVKGNGVTSLAFADDVAILSSSYKGMIKNLGILEEFCKNTNLSVNVKKTKGFHILTKHKTYVVNPKDNWQIGSEEIEYVQPGDFEKYLGARIDPWIGVGGPVLKEKLKDWSENLIKAPLKPAPKILILQTYILPKLFYNLLLIEPPFNLLDDLDVLVRKIVKEILHLPQCTTDGIFYSRGRDGGLALTKFSVQIPNMLIRKWRRHIVSRDDWMDLSYLYAGENLVDKILSFSAVTSHPKKWREEEFLRWSELRCQGIGIKYFKNDLISNSIFRNSSKVKSSAYIAALQLRANIYPTRETLARGRGGVNALCRWCGKVRETVPHISGQCYKTKNARIKRHNRVVSAVVDKVGKLGWKAMIEPHLRNSKGELRKPDIIFIKGDTAVVVDVTVRWEDNAGSLEQAHSEKVAYYLELEEEIKNLTGGKNIHFFGFVLGARGKWSEGNNDLLQLLGMDRSKNFKESICRLVLYSTIGMMAIFSDR

SEQ ID NO: 9363 - protein, 1260 aa, Terrapene carolina
MEKSNLYFYTGLALDRVNNAPAVGFDAPADSVKYIRGVIRVAGPMDKMVWTIMKSHEHESENQVLPVEHGEEVEENVCDDHGEEILSILPMVFTRDTFNDLTMESFNPDFKYLSTFDDPYVSESGYLNAHLVNGSSLLNSFRPSTDFNRDRNKDLNSTGSNINILESSSWKDGVFYLEYPVDSFNCPICPQILPTFGKWAKHINVVHKSKAIRVVCSKCGKSSQYHNIACHYPKCIPKKADTPMKSHTCSVCGLGFHTRSGLSQHCRHRHPAVRNEQRKEDMAAKSKIKEGSTRSRIWTKDEVAQLIQLERKYIGKRNINKCIESEMRTKTNKQISDKRRELAKKKLVVTGDREEVTEVEDIRVNILEIPPPRERIFPLKGHPEVDLVEKICKRGKQSREGREIINSLGEIEGLLKEDLTKALGWAMLEKLCYSLVEGKDPRNESQIELRNKGKGKMRKEGRRKQFNAIRRYATKKAKYKFYQQLFDKDRRRLTHIIMGEPDKAKCAIPMKEIEEYYVNILGTIGHGNMIGWPSSTENADNDILMSPISVDEIRIALREIRKDSAPGPDKVKVSNLWDIFNLDSLILTKIFNIWFLNRQVPDEFKKNRTILIPKTQDEEEMKKLTSWRPLTIGSVWIRIYTKILAKRLVETVKICSRQKGFISAPGCEENIAILDNLIKGAKRNGNEIAIVFVDLAKAFDSVGHGHIIAGLRRFGIDEHFIDIIRDLYDNCTTRVWVGDEATESILIRRGVKQGDPLSPILFNIAMDPLLTRLEVEGSGFYVKGNGVTSLAFADDVAILSSSYKGMIKNLGILEEFCKNTNLSVNVKKTKGFHILTKHKTYVVNPKDNWQIGSEEIEYVQPGDFEKYLGARIDPWIGVGGPVLKEKLKDWSENLIKAPLKPAQKILILQTYILPKLFYNLLLIEPPFNLLDDLDVLVRKIVKEILHLPQCTTDGIFYSRGRDGGLALTKFSVQIPNMLIRKWRRHIVSRDDWMDLSYLYAGENLVDKILSFSAVTSHPKKWREEEFLRWSELRCQGIGIKYFKNDLISNSIFRNSSKVKSSAYIAALQLRANIYPTRETLARGRGGVNALCRWCGKVRETVPHISGQCYKTKNARIKRHNRVVSAVVDKVGKLGWKAMIEPHLRNSKGELRKPDIIFIKGDTAVVVDVTVRWEDNAGSLEQAHSEKVAYYLELEEEIKNLTGGKNIHFFGFVLGGRGKWSEGNNDLLQLLGMDRSKNFKESICRLVLYSTIGMMAIFSDR

SEQ ID NO: 9364 - protein, 1260 aa, Actinemys marmorata
MEKSNLYFYTGLALDWVNNAPAVGFDAPADSVKYIRGVIRVAGPMDKMVWTIMKSHEHESENQVLPVEHGEEVEENVCDDHDEEILSILPMFFTRDTFNDLTMESFNPDFKYLSTFDDPYVRESGYLNAHLVNGSSLLNSFRPSTDFNRDRNKDLNSTGSNINILESSSWKDGVFYLEYPVDSFNCPICPQILPTFGKWAKHINVVHKSKAIRVVCSKCGKSSQYHNIACHYPKCIPKKVDTPMKSHTCSVCGLGFHTRSGLSQHCRHCSFLTAGCLRKEDMAAKSKIKEGSTRSRIWTKDEVAQLIQLERKYIGKRNINKCIESEMRTKTNKQISDKRRELAKKKLVVTGDREEVTEVEDIRVNILEIPPPRERIFPLKGHPEVDLVEKICKRGKQSREGREIINSLGEIEGLLKEDLTKALGWAMLEKLCYSLVEGKDPRNESQIELRNKGKGKMRKEGRRKQFNAIRRYATKKAKYKFYQQLFDKDRRRLTRIIMGEPDKAKCAIPMKEIEEYYVNILGTIGHGNMIGWPSSTENADNDILMSPISVDEIRIALREIRKDSAPGPDKVKVSNLWDIFNLDSLILTKIFNIWFLNRQVPDEFKKNRTILIPKTQDEEEMKKLTSWRPLTIGSVWIRIYTKILAKRLVETVKICSRQKGFISAPGCEENIAILDNLIEGAKRNGNEIAIVFVDLAKAFDSVGHGHIIAGLRRFGIDEHFIDIIRDLYDNCTTRVWVGDEATESILIRRGVKQGDPLSPILFNIAMDPLLTRLEVEGSGFYVKGNSVTSLAFADDVAILSSSYKGMIKNLGILEEFCKNTNLSVNVKKTKGFHILTKHKTYVVNPKDNWQIGSEEIEYVQPGDFEKYLGARIDPWIGVGGSVLKEKLKDWSENLIKAPLKPAQKILILQTYILPKLFYNLLLIEPPFNLLDDLDVLVRKIVKEILHLPQCTTDGIFYSRGRDGGLALTKFSVQIPNMLIRKWRRHIVSRDDWMDLSYLYAGENLVDKILSFSAVTSHPKKWREEEFLRWSELRCQGIGIKYFKNDLISNSIFRNSSKVKSSAYIAALQLRANIYPTRETLARGRGGVNALCRWCGKVRETVPHISGQCYKTKNARIKRHNRVVSAVVDKVGKLGWKAMIEPHLRNSKGELRKPDIIFIKGDTAVVVDVTVRWEDNAGSLEQAHSEKVAYYLELEEEIKNLTGGKNIHFFGFVLGARGKWSEGNNDLLQLLGMDRSKNFKESICRLVLYSTIGMMAIFSDR

SEQ ID NO: 9365 - protein, 1230 aa, Mauremys reevesii
MEKSNFYLNTGVALDRVKNAPAAGFDAPADSVKYIRGVIRITGPMTKAEGTEMMPQVAEVEDMVPSVEERIVEDKEEVFSNDQVDEILTILPMVFTGEVFNDLKKDEVNLDFKYLSKFEDPYFIEPGGFYSVLVRGFNEKGSSFPVDGDLNSDFNGDSVQGAKVIESSSWKEGVFYLEYPVDCFNCPICPQVLATFGKWAKHINVVHKSKAIRVLCKKCGKAAQYHSIACHYPKCRPREVDTPSGSHACSACGLAFHTKSGLSQHCRHRHPAIRNEQRINEKVRNKIREGSNARVRVWTEEEIEQVIVLERKYIGKRNINKCIESELKTKTNKQISDKRRELAKKRQETAQIEEIEVEKIVDSILEVPPPRERILPLRRDPEVDPRGLVSRWGKQSREGKDILNGLRVVEELLQEDSTKRLGWAELEKICISLVDGRKLGEDEQVEIGIDGRRRKGIGNGRKKQSNALRRYATQKAKYRFYQQLFDKDRRRLARIIMGEPDKVNCEIPMEEIERYFMDILGNIGHGNIVGWPSSTERADNDLLMSPISVEEVRSVLREVKKDSAPGPDKVKISDLREIFKIDSLIITRIFNIWFLNGQVPDVFKENRTILIPKTDDVEELRKLTSWRPLTIGSMWVRVYTKILAKRLSEAVRICDRQKGFVAAPGCEENIAILDNLIKGAKRKGEEIAVVFIDLAKAFDSIGHGHIIAGLKRFDVDERFIGIVRDLYFNCTTRVWVGDKFTESILIRRGVKQGDPLSPILFNIALDPFLTRLELEGSGFYVQGQSITSLAFADDVAILSGSYLGMIKNLSILQNFCRNTNLRINVSKTKGFHIWPKHKTYLVNPRSRWMIGSEEIQYVSPGEFEKYLGARIDPWIGVGGSQLKEKLVKWSESLSRAPLKPAQKLLILQTYVLPRLFYNLLLMEPPFCILNDLDVLVRTIVKEILHLPRCTTDGLFYSRRRDGGLALTKFSVQIPNMLLRKWRRPIVSKDSWVDLSYVYAGENLVDKIIVFSAATPHPRKWREEEFLRWTELRCQGIGVKYFRNDVISNSSFRNSDKVKSSAYIAALQMRANIYPTRETLARGRGGVTALCRWCGKVKETIPHISGQCYKTKEMRIKRHNRVVSVLVDRVVKVGWKAVVEPHLRNDKGELRKPDIVFTKGDTAVVVDVTVRWEDNDGSLEQAHRQKVTYYFELENKIKELTGVNNILFLGLWLGCVASGVMGMMSCYKFWE

SEQ ID NO: 9366 - protein, 1307 aa, Chrysemys picta
MDAPLVRVASPQARVSFPLERVSFPQVRVSFPLERVSFPLRRVNLLAMEKSNLYFYTGLALDRVNNAPAVGFDAPADSVKYIRGVIRVAGPMDKMVWTIMKSHENESENQVLPVEHGEEVEENVCDDHGEEILSILPMVFTRDTFNDLTMDSFNPDFKYLSTFDDPYVRESGYLNAHLVNGSSLLNSFRPSTDFNRDRNKDLNSTGSNINISESSSWKDGVFYLEYPVDSFNCPICPQILPTFGKWAKHINVVHKSKAIRVVCSKCGKSSQYRNIACHYPKCIPKKADTPMKSHTCSVCGLGFHTRSGLSQHCRHRHPAVRNEQRKEDMAAKSKIKEGSIRSRIWTKDEVAQLIQLERKYIGKRNINKCIESEMRTKTNKQISDKRRELAKKKLVVTGDREEVTEVEDIRVHILEIPPPRERIFPLKGHPEVDLVEKICKRGKQSREGREIINSLGEIEGLLKEDLTKALGWAMLEKLCYSLVEGKDPRNESQIELRNKGKGKMRKEERRKQFNASRRYATKKAKYKFYQQLFDKDRRRLTRIIMGEPDKAKCAIPMKEIEEYYVNILGTIGHGNMIGWPSSTENADNDILMSPISVDEIRIALREIRKDSAPGPDKVKVRNLWDIFNLDSLILTKIFNIWFLNRQVPDEFKKNRTILIPKTQDEEEMKKLTSWRPLTIGSVWIRIYTKILAKRLVETVKICSRQKGFISAPGCEENIATLDNLIKGAKRNGNEIAIVFVDLAKAFDSVGHGHIIAGLRRFGIDEHFIDIIRDLYDNCTTRVWVGDEATESILIRRGVKQGDPLSPILFNIAMDPLLTRLEVEGSGFYVKGNSVTSLAFADDVAILSSSYKGMIKNLGILEEFCKNTNLSVNVKKTKGFHILTKHKTYVVNPKDNWQIGSEEIEYVQPGDFEKYLGARIDPWIGVGGPVLKEKLKDWSENLIKAPLKPAPKILILQTYILPKLFYNLLLIEPPFNLLDDLDVLVRKIVKEILHLPQCTTDGIFYSRGRDGGLALTKFSVQIPNMLIRKWRRHIVSRDDWMDLSYLYAGENLVDKILLFSAVTSHPKKWREEEFLRWSELRCQGVGIKYFKNDLISNSIFRNSSKVKSSAYIAALQLRANIYLTRETLARGRGGVNALCRWCGKVRETVPHISGQCYKTKNARIKRHNRVVSAVVDKVGKLGWKAIIEPHLRNSKGELRKPDIIFIKGDTAVVVDVTVRWEDNAGSLEQAHSEKVAYYLELEEEIKNLTGGKNIHFFGFVLGARGKWSEGNNDLLQLLGMDRSKNFKESICRLVLYSTIGMMAIFSDR

SEQ ID NO: 9367 - protein, 1257 aa, Chrysemys picta
MEKSNLYFYTGLALDRVNNAPAVGFDAPADSVKYIRGVIRVAGPMDRMVWTIMKSHENESENQVLPVEYGEEVEENVCDDRGEEILSILPMVFTRDTFNDLTMDSFNPDFKYLSTFDDPYVRESGYLNAHLVNGSSLLNSFRPSTDFNRDRNKDLNSTGSNINILESSSWKDGVFYLEYPVDSFNCPICPQILPTFGKWAKHINVVHKSKAIRVVCSKCGKSSQYRNIACHYPKCIPKKADTPMKSHTCSVCGLGFHTRSGLSQHCRHRHPAVRNEQRKEDMAAKSKIKEGSIRSRIWTKDEVAQLIQLERKYIGKRNINKCIESEMRTKTNKQISDKRRELAKKKLVVTGDREEVTEVEDIRVNILEIPPPRERIFPLKGHPEVDLVEKICKRGKQSREGREIINSLGEIEGLLKEDLTKALGWAMLEKLCYSLVEGKDPRNESQIELRNKGKGKMRKEGRRKQFNASRRYATKKAKYKFYQQLFDKDRRRLTHIIMGEPDKAKCAIPMKEIEEYYVNILGTIGHGNMIRWPSSTENADNDILMSPISVDEIRIALREIRKDSAPGPDKVKVSNLWDIFNLDSLILTKIFNIWFLNRQVPDEFKKNRTILIPKTQDEEEMKKLTSWRPLTIGSVWIRIYTKILAKRLVETVKICSRQKGFISAPGCEENIAILDNLIKGAKRNGNEIAIVFVDLAKAFDSVGHRHIIAGLRRFGIDEHFIDIIRDLYDNCTTRVWVGDEATESILIRRGVKQGDPLSPILFNIAMDPLLTRLEVEGSGFYVKGNSVTSLAFADDVAILSSSYKGMIKNLGILEEFCKNTNLSVNVKKTKGFHILTKHKTYVVNPKDNWQIGSEEIEYVQPGDFEKYLGARIDPWIGVGGPVLKEKLKDWSENLIKASLKPAPKILILQTYILPKLFYNLLLIEPPFNLLDDLDVLVRKIVKEILHLPQCTTDGIFYSRGRDGGLALTKFSVQIPNMLIRKWRRHIVSRDDWMDLSYLYAGENLVDKILLFSAVTSHPKKWREEEFLRWSELRCQGIGIKYFKNDLISNSIFRNSSKVKSSAYIAALQLRANIYPTRETLARGRGGVNALCRWCGKVRETVPHSSGQCYKTKNARIKRHNRVVSAVVDKVGKLGWKAIIEPHLRNSKGELRKPDIIFIKGDTAVVVDVTVQWEDNAGSLEQAHSEKVAYYLELEEEIKNLTGGKNIHFFGFVLGARGKWSEGNNDLLQLLGMDRSKNFKESICRLVLYSTIGIFSDR

SEQ ID NO: 9368 - protein, 1241 aa, Chrysemys picta
MEKSNLYFYTGLALDRVNNAPAVGFDAPADSVKYIRGVIRVAGPMDKMVWTIMKSHENESENQVLPVEHGEEVEENVCDDHGEEILSILPMVFTRDTFNDLTMDSFNPDFKYLSTFDDPYVRESSTDFNRDRNKDLNNIGSNINILESSSWKDGVFYLEYPVDSFNCPICPQILPTFGKWAKHINVVHKSKAIRVVCSKCGKSSQYHNIACHYPKCIPKKADTPMKSHTCSVCGLGFHTRSGLSQHCRHRHPAVRNEQRKEDMAAKSKIKEGSTRSRIWTKDEVAQLIQLERKYIGKRNINKCIESEMRTKTNKQISDKRRELAKKKLVVTGDREEVTEVEDIRVNILEIPPPRERIFPLKGHPEVDLVEKICKRGKQSREGREIINSLGEIEGLLKEDLTKALGWAMLEKLCYSLVEGQDPRNESQIELRNKGKGKIRKEGRRKQFNAIRRYATKKAKYKFYQQLFDKDRRRLTRIIMGEPDKAKCAIPMKEIEEYYVNILGTIGHGNMIGWPSSTENADNDILMSPISVDEIRIALTEIRKDSAPGPDKVKVSNLWDIFNLDSLILTKIFNIWFLNRQVPDEFKKNRTILIPKTQDEEEMKKLTSWRPLTIGSVWIRIYTKILAKRLVETVKICSRQKGFISAPGCEENIAILDNLIKGAKRNGNEIAIVFVDLAKAFDSVGHGHIIAGLRRFGIDEHFIDIIRDLYDNCTTRVWVGDEATESILIRRGVKQGDPLSPILFNIAMDPLLTRLEVEGSGFYVKGNSVTSLAFADDVAILSSSYKGMIKNLGILEEFCKNTNLSVNVKKTKGFHILTKHKTYVVNPKDNWQIGSEKIEYVQPGDFEKYLGARIDPWIGVGGPVLKEKLKDWSENLIKAPLKPAQKILILQTYILPKLFYNLLLIEPPFNLLDDLDVLVRKIVKEILHLPQCTTDGIFYSRGRDGGLALTKFSVQIPNMLIRKWRRHIVSRDDWMDLSYLYAGENLVDKILSFSAVTSHPKKWREEEFLRWSELRCQGIGIKYFKNDLISNSIFRNSSKVKSSAYIAALQLRANIYPTRETLARGRGGVNALCRWCGKVRETVPHISGQCYKTKNARIKRHNRVVSAVVDKVGKLGWKAMIEPHLRNSKGELRKPDIIFIKGDTAVVVDVTVRWEDNAGSLEQAHSEKVAYYLELEEEIKNLTGGKNIHFFGFVLGARGKWSEGNNDLLQLLGMDRSKNFKESICRLVLYSTIGMMAIFSDR

SEQ ID NO: 9369 - protein, 1260 aa, Terrapene carolina
MEKSNLYFYTGLALDRVNNAPAVGFDAPADSVKYIRGVIRVAGPMDKMVWTIMKSHEHESENQVLPVEHGEEVEENVCDDHGEEILSILPMVFTRDTFNDLTMESFNPDFKYLSTFDDPYVSESGYLNAHLVNGSSLLNSSRPSTDFNRDRNKDLNSTGSNINILESSSWKDGVFYLEYPIDSFNCPICPQILPTFGKWAKHINVVHKSKAIRVVCSKCGKSSQYHNIACHYPKCIPKKADTPMKSHTCSVCGLGFHTRSGLSQHCRHRHPAVRNEQRKEDMAAKSKIKEGSTRSRIWTKDEVAQLIQLERKYIGKRNINKCIESEMRTKTNKQISDKRRELAKKKLVVTGDSEEVTEVEDIRVNILEIPPPRERIFPLKGHPEVDLVEKICKRGKQSREGREIINSLGEIEGLLKEDLTKALGWAMLEKLCYSLVEGKDPRNESQIELRNKGKGKMRKEGRRKQFNAIRRYATKKAKYKFYQQLFDKDRRRLTRIIMGEPDKAKCAIPMKEIEEYYVNILGTIGHGNMIGWPSSTENADNDILMSPISVDEIRIALREIRKDSAPGPDKVKVSNLWDIFNLDSLILTKIFNIWFLNRQVPDEFKKNRTILIPKTQDEEEMKKLTSWRPLTIGSVWIRIYTKILAKRLVETVKICSRQKGFISAPGCEENIAILDNLIKGAKRNGNEIAIVFVDLAKAFDSVGHGHIIAGLRRFGIDEHFIDIIRDLYDNCTTRVWVGDEATESILIRRGVKQGDPLSPILFNIAMDPLLTRLEVEGSGFYVKGNGVTSLAFADDVAILSSSYKGMIKNLGILEEFCKNTNLSVNVKKTKGFHILTKHKTYVVNPKDNWQIGSEEIEYVQPGDFEKYLGARIDPWIGVGGPVLKEKLKDWSENLIKAPLKPAQKILILQIYILPKLFYNLLLIEPPFNLLDDLDVLVRKIVKEILHLPQCITDGIFYSRGRDGGLALTKFSVQIPNMLIRKWRRHIVSRDDWMDLSYLYAGENLVDKILSFSAVTSHPKKWREEEFLRWSELRCQGIGIKYFKNDLISNSIFRNSSKVKSSAYIAALQLRANIYPTRETLARGRGGVNALCRWCGKVRETVPHISGQCYKTKNARIKRHNRVVSAVVDKVGKLGWKAMIEPHLRNSKGELRKPDIIFIKGDTAVVVDVTVRWEDNAGSLEQAHSEKVAYYLELEEEIKNLTGGKNIHFFGFVLGARGKWSEGNNDLLQLLGMDRSKNFKESICRLVLYSTIGMMAIFSDR

SEQ ID NO: 9370 - protein, 1260 aa, Terrapene carolina
MEKSNLYFYTGLALDRVNNAPAVGFDAPADSVKYIRGVIRVAGPMDKMVWTIMKSHEHESENQVLPVEHGEEVEENVCDDHGEEILSILPMVFTRDTFNDLTMESFNPDFKYLSTFDDPYVSESGYLNAHLVNGSSLLNSFRPSTDFNRDRNKDLNSTGSNINILESSSWKGGVFYLEYPVDSFNCPICPQILPTFGKWAKHINVVHKSKAIRVVCSKCGKSSQYHNIACHYPKCIPKKADTPMKSHTCSVCGLGFHTRSGLSQHCRHRHPAVRNEQRKEDMAAKSKIKEGSTRSRIWTKDEVAQLIQLERKYIGKRNINKCIESEMRTKTNKQISDKRRELAKKKLVVTGDREEVTEVEDIRVNILEIPPPRERIFPLKGHPEVDLVEKICKRGKQSREGREIINSLGEIEGLLKEDLTKALGWAMLEKLCYSLVEGKDPRNESQIELRNKEKGKMRKEGRRKQFNAIRRYATKKAKYKFYQQLFDKDRRRLTRIIMGEPDKAKCAIPMKEIEEYYVNILGTIGHGNMIGWPSSTENADNDILMSPISVDEIRIALREIRKDSAPGPDKVKVSNLWDIFNLDSLIFTKIFNIWFLNRQVPDEFKKNRTILIPKTQDEEEMKKLTSWRPLTIGSVWIRIYTKILAKRLVETVKICSRQKGFISAPGCEENIAILDNLIKGAKRNGNEIAIVFVDLAKAFDSVGHGHIIAGLRRFGIDEHFIDIIRDLYDNCTTRVWVGDEATESILIRRGVKQGDPLSPILFNIAMDPLLTRLEVEGSGFYVKGNGVTSLAFADDVAILSSSYKGMIKNLGILEEFCKNTNLSVNVKKTKGFHILTKHKTYVVNPKDNWQIGSEEIEYVQPGDFEKYLGARIDPWIGVGGPVLKEKLKDWSENLIKAPLKPAQKILILQTYILPKLFYNLLLIEPPFNLLDDLDVLVRKIVKEILHLPQCITDGIFYSRGRDGGLALTKFSVQIPNMLIRKWRRHIVSRDDWMDLSYLYAGENLVDKILSFSAVTSHPKKWREEEFLRWSELRCQGIGIKYFKNDLISNSIFRNSSKVKSSAYIAALQLRANIYPTRETLARGRGGVNALCRWCGKVRETVPHISGQCYKTKNARIKRHNRVVSAVVDKVGKLGWKAMIEPHLRNSKGELRKPDIIFIKGDTAVVVDVTVRWEDNAGSLEQAHSEKVAYYLELEEEIKNLTGGKNIHFFGFVLGARGKWSEGNNDLLQLLGMDRSKNFKESICRLVLYSTIGMMAIFSDR

SEQ ID NO: 9371 - protein, 1260 aa, Terrapene carolina
MEKSNLYFYTGLALDRVNNAPAVGFDAPADSVKYIRGVIRVAGPMDKMVWTIMKSHEYESENQVLPVEHGEEVEENVCDDHGEEILSILPMVFTRDTFNDLTMESFNPDFKYLSTFDDPYVSELGYLNAHLVNGSSLLNSFRPSTDFNRDRNKDLNSTGSNINILESSSWKDGVFYLEYPVDSFNCPICPQILPTFGKWAKHINVVHKSKAIRVVCSKCGKSSQYHNIACHYPKCIPKKADTPMKSHTCSVCGLGFHTRSGLSQHCRHRHPAVRNEQRKEDMAAKSKSKEGSTRSRIWTKDEVAQLIQLERKYIGKRNINKCIESEMRTKTNKQISDKRRELAKKKLVVTGDREEVTEVEDIRVNILEIPPPRERIFPLKGHPEVDLVEKICKRGKQSREGREIINSLGEIEGLLKEDLTKALGWAMLEKLCYSLVEGKDPRNESQIELRNKGKGKMRKEGRRKQFNAIRRYATKKAKYKFYQQLFDKDRRRLTRIIMGEPDKAKCAIPMKEIEEYYVNILGTIGHGNMIGWPSSTENADNDILMSPISVDEIRIALREIRKDSAPGPDKVKVSNLWDIFNLDSLILTKIFNIWFLNRQVPDEFKKNRTILIPKTQDEEEMKKLTSWRPLTIGSVWIRIYTKILAKRLVETVKICSRQKGFISAPGCEENIAILDNLIKGAKRNGNEIAIVFVDLAKAFDSVGHGHIIAGLRRFGIDEHFIDIIRDLYDNCTTRVWVGDEATESILIRRGVKQGDPLSPILFNIAMDPLLTRLEVEGSGFYVKGNGVTSLAFADDVAILSSSYKGMIKNLGILEEFCKNTNLSVNVKKTKGFHILTKHKTYVVNPKDNWQIGSEEIEYVQPGDFEKYLGARIDPWIGVGGPVLKKKLKDWSENLIKAPLKPAQKILILQTYILPKLFYNLLLIEPPFNLLDDLDVLVRKIVKEILHLPQCTTDGIFYSRRRDGGLALTKFSVQIPNMLIRKWRRHIVSRDDWMDLSYLYAGENLVDKILSFSAVTSHPKKWREEEFLRWSELRCQGIGIKYFKNDLISNSIFRNSSKVKSSAYIAALQLRANIYPTRETLARGRGGVNALCRWCGKVRETVPHISGQCYKTKNARIKRHNRVVSAVVDKVGKLGWKAMIEPHLRNSKGELRKPDIIFIKGDTAVVVDVTVRWEDNAGSLEQAHSEKVAYYLELEEEIKNLTGGKNIHFFGFVLGARGKWSEGNNDLLQLLGMDRSKNFKESICRLVLYSTIGMMAIFSDR

SEQ ID NO: 9372 - protein, 1260 aa, Terrapene carolina
MEKSNLYFYTGLALDRVNNAPAVGFDAPADSVKYIRGVIRVAGPMDKMVWTIMKSQEHESENQVLPVEHGEEVEENVCDDHGEEILSILPMVFTRDTFNDLTMESFNPDFKYLSTFDDPYVSESGYLNAHLVNGSSLLNSFRPSTDFNRDRNKDLNSTGSNINILESSSWKDGVFYLEYPVDSFNCPICPQILPTFGKWAKHINVVHKSKAIRVVCSKCGKSSQYHNIACHYPKCIPKKADTPMKSHTCSVCGLGFHTRSGLSQHCRHRHPAVRNEQRKEDMAAKSKIKEGSTRSRIWTKDEVAQHIQLERKYIGKRNINKCIESEMRTKTNKQISDKRRELAKKKLVVTGDREEVTEVEDIRVNILEIPPPRERIFPLKGHPEVDLVEKICKRGKQSREGREIINSLGEIEGLLKEDLTKALGWAMLEKVCYSLVEGKDPRNESQIELRNKGKGKMRKEGRRKQFNAIRRYATKKAKYKFYQQLFDKDRRRLTRIIMGEPDKAKCAIPMKEIEEYYVNILGTIGHGNMIGWPSSTENADNDILMSPISVDEIRIALREIRKDSAPGPDKVKVSNLWDIFNLDSLILTKIFNIWFLNRQVPDEFKKNRTILIPKTQDEEEMKKLTSWRPLTIGSVWIRIYTKILAKRLVETVKICSRQKGFISAPGCEENIAILDNLIKGAKRNGNEIAIVFVDLAKAFDSVGHGHIIAGLRRFGIDEHFIDIIRDLYDNCTTRVWVGDEATESILIRRGVKQGDPLSPILFNIAMDPLLTRLEVEGSGFYVKGNGVTSLAFADDVAILSSSYKGMIKNLGILEEFCKNTNLSVNVKKMKGFHILTKHKTYVVNPKDNWQIGSEEIEYVQPGDFEKYLGARIDPWIGVGGPVLKEKLKDWSENLIKAPLKPAQKILILQTYILPKLFYNLLLIEPPFNLLDDLDVLVRKIVKEILHLPQCTTDGIFYSRGRDGGLALTKFSVQIPNMLIRKWRRHIVSRDDWMDLSYLYAGENLVDKILSFSAVTSHPKKWREEEFLRWSELRCQGIGIKYFKNDLISNSIFRNSSKVKSSAYIAALQLRANIYPTRETLARGRGGVNALCRWCGKVRETVPHISGQCYKTKNARIKRHNRVVSAVVDKVGKLGWKAMIEPHLRNSKGELRKPDIIFIKGDTAVVVDVTVRWEDNAGSLEQAHSEKVAYYLELEEEIKNLTGGKNIHFFGFVLGARGKWSEGNNDLLQLLGMDRSKNFKESICRLVLYSTIGMMAIFSDR

SEQ ID NO: 9373 - protein, 1260 aa, Actinemys marmorata
MEKRNLYFYTGLALDRVNNAPAVGFDAPADSVKYIRGVIRVAGPMDKMVWTIMKSHEHESENQVHPVEHGEEVEENVCDDHGEEILSILPMVFTRDTFNDLTMESFNPDFKYLSTFDDPYVRESGYLNAHLVNGSSLLNSFRPSTDFNRDRNKDLNSTGSNINILESSSWKDGVFYLEYPVDSFNCPICPQILPTFGKWAKHINVVHKSKAIRVVCSKCGKSSQYHNIACHYPKCIPKKADTPMKSHTCSVCGLGFHTRSGLSQHCRHRHPAVRNEQRKEDMAAKSKIKEGSTRSRIWTKDEVAQLIQLERKYIGKRNINKCIESEMRTKTNKQISDKRRELAKKKLVVTGDREEVTEVEDIRVNILEIPPPRERIFPLKGHPEVDLVEKICKRGKQSREGREIINSLGEIEGLLKEDLTKALGWAMLEKLCYSLVEGKDPRNESQIELRNKGKGKMRKEGRRKQFNAIRRYATKKAKYKFYQQLFDKDRRRLTRIIMGEPDKAKCAIPMKEIEEYYVNILGTIGHGNMIGWPSSTENADNDILMSPISVDEIRIALREIRKDSAPGPDKVKVSNLWDIFNLDSLILTKIFNIWFLNRQVPDEFKKNRTILIPKTQDEEEMKKLTSWRPLTIGSVWIRIYTKILAKRLVETVKICSRQKGFISAPGCEENIAILDNLIKGAKRNGNEIAIVFVDLAKAFDSVGHGHIIAGLRRFGIDEHFIDIIRDLYDNCTTRVWVGNEATESILIRRGVKQGDPLSPILFNIAMDPLLTRLEVEGSGFYVKGNSVTSLAFADDVAILSSSYKGMIKNLGILEEFCKNTNLSVNVKKTKGFHILTKHKTYVVNPKDNWQIGSEEIEYVQPGDFEKYLGARIDPWIGVGGPVLKEKLKDWSENLIKAPLKPAQKILILQTYILPKLFYNLLLIEPPFNLLDDLDVLVRKIVKEILHLPQCTTDGIFYSRGRDGGLALTKFSVQMPNMLIRKWRRHIVSRDDWMDLSYLYAGENLVDKILSFSAITSHPKKWREEEFLRWSELRCQGIGIKYFKNDLISNSIFRNSSKVKSSAYIAALQLRANIYPTRETLARGRGGVNALCRWCGKVRETVPHISGQCYKTKNARIKRHNRVVSAVVDKVGKLGWKAMIEPHLRNSKGELRKPDIIFIKGDTAVVVDVTVRWEDNAGSLEQAHSEKVAYYLELEEEIKNLTGGKNIHFFGFVLGARGKWSEGNNDLLQLLGMDRSKNFKESICRLVLYSTIGMMAIFSDR

SEQ ID NO: 9374 - protein, 763 aa, Mauremys reevesii
MGEPDKVNCEIPMEEIERYFMDILGNIGHGNIVGWPSSMERADNDLLMSPISVDEVRSVLKEIKKDSAPGLDKVKISDLRDIFNIDSLIITRIFNIWFLNGQVPDVFKENRTILIPKTDDVEELRKLTSWRPLTIGSMWVRVYTKILAKRLSEAVRICDRQKGFVAAPGCEENIAILDNLIKGAKRKGEEIAVVFIDLAKAFDSIGHGHIIAGLKRFDVDERFIGIVRDLYFNCTTRVWVGDKATESILIRRGVKQGDPLSPILFNIALDPFLTRLELEGSGFNVQGQSIKSLAFADDVAILSDSYLGMIKNLSILQNFCRNTNLRINVGKTKGFHIWPKHKTYLVNPRSRWMIGSEEIQYVLPGEFEKYLGARIDSWIGVGGSLLKEKLVKWSESLSRAPLKPAQKLLILQTYVLPRLFYNLLLMEPPFCILNDLDVLVRTIVKEILHLPRCTTDGLFYSRRRDGGLALTKFSVQIPNMLLRKWRRHIVSKDSWVDLSYVYAGENLVDKIIVFSAATPHPRKWREEEFLRWTELRCQGIGVKYFRNDVISNSIFRNSDKVKSSAYIAALQMRANIYPTRETLARGRGGVTALCRWCGKVKETIPHISGQCYKTKEMRIKRHNRVVSVLVDRVVKVGWKAVVEPHLRNDKGELRKPDIVFTKGDTAVVVNVTVRWEDNDGSLEQAHRQKVTYYFELENKIKELTGVNNIHFFGFVVGVRGKWSDGNDELLQILGIDRGKNFKESVSRLVLYSTIDMLAVFSDR

SEQ ID NO: 9375 - protein, 1241 aa, Chrysemys picta
MEKSNLYFYTGLALDRVNNAPAVGFDAPADSVKYIRGVIRVAGPMDKMVWTIMKSHENESENQVLPVEHGEEVEENVCDDHGEEILSILPMVFTRDTFNDLTMDSFNPDFKYLSTFDDPYVRESSTDFNRDRNKDLNSIGSNINISESSSWKDGVFYLEYPVDSFNCPICPQILPTFGKWAKHINVVHKSKAIRVVCSKCGKSSQYHNIACHYPKCIPKKADTPMKSHTCSVCGLGFHTRSGLSQHCRHRHPAVRNEQRKEDMAAKSKIKEGSTRSRIWTKDEVAQLIQLERKYIGKRNINKCIESEMRTKTNKQISDKRRELAKKKLVVTGDREEVTEVEDIRVNILEIPPPRERIFPLKGHPEVDLVEKICKRGKQSREGREIINSLGEIEGLLKEDLTKALGWAMLEKLCYSLVEGQDPRNESQIELRNKGKGKIRKEGRRKQFNAIRRYATKKAKYKFYQQLFDKDRRRLTRIIMGEPDKAKCAIPMKEIEEYYVNILGTIGHGNMIGWPSSTENADNDILMSPISVDEIRIALTEIRKDSAPGPDKVKVSNLWDIFNLDSLILTKIFNIWFLNRQVPDEFKKNRTILISKTQDEEEMKKLTSWRPLTIGSVWIRIYTKILAKRLVETVKICSRQKGFISAPGCEENIAILDNLIKGAKRNGNEIAIVFVDLAKAFDSVGHGHIIAGLRRFGIDEHFIDIIRDLYDNCITRVWVGDEATESILIRRGVKQGDPLSPILFNIAMDPLLTRLEVEGSGFYVKGNSVTSLAFADDVAILSSSYKGMIKNLGILEEFCKNTNLSVNVKKTKGFHILTKHKTYVVNPKDNWQIGSEKIEYVQPGDFEKYLGARIDPWIGVGGPVLKEKLKDWSENLIKAPLKPAQKILILQTYILPKLFYNLLLIEPPFNLLDDLDVLVRKIVKEILHLPQCTTDGIFYSRGRDGGLALTKFSVQIPNMLIRKWRRHIVSRDDWMDLSYLYAGENLVDKILSFSAVTSHPKKWREEEFLRWSELRCQGIGIKYFKNDLISNSIFRNSSKVKSSAYIAALQLRANIYPTRETLARGRGGVNALCRWCGKVRETVPHISGQCYKTKNARIKRHNRVVSAVVDKVGKLGWKAMIEPHLRNSKGELRKPDIIFIKGDTAVVVDVTVRWEDNAGSLEQAHSEKVAYYLELEEEIKNLTGGKNIHFFGFVLGARGKWSEGNNDLLQLLGMDRSKNFKESICRLVLYSTIGMMAIFSDR

SEQ ID NO: 9376 - protein, 986 aa, Chrysemys picta
MKSHTCSVCGLGFHTRSGLSQHFRHRHPAVRNEQRKEDMAAKSKIKEGSTRSRIWTKDEVAQLIQLERKYIGKRNINKCIESEMRTKTNKQISDKRRELAKKKLVVTGDREEVTEVEDIRVNILEIPPPRERIFPLKGHPEVDLVEKICKRGKQSREGREIINSLGEIEGLLKEDLTKALGWAMLEKLCYSLVEGKDPRNESQIELRNKGKGKMRKEGRRKQFNAIRRYATKKAKYKFYQQLFDKDRRRLTRIIMGETDKAKCAIPMKEIEEYYVNILGTIGHGNMIGWPSSTENADNDILMSPISVDEIRIALREIRKDSAPGPDKVKVSNLWDIFNLDSLILTKIFNIWFLNRQVPDEFKKNRTILIPKTHDEEEMKKLTSWRPLTIGSVWIRIYTKILAKRLVETVKICSRQKGFISAPGCEENIAILDNLIKGAKRNGNEIAIVFVDLAKAFDSVGHGHIIAGLRRFGIDEHFIDIIRDLYDNCTTRVWVGDEATESILIRRGVKQGDPLSPILFNIAMDPLLTRLEVEGSGFYVKGNSVTSLAFADDVAILSSSYKGMIKNLGILEEFCKNTNLSVNVKKTKGFHILTKHKTYVVNPKDNWQIGSEEIEYVQPGDFEKYLGARIDPWIGVGGPVLKEKLKDWSENLIKAPLKPAPKILILQTYILPKLFYNLLLIEPPFNLLDDLDVLVRKIVKEILHLPQCTTDGIFYSRGRDGGLALTKFSVQIPNMLIRKWRRHIVSRDDWMDLSYLYAGENLVDKILLFSAVTSHPKKWREEEFLRWSELRCQGVGIKYFKNDLISNSIFRNSSKVKSSAYIAALQLRANIYPTRETLARGRGGVNALCRWCGKVRETVPHISGQCYKTKNARIKRHNRVVSAVVDKVGKLGWKAMIEPHLRNSKGELRKPDIIFIKGDTAVVVDVTVRWEDNAGSLEQAHSEKVAYYLELEEEIKNLTGGKNIHFFGFVLGARGKWSEGNNDLLKF

SEQ ID NO: 9377 - protein, 1241 aa, Chrysemys picta
MEKSNLYFYTGLALDRVNNAPAVGFDAPADSVKYIRGVIRVAGPMDKMVWTIMKSHENESENQVLPVEHGEEVEENVCGDHGEEILSILPMVFTRDTFNDLTMDSFNPGFKYLSTFDDPYVRESSTDFNRDRNKDLNSIGSNINILESSSWKDGVFYLEYPVDSFNCPICPQILPTFGKWAKHINVVHKSKAIRVVCSKCGKSSQYHNIACHYPKCIPKKADTPMKSHTCSVCGLGFHTRSGLSQHCRHRHPAVRNEQRKEDMAAKSKIKEGSTRSRIWTKDEVAQLIQLERKYIGKRNINKCIESEMRTKTNKQISDKRRELAKKKLVVTGDREEVTEVEDIRVNILEIPPPRERIFPLKGHPEVDLVEKICKRGKQSREGREIINSLGEIEGLLKEDLTKALGWAMLEKLCYSLVEGQDPRNESQIELRNKGKGKIRKEGRRKQFNAIRRYATKKAKYKFYQQLFDKDRRRLTRIIMGEPDKAKCAIPMKEIEEYYVNILGTIGHGNMIGWPSSTENADNDILMSPISVDEIRIALTEIRKDSAPGPDKVKVSNLWDIFNLDSLILTKIFNIWFLNRQVPDEFKKNRTILIPKTQDEEEMKKLTSWRPLTIGSVWIRIYTKILAKRLVETVKICSRQKGFISAPGCEENIAILDNLIKGAKRNGNEIAIVFVDLAKAFDSVGHGHIIAGLRRFGIDEHFIDIIRDLYDNCTTRVWVGDEATESILIRRGVKQGDPLSPILFNIAMDPLLTRLEVEGSGFYVKGNSVTSLAFADDVAILSSSYKGMIKNLGILEEFCKNTNLSVNVKKTKGFHILTKHKTYVVNPKDNWQIGSEKIEYVQPGDFEKYLGARIDPWIGVGGPVLKEKLKDWSENLIKASLKPAQKILILQTYILPKLFYNLLLIEPPFNLLDDLDVLVRKIVKEILHLPQCTTDGIFYSRGRDGGLALTKFSVQIPNMLIRKWRRHIVSRDDWMDLSYLYAGENLVDKILSFSAVTSHPKKWREEEFLRWSELRCQGIGIKYFKNDLISNSIFRNSSKVKSSAYIAALQLRANIYPTRETLARGRGGVNALCRWCGKVRETVPHISGQCYKTKNARIKRHNRVVSAVVDKVGKLGWKAMIEPHLRNSKGELRKLDIIFIKGDTAVVVDVTVRWEDNAGSLEQAHSEKVAYYLELEEEIKNLTGGKNIHFFGFVLGARGKWSEGNNDLLQLLGMDRSKNFKESICRLVLYSTIGMMAIFSDR

SEQ ID NO: 9378 - protein, 1241 aa, Chrysemys picta
MEKSNLYFYTGLALDRVNNAPAVGFDAPADSVKYIRGVIRVAGPMDKMVWTIMKSHENESENQVLPVEHGEEVEENVCDDHGEEILSILPIVFTRDTFNDLTMDSFNPDFKYLSTFDDPYVRESSTDFNRDRNKDLNSIGSNINILESSSWKDGVFYLEYPVDSFNCPICPQILPTFGKWAKHINVVHKSKAIRVVCSKCGKSSQYHNIACHYPKCIPKKADTPMKSHTCSVCGLGFHTRSGLSQHCRHRHPAVRNEQRKEDMAAKSKIKEGSTRSRIWTKDEVAQLIQLERKYIGKRNINKCIESEMRTKTNKQISDKRQELAKKKLVVTGDREEVTEVEDIRVNILEIPPPRERIFPLKGHPEVDLVEKICKRGKQSREGREIINSLGEIEGLLKEDLTKALGWSMLEKLCYSLVEGQDPRNESQIELRNKGKGKIRKEGRRKQFNAIRRYATKKAKYKFYQQLFDKDRRRLTRIIMGEPDKAKCAIPMKEIEEYYVNILGTIGHGNMIGWPSSTENADNDILMSPISVDEIRIALREIRKDSAPGPDKVKVSNLWDIFNLDSLILTKIFNIWFLNRQVPDEFKKNRTILIPKTQDEEEMKKLTSWRPLTIGSVWIRIYTKILAKRLVETVKICSRQKGFISAPGCEENIAILDNLIKGAKRNGNEIAIVFVDLAKAFDSVGHGHIIAGLRRFGIDEHFIDIIRDLYDNCTTRVWVGDEATESILIRRGVKQGDPLSPILFNIAMDPLLTRLEVEGSGFYVKGNSFTSLAFADDVAILSSSYKGMIKNLGILEEFCKNTNLSVNVKKTKGFHILTKHKTYVVNPKDNWQIGSEKIEYVQPGDFEKYLGARIDPWIGVGGLVLKEKLKDWSENLIKAPLKPAPKILILQTYILPKLFYNLLLIEPPFNLLDDLDVLVRKIVKEILHLPQCTTDGIFYSRGRDGGLALTKFSVQIPNMLIRKWRRHIVSRDDWMDLSYLYAGENLVDKILSFSAVTSHPKKWREEEFLRWSELRCQGIGIKYFKNDLISNSIFRNSSKVKLSAYIAALQLRANIYPTRETLARGRGGVNALCRWCGKVRETVPHISGQCYKTKNARIKRHNRVVSAVVDKVGKLGWKAMIEPHLRNSKGELRKPDIIFIKGDTAVVVDVTVRWEDNAGSLEQAHSEKVAYYLELEEEIKNLTGGKNIHFFGFVLGARGKWSEGNNDLLQLLGMDRSKNFKESIRRLVLYSTIGMMAIFSDR

SEQ ID NO: 9379 - protein, 1260 aa, Stictonetta naevosa
MEKSNLYFYTGLALDRVNNAPAVGFDAPADSVKYIRGVIRVAGPMDKMVWTIMKSHENESENQVLPVEHGEEVEENVCDDHGEEILSILPMVFTRDTFNDLTMDSFNPDFKYLSTFDDPYVRESGYLNAHLVNGSSLLNSFRPSTDFNRDRNKDLNSTGSNINILESSSWKDGVFYLEYPVDSFNCPICPQILPTFGKWAKHINVVHKSKAIRVVCSKCGKSSQYHNIACHYPKCIPKKADTPMKSHTCSVCGLGFHTRSGLSQHCRHRHPAVRNEQRKEDMAAKSKIKEGSTRSRIWTKDEVAQLIQLERKYIGKRNINKCIESEMRTKTNKQISDKRRELAKKKLVVTGDREEVTEVEDIRVNILEIPPPRERIFPLKGHPEVDLVEKICKRGKQSREGREIINSLGEIEGLLKEDLTKALGWAMLEKLCYSLVEGQDPRNESQIELRNKGKGKIRKEGRRKQFNAIRRYATKKAKYKFYQQLFDKDRRRLTRIIMGEPDKAKCAIPMKEIEEYYVNILGTIGHGNMIGWPSSTENADNDILMSPISVDEIRIALTEIRKDSAPGPDKVKVSNLWDIFNLDSLILTKIFNIWFLNRQVPDEFKKNRTILIPKTQDEEEMKKLTSWRPLTIGSVWIRIYTKILAKRLVETVKICSRQKGFISAPGCEENIAILDNLIKGAKRNGNEIAIVFVDLAKAFDSVGHGHIIAGLRRFGIDEHFIDIIRDLYDNCTTRVWVGDEATESILIRRGVKQGDPLSPILFNIAMDPLLTRLEVEGSGFYVKGNSVTSLAFADDVAILSSSYKGMIKNLGILEEFCKNTNLSVNVKKTKGFHILTKHKTYVVNPKDNWQIGSEKIEYVQPGDFEKYLGARIDPWIGVGGPVLKEKLKDWSENLIKAPLKPAQKILILQTYILPKLFYNLLLIEPPFNLLDDLDVLVRKIVKEILHLPQCTTDGIFYSRGRDGGLALTKFSVQIPNMLIRKWRRHIVSRDDWMDLSYLYAGENLVDKILSFSAVTSHPKKWREEEFLRWSELRCQGIGIKYFKNDLISNSIFRNSSKVKSSAYIAALQLRANIYPTRETLARGRGGVNALCRWCGKVRETVPHISGQCYKTKNARIKRHNRVVSAVVDKVGKLGWKAMIEPHLRNSKGELRKPDIIFIKGDTAVVVDVTVRWEDNAGSLEQAHSEKVAYYLELEEEIKNLTGGKNIHFFGFVLGARGKWSEGNNDLLQLLGMDRSKNFKESICRLVLYSTIGMMAIFSDR

SEQ ID NO: 9380 - protein, 1260 aa, Terrapene carolina
MEKSNLYFYTGLALDRVNNAPAVGFDAPADSVKYIRGVIRVAGPMDKMVWTIMKSHEHKSENQVLPVEHGEEVEENVCDDHGEEILSILPMVFTRDTFNDLTMESFNPDFKYLSTFDDPYVSESGYLNAHLVNGSSLLNSFRPSTDFNRDRNKDLNSTGSNINILESSSWKDGVFYLEYPVDSFNCPICPQILPTFGKWAKHINVVHKSKAIRVVCSKCGKSSQYHNIACHYPKCIPKKADTPMKSHTCSVCGLGFHTRSGLSQHCRHRHPAVRNEQRKEDMAAKSKIKEGSTRSRIWTKDEVAQLIQLERKYIGERNINKCIESEMRTKTNKQISDKRRELAKKKLVVTGDREDVTEVEDIRVNILEIPPPRERIFPLKGHPEVDLVEKICKRGKQSREGREIINSLGEIEGLLKEDLTKALGWAMLEKLCYSLVEGKDPRNESQIELRNKGKGKMRKEGRRKQFNAIRRYATKKAKYKFYQQLFDKDRRRLTRIIMGEPDKAKCAIPMKEIEEYYVNILGTIGHGNMIGWPSSTENADNDILMSPISVDEIRIALREIRKDSAPGPDKVKVSNLWDIFNLDSLILTKNFNIWFLNRQVPDEFKKNRTILIPKTQDEEEMKKLTSWRPLTIGSVWIRIYTKILAKRLVETVKICSRQKGFISAPGCEENIAILDNLIKGAKRNGNEIAIVFVDLAKAFDSVGHGHIIAGLRRFGIDEHFIDIIRDLYDNCTTRVWVGDEATESILIRRGVKQGDPLSPILFNIAMDPLLTRLEVEGSGFYVKGNGVTSLAFADDVAILSSSYKGMIKNLSILEEFCKNTNLSVNVKKTKGFHILTKHKTYVVNPKDNWQIGSEEIEYVQPGDFEKYLGARIDPWIGVGGPVLKEKLKDWSENLIKAPLKPAQKILILQTYILPKLFYNLLLIEPPFNLLDDLDVLVRKIVKEILHLPQCTTDGIFYSRGRDGGLALTKFSVQIPNMLIRKWRRHIVSRDDWMDLSYLYAGENLVDKILSFSAVTSHPKKWREEEFLRWSELRCQGIGIKYFKNDLISNSIFRNSSKVKSSAYIAALQLRANIYPTRETLARGRGGVNALCRWCGKVRETVPHISGQCYKTKNARIKRHNRVVSAVVDKVGKLGWKAMIEPHLRNSKGELRKPDIIFIKGDTAVVVDVTVRWEDNAGSLEQAHSEKVAYYLELREEIKNLTGGKNIHFFGFVLGARGKWSEGNNDLLQLLGMDRSKNFKESICRLVLYSTIGMMAIFSDR

SEQ ID NO: 9381 - protein, 1146 aa, Terrapene carolina
MEKSNLYFYTGLALDRVNNAPAVGFDAPADSVKYIRGVIRVAGPMDKMVWTIMKSHEHESENQVLPVEHGEEVEENVCDDHGEEILSILPMVFTRDTFNDLTMESFNPDFKYLSTFDDPYVSESGYLNAHLVNGSSLLNSFRPSTDFNRDRNKDLNSTGSNINILESSSWKDGVFYLEYPVDSFNCPICPQILPTFGKWAKHINVVHKSKAIRVVCSKCGKSSQYHNIACHYPKCIPKKADTPMKSHTCSVCGLGFHTRSGLSQHCRHRHPAVRNEQRKEDMAAKSKIKEGSTRSRIWTKDEVAQLIQLERKYIGKRNINKCIESEMRTKTNKQISDKRRELAKKKLVVTGDREEVTEVEDIRVNILEIPPPRERIFPLKGHPEVDLVEKICKRGKQSREGREIINSLGEIEGLLKEDLTKALGWAMLEKVCYSLVEGKDPRNESQIELRNKGKGKMRKEGRRKQFNAIRRYATKKAKYKFYQQLFDKDRRRLTRIIMGEPDKAKCAIPMKEIEEYYVNILGTIGHGNMIGWPSSTENADNDILMSPISVDEIRIALREIRKDSAPGPDKVKVSNLWDIFNLDSLILTKIFNIWFLNRQVPDEFKKNRTILIPKTQDEEEMKKLTSWRPLTIGSVWIRIYTKILAKRLVETVKICSRQKGFISAPGCEENIAILDNLIKGAKRNGNEIAIVFVDLAKAFDSVGHGHIIAGLRRFGIDEHFIDIIRDLYDNCTTRVWVGDEATESILIRRGVKQGDPLSPILFNIAMDPLLTRLEVEGSGFYVKGNGVTSLAFADDVAILSSSYKGMIKNLGILEEFCKNTNLSVNVKKTKGFHILTKHKTYVVNPKDNWQIGSEEIEYVQPGDFEKYLGARIDPWIGVGGPVLKEKLKDWSENLIKAPLKPAQKILILQTYILPKLFYNLLLIEPPFNLLDDLDVLVRKIVKEILHLPQCITDGIFYSRGRDGGLALTKFSVQIPNMLIRKWRRHIVSRDDWMDLSYLYAGENLVDKILSFSAVTSHPKKWREEEFLRWSELRCQGIGIKYFKNDLISNSIFRNSSKVKSSAYIAALQLRANIYPTRETLARGRGGVNALCRWCGKVRETVPHISGQCYKTKNARIKRHNRVVSAVVDKVGKLGWKAMIEPHLRNS

SEQ ID NO: 9382 - protein, 1260 aa, Terrapene carolina
MEKSNLYFYTGLALDRVNNAPAVGFDAPADSVKYIRGVIRVAGPMDKMVWTIMKSHEHESENQVLPVEHGEEVEENVCDDHGEEILSILPMVFTRDTFNDLTMESFNPDFKYLSTFDDPYVSESGYLNAHLVNGSSLLNSFRPSTDFNRDRNKDLNSTGSNINILESSSWKDGVFYLEYPVDSFNCPICPQILPTFGKWAKHINVVHKSKAIRVVCSKCGKSSQYHNIACHYPKCIPKKADTPMKSHTCSVCGLGFHTRSGLSQHCRHRHPAVRNEQRKEDMAAKSKIKEGSTRSRIWTKDEVAQLIQLERKYIGKRNINKCIESEMRTKTNKQISDKRRELAKKKLVVTGDREEVTEVEDIRVNILEIPPPRERIFPLKGHPEVDLVEKICKRGKQSREGREIINSLGEIEGLLKEDLTKALGWAMLEKVCYSLVEGKDPRNESQIELRNKGKGKMRKEGRRKQFNAIRRYATKKAKYKFYQQLFDKDRRRLTRIIMGEPDKAKCAIPMKEIEEYYVNILGTIGHGNMIGWPSSTENADNDILMSPISVDEIRIALREIRKDSAPGPDKVKVSNLWDIFNLDSLILTKIFNIWFLNRQVPDEFKKNRTILIPKTQDEEEMKKLTSWRPLTIGSVWIRIYTKILAKRLVETVKICSRQKGFISAPGCEENIAILDNLIKGAKRNGNEIAIVFVDLAKAFDSVGHGHIIAGLRRFGIDEHFIDIIRDLYDNCTTRVWVGDEATESILIRRGVKQGDPLSPILFNIAMDPLLTRLEVEGSGFYVKGNGVTSLAFADDVAILSSSYKGMIKNLGILEEFCKNTNLSVNVKKTKGFHILTKHKTYVVNPKDNWQIGSEEIEYVQPGDFEKYLGARIDPWIGVGGPVLKEKLKDWSENLIKAPLKPAQKILILQTYILPKLFYNLLLIEPPFNLLDDLDVLVRKIVKEILHLPQCTTDGIFYSRGRDGGLALTKFSVQIPNMLIRKWRRHIVSRDDWMDLSYLYVGENLVDKILSFSAVTSHPKKWREEEFLRWSELRCQGIGIKYFKNDLISNSIFRNSTKVKSSAYIAALQLRANIYPTRETLARGRGGVNALCRWCGKVRETVPHISGQCYKTKNARIKRHNRVVSAVVDKVGKLGWKAMIEPHLRNSKGELRKPDIIFIKGDTAVVVDVTVRWEDNAGSLEQAHSEKVAYYLELEEEIKNLTGGKNIHFFGFVLGARGKWSEGNNDLSQLLGMDRSKNFKESICRLVLYSTIGMMAIFSDR

SEQ ID NO: 9383 - protein, 1144 aa, Actinemys marmorata
MIHMLGNLNAHLVNGSSLLNSFRPSTDFNRDRNKDLNSTGSNINILESSSWKDGGFYLEYPVDSFNCPICPICPQILPTFGKWAKHINVVHKSKAIRVVCSKCGKSSQYHTIACHYPKCIPKKADTPMKSHTCSVCGLGFHTRSGLSQHCRHRHPAVRNEQRKEDMAAKSKIKEGSTRSRIWTKDEVAQLIQLERKYIGKRNINKCIESEMRTKTNKQISDKRRELAKKKLVVTGDREEVTEVEDIRVNILEIPPPRERIFPLKGHPEVDLVEKICKRGKQSREGREIINSLGEIEGLLKEDLTKALGWAMLEKLCYSLVEGKDPRNESQIELRNKGKGKMRKEGRRKQFNAIRRYATKKAKYKFYQQLFDKDRRRLTRIIMGEPDKAKCAIPMKEIEEYYVNILGTIGHGNMIGWPSSTENADNDILMSPISVDEIRIALREIRKDSAPGPDKVKVSNLWDIFNLDSLILTKNFNIWFLNRQVPDEFKKNRTILIPKTQDEEEMKKLTSWRPLTIGSVWIRIYTKILAKRLVETVKICSRQKGFISAPGCEENIAILDNLIKGAKRNGNEIAIVFVDLAKAFDSVGHGHIIAGLRRFDIDEHFIDIIRDLYDNCTTRVWVGDEATESILIRRGVKQGDPLSPILFNIAMDPLLTRLEVEGSGFYVKGNSVTSLAFADDVAILSSSYKGMIKNLGILEEFCKNTNLSVNVKKTKGFHILTKHKTYVVNPKDNWQIGSEEIEYVQPGDFEKYLGARIDPWIGVGGPVLKEKLKDWNENLIKAPLKPAQKILILQTYILPKLFYNLLLIEPPFNLLDDLDVLVRKIVKEILHLPQCTTDGIFYSRGRDGGLALTKFSVQIPNMLIRKWRRHIVSRDDWMDLSYLYAGENLVDKILSFSAVTSHPKKWREEEFLRWSELRCQGIGIKYFLNDLISNLIFRNSSKVKSSAYIAALQLRANIYPTRETLARGRGGVNALCRWCGKVRETVPHISGQCYKTKNARIKRHNRVVSAVVDKVGKLGWKAMIEPHLRNSKGELRKPDIIFIKGDTAVVVDVTVRWEDNAGSLEQAHSEKVAYYLELEEEIKNLTGGKNIHFFGFVLGARGKWSEGNNDLLQLLGMDRSKNFKESICRLVLYSTIGMMAIFSDR

SEQ ID NO: 9384 - protein, 1260 aa, Actinemys marmorata
MEKSNLYFYTGLALDRVNNAPAVGFDAPADSVKYIRGVIRVAGPMDKMVWTIMKSHEHESENQVLPVEHGEEVEENVCDDHGEEILSILPMVFTRDTFNDLTMESFNPDFKYLSTFDDPYVRESGYLNAHLVNGSSLLNSFRPSTDFNRDRNKDLNSTGSNINILESSSWKDGVFYLEYPVDSFNCPICPQILPTFGKWAKHINVVHKSKAIRVVCSKCGKSSQYHNIACHYPKCIPKKADTPMKSHTCSVCGLGFHTRSGLSQHCRHRHPAVRNEQRKEDMAAKSKIKEGSTRSRIWTKDEVAQLIQLGRKYIGKRNINKCIESEMRTKTNKQISDKRRELAKKKLVVTGDREEVTEVEDIRVNILEIPPPRERIFPLKGHPEVDLVEKICKRGKQSREGREIINSLGEIEGLLKEDLTKALGWAMLEKLCYSLVEGKDPRNESQIELRNKGKGKMRKEGRRKQFNAIRRYATKKAKYKFYQQLFDKDRRRLTRIIMGEPDKAKCAIPMKEIEEYYVNILGTIGHGNMIGWPSSTENADNDILMSPISVDEIRIALREIRKDSAPGPDKAKVSNLWDIFNLDSLILTKIFNIWFLNRQVPDEFKKNRTILIPKTQDEEEMKKLTSWRPLTIGSVWIRIYTKILAKRLVETVKICSRQKGFISAPGCEENIAILDNLIKGAKRNGNEIAIVFVDLAKAFDSVGHGHIIAGLRRFGIDEHFIDIIRDLYDNCTTRVWVGDEATESILIRRGVKQGDPLSPILFNIAMDPLLTRLEVEGSGFYVKGNSVTSLAFADDVAILSSSYKGMIKNLGILEEFCKNTNLSVNVKKTKGFHILTKHKTYVVNPKDNWQIGSEEIEYVQPGDFEKYLGARIDPWIGVGGPVLKEKLKDWSENLIKAPLKPAQKILILQTYILPKLFYNLLLIEPPFNLLDDLDVLVRKIVKEILHLPQCTTDGIFYSRGRDGGLALTKFSVQIPNMLIRKWRRHIVSRDDWMDLSYLYAGENLVDKILSFSAVTSHPKKWREEEFLRWSELRCQGIGIKYFKNDLISNSIFRNSSKVKSSAYIAALQLRANIYPTRETLARGRGGVNALCRWCGKVRETVPHISGQCYKTKNARIKRHNRVVSAVVDKVGKLGWKAMIEPHLRNSKGELRKPDIIFIKGDTAVVVDVTVRWEDNAGSLEQAHSEKVAYYLELEEEIKNLTGGKNIHFFGFVLGARGKWSEGNNDLLQLLGMDRSKNFKESICRLVLYSTIGMMAIFSDR

SEQ ID NO: 9385 - protein, 905 aa, Mauremys reevesii
MEVEMIADSILEVPPPRERILPLRRDPEVDPRGLVSRWGKQSREGKDILNGLRVVEELLQEDSTKGFGWAELERICISLVEERKLGEDEQGEDGIEDRRRKGIGNGRKKQSNALRRYATHKAKYRFYQQLFDKDRRRLARIIMGEPDKVNCEIPMEEIERYFMDILGNIGHGNIVGWPSSMERADNDLLMSPISVDEVRSVLKEIKKDSAPGLDKVKISDLRDIFNIDSLIITRIFNIWFLNGQVPDVFKENRTILIPKTDDVEELRKLTSWRPLTIGSVWVRLYTKILAKRLSEAVRICDRQKGFIAAPGCEENIAILDNLIKGAKRKGDEIAIVFIDLAKAFDSVGHGHIIAGLKRFDVDERFIGIVRDLYFNCTTRVWVGDKFTESILIRRGVKQGDPLSPILFNIALDPFLTRLELEGSGFYVQGQSITSLAFADDVAILIGSYLGMIKNLSILQNFCRNTNLRINVSKTKGFHIWPKHKTYLVNPKSRWMIGSEEIQYVLPGEFEKYLGARIDSWIGVGGSQLKEKLVKWSESLSRAPLKPAQKLLILQTYVLPRLFYNLLLMEPPFCILNDLDVLVRAIVKKILHLPQCTTDGLFYSRRRDGGLALTKFSVQIPNMLLRKWRRHIVSKDSWVDLSYVYAGENLVDKMIVFSAATPHPRKWREEEFLRWTELRCQGIGVKYFRNDVISNSIFRNSDKVKSSAYIAALQMRANIYPTRETLARGRGGVTALCRWCGKVKETIPHISGQCYKTKEMRIKRHNRVVSVLVDRVVKLGWKAVVEPHLRNDKGELRKPDIVFTKGDTAVVVNVTVRWEDNDGSLEQAHRQKVTYYFELENKIKELTGVNNIHFFGFVVGVRGKWSDGNDELLQILGIDRGKNFKESVSRLVLYSTIDMLAVFSDR

SEQ ID NO: 9386 - protein, 1260 aa, Chrysemys picta
MEKSNLYFYTGLALDRVNNAPAVGFDALADSVKYIRGVIRVAGPMDKMVWTIMKSHENESENQVLPVEHGEEVEENVCDDRGEEILSILPMVFTRDTFNDLTMDSFNPDFKYLSTFDDPYVRESGYLNAHLVNGSSLLNSFRPCTDFNRDRNKDLNSTGSNINILESSSWKDGFFYLEYPVDSFNCPICPQILPTFGKWAKHINVVHKSKAIRVVCSKCGKSSQYRNIACHYPKCIPKKVDTPMKSHTCSVCGLGFHTRSGLSQHCRHRHPAVRNEQRKEDMAAKSKIKEGSIRSRIWTKDEVAQLIQLERKYIGKRNINKFIESEMRTKTNKQISDKRRELAKKKLVVTGDREEVTEVKDIRVNILEIPPPRERIFPLKGHPEVDLVEKICKRGKQSREGREIINSLGEIEGLLKEDLTKALRWVMLEKLCYSLVEGKDPRNESQIELRNKGKGKMRKEGRRKQFNSSRRYATKKAKYKFYQQLFDKDRRRLTRIIMGEPDKAKCAIPMKEIEEYYVNILGTIGHGNTIGWPSSTENADNDILMSPISVDEIRKALREIRKDSAPGPDKVKVSNLWDIFNLDSLILTKNFNIWFLNRQVPDEFKKNRTILIPKTQDEEEMKKLTSWRPLTIGSVWIRIYTKILAKRLVETVKICSRQKGFISAPGCEENIAILDNLIKGAKRNGNEIAIVFVDLAKAFDSVGHGHIIAGLRRFGIDEHFIDIIRDLYDNCTTRVWVGDEATESILIRRGVKQGDPLSPILFNIAMDPLLTRLEVEGSGFYVKGNSVTSLAFADDVEILSSSYKGMIKNLGILEEFCKNTNLSVNVKKTKGFHILTKHKTYVVNPKDNWQIGSEEIEYVQPGDFEKYLGARIDPWIGVGGPVLKEKLKDWSENLIKAPLKPAQKILILQTYILPKLFYNLLLIDPPFNLLDDLDVLVRKIVKEILHLPQCTTDGIFYSRGRDGGLALTKFSVQIPNMLIRKWRRHIVSRDDWMDLSYLYAGENLVDKILLFSAVTSHPKKWREEEFLRWSELRCQGIGIKYFKNDLISNSIFRNSSKVKSSAYIAALQLRANIYPTRETLARGRGGVNALCRWCGKVRETVPHISGQCYKTKNARIKRHNRVVSAVVDKVGKLGWKAIIEPHLRNSKGELRKPDIIFIKGDTAVVVDVTVRWEDNAGSLEQAHSEKVAYYLELEEEIKNLTGGKNIHFFGFVLGARGKWSEGNNDLLQLLGMDRSKNFKESICRLVLYSTIGMMAIFSDR

SEQ ID NO: 9387 - protein, 1260 aa, Chrysemys picta
MEKSNLYFYTGLALDRVNNAPAVGFDAPADSVKYIRGVIRVAGPMDKMVWTIMKSHENESENQVLPVEHGEEVEENVCDDRGEEILSILPMVFTRDTFNDLTMDSFNPDFKYLSTFDDPYVRESGYLNAHLVNGSSLLNSFRPSTDFNRDRNKDLNSTGSNINILESSSWKDGVFYLEYPVDSFNCPICPQILPTFGKWAKHINVVHKSKAIRVVCSKCGKSSQYRNIACHYPKCIPKKADTPMKSHTCSVCGLGFHTRSGLSQHCRHRHPAVRNEQRKEDMAAKSKIKEGSIRSRIWTKDEVAQLIQLERKYIGKRNINKCIESEMRTKTNKQISDKRRELAKKKLVVTGDREEVTEVEDIRVNILEIPPPRERIFPLKGHPEVDLVEKICKRGKQSREGREIINSLGEIEGLLKEDLTKALGWAMLEKLCYSLVEGKDPRNESQIELRNKGKGKTRKEGRRKQFNASRRYATKKAKYKFYQQLFDKDRRRLTRIIMGEPDKAKCAIPMKEIEEYYVNILGTIGHGNMIGWPSSTENADNDILMSPISVDEIRIALREIRKDSAPGPDKVKVSNLWDIFNLDSLILTKNFNIWFLNRQVPDEFKKNRTILIPKTQDEEEMKKLTSWRPLTIGSVWIRIYTKILAKRLVETVKICSRQKGFISAPGCEENIAILDNLIKGAKRNGNEIAIVFVDLAKAFDSVGHGHIIAGLRRLGIDEHFIDIIRDLYDNCTTRVWVGDEATESILIRRGVKQGDPLSPILFNIAMDPLLTRLEVEGSGFYVKGNSVTSLAFADDVAILSSSYKGMIKNLGILEEFCKNTNLSVNVKKTKGFHILTKHKTYVVNPKDNWQIGSEEIEYVQPGDFEKYLGARIDPWIGVGGPVLKEKLKDWSENLIKAPLKPAPKILILQTYILPKLFYNLLLIEPPFNLLDDLDVLVRKIVKEILHLPQCTTDGIFYSRGRDGGLALTKFSVQIPNMLIRKWRRHIVSRDDWMDLSYLYAGENLVDKILLFSAVTSHPKKWREEEFLRWSELRCQGIGIKYFKNDLISNSIFRNSSKVKSSAYIAALQLRANIYPTRETLARGRGGVNALCRWCGKVRETVPHISGQCYKTKNARIKRHNRVVSAVVDKVGKLGWKAIIEPHLRNSKGELRKPDIIFIKGDTAVVVDVTVQWEDNAGSLEQAHSEKVAYYLELEEEIKNLTGGKNIHFFGFVLGARGKWSEGNNDLLQLLGMDRSKNFKESICRLVLYSTIGMMAIFSDR

SEQ ID NO: 9388 - protein, 1155 aa, Chrysemys picta
MEKSNLYFYTGLALDRVNNAPAVGFDAPADSVKYIRGVIRVAGPMDKMVWTIMKSHEHESENQVLPVEHGEEVEENVCDDHGEEILSILPMVFTRDTFNDLTMESFNPDFKYLSTFDDPYVRESGYLNAHLVNGSSLLNSFRPSTDFNRDRNKDLNSTGSNINILESSSWKDGVFYLEYPVDSFNCPICPQILPTFGKWAKHINVVHKSKAIRVVCSKCGKSSQYHNIACHYPKCIPKKADTPMKSHTCSVCGLGFHTRSGLSQHCRHRHPAVRNEQRKEDMAAKSKIKEGSTRSRIWTKDEVAQLIQLERKYIGKRNINKCIESEMRTKTNKQISDKRRELAKKKLVVTGDREEVTEVEDIRVNILEIPPPRERIFPLKGHPEVDLVEKICKRGKQSREGREIINSLGEIEGLLKEDLTKALGWAMLEKLCYSLVEGKDPRNESQIELRNKGNGKMRKEGRRKQFNAIRRYATKKAKYKFYQQLFDKDRRRLTRIIMGEPDKAKCAIPMKEIEEYYVNILGTIGHGNMIGWPSSTENADNDILMSPISVDEIRIALREIRKDSAPGPDKVKVSNLWDIFNLDSLILTKNFNIWFLNRQVPDEFKKNRTILIPKTQDEEEMKKLTSWRPLTIGSVWIRIYTKILAKRLVKTVKICSRQKGFISAPGCEENIAILDNLIKGAKRNGNEIAIVFIDLAKAFDSVGHGHIIAGLRRFGIDEHFIDIIRDLYDNCTTRVWVGDEATESILIRRGVKQGDPLSPILFNIAMDPLLTRLEVEGSGFYVKGNSVTSLAFADDVAILSSSYKGMIKNLGILEEFCKNTNLSVNVKKTKGFHILTKHKTYVVNPKDNWQIGSEEIEYVQPGDFEKYLGARIDPWIGVGGPVLKEKLKDWSENLIKAPLKPAQKILILQTYILPKLFYNLLLIEPPFNLLDDLDVLVRKIVKEILHLPQCTTDGIFYSRGRDGGLALTKFSVQIPNMLIRKWRRHIVSRDDWMDLSYLYAGENLVDKILSFSAVTSHPMKWREEEFLRWSELRCQGIGIKYFLNDLISNSIFRNSSKVKSSAYIAALQLRANIYPTRETLARGRGGVNALCRWCGKVRETVPHISGQCYKTKNARIKRHNRVVSAVVDKVGKLGWKAMIEPHLRNSKGELRKPVS

SEQ ID NO: 9389 - protein, 1017 aa, Chrysemys picta
MKSHTCSVCGLGFHTRSGLSQHCRHRHPAVRNEQRKEDMAAKSKIKEGSTRSRIWTKDEGAQLIQLERKYIGKRNINKCIESEMRTKTNKQISDKRREFAKKKLVVTGDREEVTEVEDIRVNILEIPPPRERIFPLKGHPEVDLVEKICKRGKQSREGREIINSLGEIEGLLKEDLTKALGWAMLEKLCYSLVEGKDPRNESQIELRNKGKGKMRKEGRRKQFNAIRRYATKKAKYKFYQQLFDKDRRRLTRIIMGEPDKAKCAIPMKEIEEYYVNILGTIGHSNMIGWPSSTENADNDILMSPISVDEIRIALREIRKDSAPGPDKVKVSNLWDIFNLDSLILTKNFNIWFLNRQVPDEFKKNRTILIPKTQDEEEMKKLTSWRPLTIGSLWIRIYTKILAKRLVETVKICSRQKGFISAPGCEENIAILDNLIKGAKRNGNEIAIVFVDLAKAFDSVGHGHIIAGLRRFGIDEHFIDIIRDLYDNCTTRVWVGDEATESILIRRGVKQGDPLSPILFNIAMDPLLTRLEVEGSGFYVKGNSVTSLAFADDVAILSSSYKGMIKNLGILEEFCKNTNLSVNVKKTKGFHILTKHKTYVVNPKDNWQIGSEEIEYVQPGDFEKYLGARIDPWIGVGGPVLKEKLKDWSENLIKAPLKLAPKILILQTYILPKLFYNLLLIEPPFNLLDDLDVLVRKIVKEILHLPQCTTDGIFYSRGRDGGLALTKFSVQIPNMLIRKWRRHIVSRDDWMDLSYLYAGENLVDKILSFSAVTSHPKKWREEEFLRWSELRCQGIGIKCFKNDLISNSIFRNSSKVKSSAYIAALQVRANIYPTRETLARGRGGVNALCRWCGKVRETVPHISGQCYKTKNARIKRHNRVVSAVVDKVGKLGWKAMIEPHLRNSKGELRKPDIIFIKGDTAVVVDVTVRWEDNAGSLEQAHSEKVAYYLELEEEIKNLTGGKNIHFFGFVLGARGKWSEGNNDLLQLLGMDRSKNFKESICRLVLYSTIGMMAIFSDR

SEQ ID NO: 9390 - protein, 1255 aa, Chelydra serpentina
MEKRKFYLHTGSALDRVNNAPAVGFDAPADSVKLIRGVVKVNGPMRKTGQYGPVQRMLCKSGDLPVEEVKGVEDELLEDYEGRKILSILPVLPMVFMNKNFRDFYSDNFNPDFEYLNTFEDPYFKETDHFINHETQNSEILRPVNNIDFNENLGKNVSEMSNSNMYKDGVFYLEYPVESFNCLICPQILASFGKWAKHINIVHKSKSIRVLCQKCGKSSQYHNIACHYPKCKPKESDTPVKSHSCSICGLAFHTKSGLSQHCRHKHPAIRNEERKLPKKLNKEIPVQGRIWTNEEIGQLQQLEEKYKGRRNINKCIESELKTKNNKQISDKRRELAKKKTVIEGEVEGERREVEKLRENILDNPPPRERIIPLKRHDKIDLIEEICQKGKQSKEGKEIVKSLVEIENLVKKDNNITLGWAMLEKLCSALIREDMDGKEKEVIISNKGKKGELRNKNIRKPSNAIRKYATKKAKFKLYQQLFEKDRRRLAQIIMGEPDNANCRIPIREIEEHYINILGKVGHGDATGWTALTEIADNDLLMSPISVEDVRVALKEIRKESAPGPDKIKVNDLWEILNLDSAILTKIFNLWFLIRQIPNNCKENRTVLIPKTQNEDELKDITSWRPITIGSVWLRLYTKILVKRLVNAIRICERQKGFIAAPGCEENITILNNLIKGEKRNRDEIAIVFIDLAKAFDSVGHGHILTGLRRLGIDNHFIEVIRDLYSECFTKVWVGDKSTESILIRKGVKQGDPLSPILFNIALDPLLTRLEMEGEGFYVQGNKITSLAFADDIAILSNTHKGMLKNLEILEDFCNNTNLRINIKKTKGFHILPKQKTYVVNPKCNWKIGNNEIDYIQPGEFEKYLGAKVDPWVGIRGEELKEKLKNWSEDLNKAPLKPVQKLLILQTYVLPRLFYNLLLIEPPFNLLNELDVLVRKCVKEILHLPQCTTDGLFYSKGRDGGLALTKFSIQIPNILINKWRRHIVSKDSWIDRSYIYIGENLVDKIIRMSAVVPHPKKWRDEEFRKWCELRCQGIGIKYFKNDIISNSMIKNSSKIKSSSFIAALQLRANIYPTRETLARGRIGANALCRWCGKGKETTPHISGQCYKTKDMRIKRHNRVVSALIDKVGKVGWKTLVEPHIRNERGELRKPDVVFVKNETAVVVDVTVRWEDNAGGLELAHREKVAYYSEIEKEIKILTGVNNIRFFGFVLGARGKWSDENDDLLKILGIEKSKNFKDRISRLVLYSTADMMAVFSDK

SEQ ID NO: 9391 - protein, 1260 aa, Terrapene carolina
MEKSNLYFYTGLALDRVNNAPAVGFDAPADSVKYIRGVIRVAGPMDKMVWTIMKSHEHESENQVLPVEHGEEVEENVCDDHGEEILSILPMVFTRDTFNDLTMESFNPDFKYLSTFDDPYVSESGYLNAHLVNGSSLLNSFRPSTDFNRDRNKDLNSTGSNINILESSSWKDGVFYLEYPVDSFNCPICPQILPTFGKWAKHINVVHKSKAIRVVCSKCGKSSQYHNIACHYPKCIPKKADTPMKSHTCSVCGLGFHTRSGLSQHCRHRHPAVRNEQRKEDMAAKSKIKEGSTRSRIWTKDEVAQLIQLERKYIGKRNINKCIESEMRTKTNKQISDKRRELAKKKLVVTGDREEVTEVEDIRVNILEIPPPRERIFPLKGHPEVDLVEKICKQGKQSREGREIINSLGEIEGLLKEDLTKALGWAMLEKLCYSLVEGKDPRNESQIELRNKRKGKMRKEGRRKQFNAIRRYATKKAKYKFYQQLFDKDRRRLTRIIMGEPDKAKCAIPMKEIEEYYVNILGTIGHGNMIGWPSSTENADNDILMSPISVDEIRIALREIRKDSAPGPDKVKVSNLWDIFNLDSLILTKIFNIWFLNRQVPDEFKKNRTILIPKTQDEEEMKKLTSWRPLTIGSVWIRIYTKILAKRLVETVKICSRQKGFISAPGCEENIAILDNLIKGAKRNGNEIAIVFVDLAKAFDSVGHGHIIAGLRRFGIDEHFIDIIRDLYDNCTTRVWVGDEATESILIRRGVKQGDPLSPILFNIAMDPLLTRLEVEGSGFYVKGNGVTSLAFADDVAILSSSYKGMIKNLGILEEFCKNTNLSVNVKKTKGFHILTKHKTYVVNPKDNWQIGSEEIEYVQPGDFEKYLGARIDPWIGVGGPVLKEKLKDWSENLIKAPLKPAQKILILQTYILPKLFYNLLLIEPPFNLLDDLDVLVRKIVKEILHLPQCTTDGIFYSRGRDGGLALTKFSVQIPNMLIRKWRRHIVSRDDWMDLSYLYAGENLVDKILSFSAVTSHPKKWREEEFLRWSELRCQGIGIKYFKNDLISNSIFRNSSKVKSSAYIAALQLRANIYPTRETLARGRGGVNALCRWCGKVRETVPHISGQCYKTKNARIKRHNRVVSAVVDKVGKLGWKAMIEPHLRNSKGELRKPDIIFIKGDTAVVVDVTVRWEDNAGSLEQAHSEKVAYYLELEEEIKNLTGGKNIHFFGFVLGARGKWSEGNNDLLQLLGMDRSKNFKESICRLVLYSTIGMMAIFSER

SEQ ID NO: 9392 - protein, 1260 aa, Terrapene carolina
MEKSNLYFYTGLALDRVNNAPAVGFDAPADSVKYIRGVIRVAGPMDKMVWTIMKSHEHESENQVLPVEHGEEVEENVCDDHGEEILSILPMVFTRDTFNDLTMESFNPDFKYLSTFDDPYVSESGYLNAHLVNGSSLLNSFRPSTDFNRDRNKDLNSTGSNINILESSSWKDGVFYLEYPVDSFNCPICPQILPTFGKWAKHINVVHKSKAIRVVCSKCGKSSQYHNIACHYPKCIPKKADTPMKSHTCSVCGLGFHTRSGLSQHCRHRHPAVRNEQRKEDMAAKSKIKEGSTRSRIWTKDEVAQLIQLERKYIGKRNINKCIESEMRTKTNKQISDKRRELAKKKLVVTGDREEVTEVEDIRVNILEIPPPRERIFPLKGHPEVDLVEKICKRGKQSREGREIINSLGEIEGLLKEDLTKALGWAMLEKVCYSLVEGKDPRNESQIELRNKGKGKMRKEGRRKQFNAIRRYATKKAKYKFYQQLFDKDRRRLTRIIMGEPDKAKCAIPMKEIEEYYVNILGTIGHGNMIGWPSSTENADNDILMSPISVDEIRIALREIRKDSAPGPDKVKVSNLWDIFNLDSLILTKIFNIWFLNRQVPDEFKKNRTILIPKTQDEEEMKKLTSWRPLTIGSVWIRIYTKILAKRLVETVKICSRQKGFISAPGCEENIAILDNLIKGAKRNGNEIAIVFVDLAKAFDSVGHGHIIAGLRRFGIDEHFIDIIRDLYDNCTTRVWVGDEATESILIRRGVKQGDPLSPILFNIAMDPLLTRLEVEGSGFYVKGNGVTSLAFADDVAILSSSYKGMIKNLGILEEFCKNTNLSVNVKKTKGFHILTKHKTYVVNPKNNWQIGSEEIEYVQPGDFEKYLGARIDPWIGVGGPVLKEKLKDWSENLIKAPLKPAQKVLILQTYILPKLFYNLLLIEPPFNLLDDLDVLVRKIVKEILHLPQCTTDGIFYSRGRDGGLALTKFSVQIPNMLIRKWRRHIVSRDDWMDLSYLYAGENLVDKILSFSAVTSHPKKWREEEFLRWSELRCQGIGIKYFKNDLISNSIFRNSTKVKSSAYIAALQLRANIYPTRETLARGRGGVNALCRWCGKVRETVPHISGQCYKTKNARIKRHNRVVSAVVDKVGKLGWKAMIEPHLRNSKGELRKPDIIFIKGDTAVVVDVTVRWEDNAGSLEQAHSEKVAYYLELEEEIKNLTGGKNIHFFGFVLGARGKWSEGNNDLLQLLGMDRSKNFKESICRLVLYSTIGMMAIFSDR

SEQ ID NO: 9393 - protein, 1262 aa, Actinemys marmorata
MEKSNLYFYTGLALDRVNNAPAVGFDAPADSVKYIKGVIRVAGPMDKMVWTIMKSHEHESENQVLPVEHGEEVEENVCDDHGDDHEEILSILPMVFTRDTFNDLTMESFNPDFKYLSTFDDPYVRESGYLNAHLVNGSSLLNSFRPSTDFNRDRNKDLNSTGSNINILESSSWKDGVFYLEYPVDSFNCPICPQILPTFGKWAKHINVVHKSKAIRVVCSKCGKSSQYHNLACHYPKCIPKKADTPMKSHTCSVCGLGFHTRSGLSQHCRHRHPAVRNEQRKEDMAAKSKIKEGSTRSRIWTKDEVAQLIQLERKYIGKRNINKCIESEMRTKTNKQISDKRRELAKKLVVTGDREEVTEVEDIRVNILEIPPPRERIFPLKGHPEVDLVEKICKRGKQSREGREIINSLGEIEGLLKEDLTKALGWAMLEKLCYSLVEGKDPRNESQIELRNKGKGKMRKEGRRKQFNAIRRYATKKAKYKFYQQLFDKDRRRLTRIIMGEPDKAKCAIPMKEIEEYYVNILGTIGHGNMIGWPSSTENADNDILMSPISVDEIRIALREIRKDSAPGPDKVKVSNLWDIFNLDSLILTKNFNIWFLNRQVPDEFKKNRTILIPKTQDEEEMKKLTSWRPLTIGSVWIRIYTKILAKRLVETVKICSRQKGFISAPGCEENIAILDNLIKGAKRNGNEIAIVFVDLAKAFDSVGHGHIIAGLRRFGIDEHFIDIIRDLYDNCTTRVWVGDEATESILIRRGVKQGDPLSPILFNIAMDPLLTRLEVEGSGFYVKGNSVTSLAFADDVAILSSSYKGMIKNLGILEEFCKNTNLSVNVKKTKGFHILTKHKTYVVNPKDNWQIGSEEIEYVQPGDFEKYLGARIDPWIGVGGPVLKEKLKDWSENLIKAPLKPAQKILILQTYILPKLFYNLLLIEPPFNLLDDLDVLVRKIVKEILHLPQCTTDGIFYSRGRDGGLALTKFSVQIPNMLIRKWRRHIVSRDDWMDLSYLYAGENLVDKILSFSAVTSHPKKWREEEFLRWSELRCQGIGIKYFKNDLISNSIFRNASKVKSSAYIAALQLRANIYPTRETLARGRGGVNALCRWCGKVQETVPHISGQCYKTKNARIKRHNRVVSAVVDKVGKLGWKAMIEPHLRNSKGELRKPDIIFIKGDTAVVVDVTVRWEDNAGSLEQAHSEKVAYYLELEEEIKNLTGGKNIHFFGFVLGARGKWSEGNNDLLQLLGMDRSKNFKESICRLVLYSTIGMMAIFSDR

SEQ ID NO: 9394 - protein, 1260 aa, Actinemys marmorata
MEKSNLYFYTGLALDRVNNAPAVGFDAPADSVKYIRGVIRVAGPMDKMVWTIMKSHEHKSENQVLPVEHGEEVEENVCDDHGEEILSILPMVFTRDTFNDLTMESFNPDFKYLSTFDDPYVRESGYLNAHLVNGSSLLNSFRPSTDFNRDRNKDLNSTGSNINILESSSWKDGVFYLEYPVDSFNCPICPQILPTFGKWAKHINVVHKSKAIRVVCSKCGKSSQYHNIACHYPKCIPKKADTPMKSHTCSVCGLGFYTRSGLSQHCRHRHPAVRNEQRKEDMAAKSKIKEGSTRSRIWTKDEVAQLIQLERKYIGKRNINKCIESEMRTKTNKQISDKRRELAKKKLVVTGDREEVTEVEDIRVNILEIPPPRERIFPLKGHPEVDLVEKICKRGKQSREGREIINSLGEIEGLLKEDLTKALGWAMLEKLCYSLVEGKDPRNESQIELRNKGKGKMRKEGRRKQFNAIRRYATKKAKYKFYQQLFDKDRRRLTRIIMGEPDKAKCAIPMKEIEEYYVNILGTIGHGNMIGWPSSTENADNDILMSPISVDEIRIALRKIRKDSAPGPDKVKVSNLWDIFNLDSLILTKNFNIWFLNRQVPDEFKKNRTILIPKTQDEEEMKKLTSWRPLTIGSVWIRIYTKILAKRLVETVKICSRQKGFISAPRCEENIAILDNLIKGAKRNGNEIAIVFVDLAKAFDSVGHGHIIAGLRRFGIDEHFIDIIRDLYDNCTTRVWVGDEATESILIRRGVKQGDPLFPILFNIAMDPLLTRLEVEGSGFYVKGNSVTSLAFADDVAILSSSYKGMIKNLGILEEFCKNTNLSVNVKKTKGFHILTKHKTYVVNPKDNWQIGSEEIEYVQPGDFEKYLGARIDPWIGVGGPVLKEKLKDWSENLIKAPLKPAQKILILQTYILPKLFYNLLLIEPPFNLLDDLDVLVRKIVKEILHLPQCTTDGIFYSRGRDGGLALTKFSVQIPNMLIRKWRRHIVSRDDWMDLSYLYAGENLVDKILSFSAVTSHPKKWREEEFLRWSELRCQGIGIKYFKNDLISNSIFRNSSKVKSSAYITALQLRANIYPTRETLARGRGGVNALCRWCGKVRETVPHISGQCYKTKNARIKRHNRVVSAVVDKVGKLGWKAMIEPHLRNSKGELRKPDTIFIKGDTAVVVDVTVRWEDNAGSLEQAHSEKVAYYLELEEEIKNLTGGKNIHFFGFVLGARGKWSEGNNYLLQLLGMDRSKNFKESICRLVLYSTIGMMAIFSDR

SEQ ID NO: 9395 - protein, 1241 aa, Chrysemys picta
MEKSNLYFYTGLALDRVNNAPAVGFDAPADSVKYIRGVIRVAGPMDKMVWTIMKSHENESENQVLPVEHGEEVEENVCDDHGEEILSILPMVFTRDTFNDLTMDNFNPDFKYLSTFDDPYVRESSTDFNRDRNKDLNSIGSNINILESSSWKDGVFYLEYPVDSFNCPICPQILPTFGKWAKHINVVHKSKAIRVVCSKCGKSSQYHNIACHYPKCIPKKADTPMKSHTCSVCGLGFHTRSGLSQHCRHRHPAVRNEQRKEDMAAKSKIKEGSTRSRIWTKDEVAQLIQLERKYIGKRNINKCIESEMRTKTNKQISDKRRELAKKKLVVTGDREEVTEVEDIRVNILEIPPPRERIFPLKGHPEVDLVEKICKRGKQSREGREIINSLGEIEGLLKEDLTKALGWAMLEKLCYSLVEGQDPRNESQIELRNKGKGKIRKEGRRKQFNAIRRYATKKAKYKFYQQLFDKDRRRLTRIIMGEPDKAKCAIPMKEIEEYYVNILGTIGHGNMIGWPSSTENADNDILMSPISVDEIRIALTEIRKDSAPGPDKVKVSNLWDIFNLDSLILTKIFNIWFLNRQVPDEFKKNRTILIPKTQDEEEMKKLTSWRPLTIGSVWIRIYTKILAKRLVETVKICSRQKGFISAPGCEENIAILDNLIKGAKRNGNEIAIVFVDLAKAFDSVGHGHIIAGLRRFGIDEHFIDIIRDLYDNCTTRVWVGDEATESILIRRGVKQGDPLSPILFNIAMDPLLTRLEVEGSGFYVKGNSVTSLAFADDVAILSSSYKGMIKNLGILEEFCKNTNLSVNVKKTKGFHILTKHKTYVVNPKDNWQIGSEKIEYVQPGDFEKYLGARIDPWIGVGGPVLKEKLKDWSENLIKAPLKPAQKILILQTYILPKLFYNLLLIEPPFNLLDDLDVLVRKIVKEILHLPQCTTDGIFYSRGRDGGLALTKFSVQIPNMLIRKWRRHIVSRDDWMDLSYLYAGENLVDKILSFSAVTSHPKKWREEEFLRWSELRCQGIGIKYFKNDLISNSIFRNSSKVKSSAYIAALQLRANIYPTRETLARGRGGVNALCRWCGKVRETVPHISGQCYKTKNARIKRHNRVVSAVVDKVGKLGWKAMIEPHLRNSKGELRKPDIIFIKGDTAVVVDVTVRWEDNAGSLEQAHSEKVAYYLELEEEIKNLTGGKNIHFFGFVLGARGKWSEGNNDLLQLLGMDRSKNFKESICRLVLYSTIGMMAIFSDR

SEQ ID NO: 9396 - protein, 1249 aa, Chrysemys picta
MEKSNLYFYTGLALDRVNNAPAVGFDAPADSVKYIRGVIRVAGPMDKMVWTIMKSHENESENQVLPVEHGEEVEENVCDDHGEEILSILPMVFTRDTFNDLTMYSFNPDFNYLSTFDDPYVRESGYLNAHLINGSSLLNSFRPSTDFNRDRNKDLNSTGSNINILESSSWKDGVFYLEYPVDSFNCPICPQILPTFGKWAKHINVVHKSKAIRVVCSKCGKSSQYRNIACHYPKCIPKKADTPMKSHTCSVCGLGFHTRSGLSQHCGHRHPAVRNEQRKEDMAAKSKIKEGSIRSRIWTKDEVAQLIQLERKYIGERNRNKCIESEMRTKTNKQISDKRRELAKKKLVVTGDREEVTEVEDIRVNILESLPPRERIFPLKGHPEVDLVEKICKRGKQSREGREIINSLGEIEGLLKEDLTKALGWAMLEKLCYSLVEGKDPRNESQIELRNKGKGKMRKEGRRKQFNASRRYATKKAKYKFYQQLFDKDRRRLTRIIMGEPDKAKCAIPMKEIEEYYVNILGIIGHGNMIGWPSSTENADNDILMSPISVDEIRIALREIRKDSAPGPDKVKVSNLWDIFNLDSLILTKNFNIWFLNRQVPDEFKKNRTILIPKTQDEEEMKKLTSWRPLTIGSVWIRIYTKICSRQKGFISTRGCEENIAILDNLIKGAKRNGNEIAIVFVDLAKAFDSVGHGHIIAGLRRFGIDEHFIDIIRDLYDNCTTRVWVGDEATESILIRRGVKQGDPLSPILFNIAMDPLLTRLEVEGSGFYVKGNSVTSLAFADDVAILSSSYKGMIKNLGILEEFCKNTNLSVNVKKTKGFHILTKHKTYVVNPKDNWQIGSEEIEYVQPGDFEKYLGARIDPWIGVGGQVLKEKLKDWSENLIKAPLKPAQKILILQTYILPKLFYNLLLIEPPFNLLDDLDVLVRKIVKEILHLPQCTTDGIFYSRGRDGGLALTKFSVQIPNMLIRKWRRHIVSRDDWMDLSYLYAGENLVDKILLFSAVTSHPKKWREEEFLRWSELRCQGIGIKYFKNDLISNSIFRNSSKVKSSAYIAALQLRANIYPTRETLARGRGGVNALCRWCGKVRETVPHISGQCYKTKNARIKRHNRVVSAVVDKVGKLGWKAIIEPHLRNSKGELRKPDIIFIKGDTAVVVDVTVRWEDNAGSLEQAHSEKVAYYLELEEEIKNLTGGKNIHFFGFVLGARGKWSEGNNDLLQLLGMDRSKKFKESICRFVLYSTIGMMAIFSDR

SEQ ID NO: 9397 - protein, 1241 aa, Chrysemys picta
MEKSNLYFYTGLALDRVNNAPAVGFDAPADSVKYIRGVIRVAGPMDKMVWTIMKSHENESENQVLPVEHGEEVEENVCDDHGEEILSILPMVFTRDTFNDLTMDSFNPDFKYLSTFDDPYVRESSTDFNRDRNKDLNSIGSNINILESSSWKDGVFYLEYPVDSFNCPICPQILPTFGKWAKHINVVHKSKAIRVVCSKCGKSSQYHNIACHYPKCIPKKADTPMKSHTCSVCGLGFHTRSGLSQHCRHRHPAVRNEQRKEDMAAKSKIKEGSTRSRIWTKDEVAQLIQLERKYIGKRNINTCIESEMRTKTNKQISDKRRELAKKKLVVTGDREEVTEVEDIRVNILEIPPPRERIFPLKGHPEVDLVEKICKRGKQSREGREIINSLGEIEGLLKEDLTKALGWAMLEKLCYSLVEGQDPRNESQIELRNKGKGKIRKEGRRKQFNAIRRYATKKAKYKFYQQLFDKDRRRLTRIIMGEPDKAKCAIPMKEIEEYYVNILGTIGHGNMIGWPSSTENADNDILMSPISVDEIRIALTEIRKDSAPGPDKVKVSNLWDIFNLDSLILTKIFNIWFLNRQVPDEFKKNRTILIPKTQDEEEMKKLTSWRPLTIGSVWIRIYTKILAKRLVETVKICSRQKGFISAPGCEENIAILDNLIKGAKRNGNEIAIVFIDLAKAFDSVGHGHIIAGLRRFGIDEHFIDIIRDLYDNCTTRVWVGDEATESILIRRGVKQGDPLSPILLNIAMDPLLTRLEVEGSGFYVKGNSVTSLAFAGDVAILSSSYKGMIKNLGILEEFCKNTNLSVNVKKTKGFHILTKHKTYVVNPKDNWQIGSEKIEYVQPGDFEKYLGARIDPWIGVGGPVLKEKLKDWSENLIKAPLKPAPKILILQTYILPKLFYNLLLIEPPFNLLDDLDVLVRKIVKEILHLPQCTTDGIFYSRGRDGGLALTKFSVQIPNMLIHKWRRHIVSRDDWMDLSYLYAGENLVDKILSFSAVTSHPKKWREEEFLRWSELRCQGIGIKYFKNDLISNSIFRNSSKVKLSAYIAALQLRANIYPTRETLARGRGGVNALCRWCGKVRETVPHISGQCYKTKNARIKRHNRVVSAVVDKVGKLGWKAMIEPHLRNSKGELRKPDIIFIKGDTAVVVDVTVRWEDNAGSLEQAHSEKVAYYLEFEEEIKNLTGGKNIHFFGFVLGARGKWSEGNNDLLQLLGMDRSKNFKESICRLVLYSTIGMMAIFSDR

SEQ ID NO: 9398 - protein, 933 aa, Chrysemys picta
MRTKTNKQISDKRRELAKKKLVVIGDREEVTEVEDIRVNILEIPPPRERIFPLKGHPEVDLVEKICKRGKQSREGREIINSLGEIEGLLKEDLTKALGWAMLEKLCYSLVEGKDPRNESQIELRNKGKGKMRKEGRRKQFNAIRRYATKKAKYKFYQQLFDKDRRRLTRIIMGEPDKAKCAIPMKEIEEYYVNILGTIGHGNMIGWPSSTENADNDILMSPISVDEIRIALREIRKDSAPGPDKVKVSNLWDIFNLDSLILTKIFNIWFLNRQVPDEFKKNRTILIPKTQEEEMKKLTSWRPLTIGSVWIRIYTKILAKRLVETVKICSRQKGFISAPGCEENIAILDNLIKGAKRNGNEIAIVFVDLAKAFDSVGHGHIIAGLRRFGIDEHFIDIIRDLYDNCTTRVWVGDEATESILIRRGVKQGDPLSPILFNIAMDPLLTRLEVEGSGFYIKGNSVTSLAFADDVAILSSSYKGMIKNLGILEEFCKNTNLSVNVKKTKGFHILTKHKTYVVNPKDNCQIGSEEIEYVQPGDFEKYLGARIDPWIGVGGPVLKEKLKDWSENLIKAPLKPAQKILILQTYILPKLFYNLLLIEPPFNLLDDLDVLVRKIVKEILHLPQCTTDGIFYSRGRDGGLALTKFSVQIPNMLIRKWRRHIVSRDDWMDLSYLYAGENLVDKILLFSAVTSHPKKWREEEFLRWSELRCQGIGIKYFKNDLISNSIFRNSSKVKSSAYIAALQLRANIYPTRETLARGRGGVNALCRWCGKVRETVPHISGQCYKTKNARIKRHNRVVSAVVDKVGKLGWKAMIEPHLRNSKGELRKPDIIFIKGDTAVVVDVTVRWEDNAGSLEQAHSEKVAYYLELEEEVKNLTGGKNIHFFGFVLGARGKWSEGNNDLLQLLGMDRSKNFKESICRLVLYSTIGMMAIFSDR

SEQ ID NO: 9399 - protein, 1255 aa, Chelydra serpentina
MEKRNFYLHTGLALDRVNNAPAVGFDAPADSVKLIRGVVKVNGPMRKTGQYGPNQRTRCKSGDLLVEEMKGVEDKFLENSEGRKILSILPILPMVFTNKNFKDFYSDNFNPDDDYLIALEDPYFKETDHYLNLETQNSQILRSEYIDFKEILGVNGGERSNSNMHKDGVFYLEYPVESFNCPICPQILASFGKWAKHINIIHKSKAIRVLCRKCGKSSQYHNIACHYPKCRPKESDTPNKSHSCSICGLAFHTKSGLSQHCRHKHPAVRNEERKVSKKSNKEMPSRGRIWTNEEIERLRELEEKYKGKRNINKCIENELKTKNNKQISDKRRELEKKKIVMKREVEGERREAEKVEELRENILEDPPPRERIAPLKGHDKIDSIGEICQKGRQSKEGKEIVKSLEEIENLVKEDNNTILGWAMLEKLCSVLSREVMDGKEVTTSKKGKKGKSESIERRKPSSAIRKYATKKAKYKLYQQLFEKDRRRLARIIMGEPDNANCRIPIKDIEEHYKNILGRVGHGDATGWTSSTEKADNDLLMSPISVEDVRVALREIRKESAPGPDKIKVNDMWEIFNLDSVILTKIFNLWFLMRKIPNNFKENRTVLIPKSQNEEELKDITSWRPITIGSVWVRLYTKILAKRLVNASRICERQKGFIAAPGCEENITILNNLIKGAKKNSDEIAIVFIDLAKAFDSVGHGHILAGLKRLGIDNHFIDVVRDLYSECFTKVWVGDKSTESILIRKGVKQGDPLSPILFNIALDPFLTKLEREGEGFYVQGSKITSLAFADDVAILSNTYKGMFKNLEILEDFCNNTNLRVNIKKTKGFHILPKHKTYVVNPKDKWRIGKSEIDYVQPGEFEKYLGARVDPWVGIRGEELREKLKKWSEDINKAPLKPAQKLLILQTYILPRLFYNLLLMEPPFNLLNELDVLVRKCAKEILHLPQCTTDGLFYSKGRDGGLALTKFSIQIPNILINKWRRHIVSRDSWIDRSYIYIGENLVDKIITMSAAVPNSKKWRDEEFRKWSELRCQGIGIKYFKNDAISNSMIKNSSKVKSSSFIAALQLRANIYPTRETLARGRIGVNALCRWCGKVKETTPHISGQCYKTKDMRIKRHNRVVSALSDKVGKIGWKTLVEPHVRNRKGELRKPDLVFIKNETAVVVDVTIRWEDNAGSLELAHREKVAYYSEIEEEIKILTGVNNIRFFGFVIGARGKWSDENDELLKILGIERSKNFKESISRLVLYSTADMMAVFSDK

SEQ ID NO: 9400 - protein, 1260 aa, Terrapene carolina
MEKSNLYFYTGLALDRVNNAPAVGFDAPADSVKYIRGVIRVAGPMDKMVWTIMKSHEHESENQVLPVEHGEEVEENVCDDHGEEILSILPMVFTRDTFNDLTMESFNPDFKYLSTFDDPYVSESGYLNAHLVNGSSLLNSFRPSTDFNGDRNKDLNSTGSNINILESSSWKDGVFYLEYPVDSFNCPICPQILPTFGKWAKHINVVHKSKAIRVVCSKCGKSSQYHNIACHYPKCIPKKADTPMKSHTCSVCGLGFHTRSGLSQHCRHRHPAVRNEQRKEDMAAKSKIKEGSTRSRIWTKDEVAQLIQLERKYIGKRNINKCIESEMRTKTNKQISDKRRELAKKKLVVTGDREELTEVEDIRVNILEIPPPRERIFPLKGHPEVDLVEKICKRGKQSREGREIINSLGEIEGLLKEDLTKALGWAMLEKLCYSLVEGKDPRNESQIELRNKGKGKMRKEGRRKQFNAIRRYATKKAKYKFYQQLFDKDRRRLTRIIMGEPDKAKCAIPMKEIEEYYVNILGTIGHGNMIGWPSSTENADNDILMSPISVDEIRIALREIRKDSAPGPDKVKVSNLWDIFNLDSLILTKIFNIWFLNRQVPDEFKKNRTILIPKTQDEEEMKKLTSWRPLTIGSVWIRIYTKILAKRLVETVKICSRQKGFISAPGCEENIAILDNLIKGAKRNGNEIAIVFVDLAKAFDSVGHGHIIAGLRRFGIDEHFIDIIRDLYDNCTTRVWVGDEATESILIRRGVKQGDPLSPILFNIAMDPLLTRLEVEGSGFYVKGNGVTSLAFADDVAILSSSYKGMIKNLGILEEFCKNTNLSVNVKKTKGFHILTKHKTYVVNPKDNWQIGSEEIEYVQPGDFEKYLGARIDPWIGVGGPVLKEKLKDWSENLIKAPLKPAQKILILQTYILPKLFYNLLLIEPPFNLLDDLDVLVRKIVKEILHLPQCTTDGIFYSRGRDGGLALTKFSVQIPNMLIRKWRRHIVSRDDWMDLSYLYAGENLVDKILSFSAVTSHPKKWREEEFLRWSELRCQGIGIKYFKNDLISNSIFRNSSKVKSSAYIAALQLRANIYPTRETLARGRGGVNALCRWCGKVRETVPHISGQCYKTKNARIKRHNRVVSAVVDKVGKLGWKAMIEPHLRNSKGELRKPDIIFIKGDTAVVVDVTVRWEDNAGSLEQAHSEKVAYYLELEEEIKNLTGGKNIHFFGFVLGARGKWSEGNNDLLQLLGMDRSKNFKESICRLVLYSTIGMMAIFSDR

SEQ ID NO: 9401 - protein, 1260 aa, Terrapene carolina
MEKSNLYFYTGLALDRVNNAPAVGFDAPADSVKYIRGVIRVAGPMDKMVWTIMKSHEHESENQVLPVEHGEEVEENVCDDHGEEILSILPMVFTRDTFNDLTMESFNPDFKYLSTFDDPYVSESGYLNAHLVNGSSLLNSFRPSTDFNRDRNKDLNSTGSNINILESSSWKDEVFYLEYPVDSFNCPICPQILPTFGKWAKHINVVHKSKAIRVVCSKCGKSSQYHNIACHYPKCIPKKADTPMKSHTCSVCGLGFHTRSGLSQHCRHRHPAVRNEQRKEDMAAKSKIKEGSTRSRIWTKDEVAQLIQLERKYIGQRNINKCIESEMRTKTNKQISDKRRELAKKKLVVTGDREEVTEVEDIRVNILEIPPPRERIFPLKGHPEVDLVEKICKRGKQSREGREIINSLGEIEGLLKEDLTKALGWAMLEKLCYSLVEGKDPRNESQIELRNKGKGKMRKEGRRKQFNAIRRYATKKAKYKFYQQLFDKDRRRLTRIIMGEPDKAKCAIPMKEIEEYYVNILGTIGHGNMIGWPSSTENADNDILMSPISVDEIRIALREIRKDSAPGPDKVKVSNLWDIFNLDSLILTKIFNIWFLNRQVPDEFKKNRTILIPKTQDEEEMKKLTSWRPLTIGSVWIRIYTKILAKRLVETVKICSRQKGFISAPGCEENIAILDNLIKGAKRNGNEIAIVFVDLAKAFDSVGHGHIIAGLRRFGIDEHFIDIIRDLYDNCTTRVWVGDEATESILIRRGVKQGDPLSPILFNIAMDPLLTRLEVEGSGFYVKGNGVTSLAFADDVAILSSSYKGMIKNLGILEEFCKNTNLSVNVKKTKGFHILTKHKTYVVNPKDNWQIGSEEIEYVQPGDFEKYLGARIDPWIGVGGPVLKEKLKDWSENLIKAPLKPAQKILILQTYILPKLFYNLLLIEPPFNLLDDLDVLVRKIVKEILHLPQCITDGIFYSRGRDGGLALTKFSVQIPNMLIRKWRRHIVSRDDWMDLSYLYAGENLVDKILSFSAVTSHPKKWREEEFLRWSELRCQGIGIKYFKNDLISNSIFRNSSKVKSSAYIAALQLRANIYPTRETLARGRGGVNALCRSCGKVRETVPHISGQCYKTKNARIKRHNRVVSAVVDKVGKLGWKAMIEPHLRNSKGELRKPDIIFIKGDTAVVVDVTVRWEDNAGSLEQAHSEKVAYYLELEEEIKNLTGGKNIHFFGFVLGARGKWSEGNNDLLQLLGMDTSKNFKESICRLVLYSTIGMMAIFSDR

SEQ ID NO: 9402 - protein, 1193 aa, Terrapene carolina
MEKSNLYFYTGLALDRVNNAPAVGFDAPADSVKYIRGVIRVAGPMDKMVWTIMKSHEHESENQVLPVEHGEEVEENVCDDHGEEILSILPMVFTRDTFNDLTMESFNPDFKNLSTFDDPYVSESGYLNAHLVNGSSLLNSFRPSTDFNRDRNKDLNSTGSNINILESSSWKDGVFYLEYPVDSFNCPICPQILPTFGKWAKHINVVHKSKAIRVVCSKCGKSSQYHNIACHYPKCIPKKADTPMKSHTCSVCGLGFHTRSGLSQHCRHRHPAVRNEQRKEDMAAKSKIKEGSTRSRIWTKDEVAQLIQLERKYIGKRNINKCIESEMRTKTNKQISDKRRELAKKKLVVTGDREEVTEVEDIRVNILEIPPPRERIFPLKGHPEVDLVEKICKRGKQSREGREIINSLGEIEGLLKEDLTKALGWAMLEKLCYSLVEGKDPRNESQIELRNKGKGKMRKEGRRKQFNAIRRYATKKAKYKFYQQLFDKDRRRLTRIIMGEPDKAKCAIPMKEIEEYYVNTLGTIGHGNMIGWPSSTENADNDILMSPISVDEIRIALREIRKDSAPGPDKVKVSNLWDIFNLDSLILTKIFNIWFLNRQVPDEFKKNRTILIPKTQDEEEMKKLTSWRPLTIGSVWIRIYTKILAKRLVETVKICSRQKGFISAPGCEENIAILDNLIKGAKRNGNEIAIVFVDLAKAFDSVGHGHIIAGLRRFGIDEHFIDIIRDLYDNCTTRVWVGDEATESILIRRGVKQGDPLSPILFNIAMDPLLTRLEVEGSGFYVKGNGVTSLAFADDVAILSSSYKGMIKNLGILEEFCKNTNLSVNVKKTKGFHILTKHKTYVVNPKDNWQIGSEEIEYVQPGDFEKYLGARIDPWIGVGGPVLKEKLKDWSENLIKAPLKPAQKILILQTYILPKLFYNLLLIEPPFNLLDDLDVLVRKIVKEILHLPQCTTDGIFYSRGRDGGLALTKFSVQIPNMLIRKWRRHIVSRDDWMDLSYLYAGENLVDKILSFSAVTSHPKKWREEEFLRWSELRCQGIGIKYFKNDLISNSIFRNSSKVKSSAYIAALQLRANIYPTRETLARGRGGVNALCRWCGKVRETVPHISGQCYKTKNARIKRHNRVVSAVVDKVGKLGWKAMIEPHLRNSKGELRKPDIIFIKGDTAVVVDVTVRWEDNAGSLEQAHSEKVAYYLEL

SEQ ID NO: 9403 - protein, 1216 aa, Terrapene carolina
MDKMVWTIMKSHEHESENQVLLVEHGEEVEENVCDDHGEEILSILPMVFTRDTFNDLTMESFNLDFKYLSTFYDPYVSESGYLNAHLVNGSSLLNSFRPSTDFNRDRNKDLNSTGSNITILESSSWKDGVFYLEYPVDSFNCPICPQILPTFGKWAKHINVIHKSKAIRVVCSKCGKSSQYHNIACHYPKCIPKKADTPMKSHTCSVCGLGFHTRSGLSQHCRHRHPAVRNEQRKEDMAAKSKIKEGSTRSRIWTKDEVAQLIQLERKYIGKRNINKCIESEMRTKTNKQISDKRRELAKKKLVVTGDREEVTEVEDIRVNILEIPPPRERIFPLKGHPEVDLVEKICKRGKQSREGREIINSLGEIEGLLKEDLTKALGWAMLEKLCYSLVEGKDPRNERQIELRNKGKGKMRKEGRRKQFNAIRRYATKKAKYKFYQQLFDKDRRRLTRIIMGEPDKAKCAIPMKEIEEYYVNILGTIGHGNMIGWPSSTENADNDILMSPISVDEIRIALREIRKDSAPGPDKVKVSNLWDIFNLDSLILTKIFNIWFLNRQVPDEFKKNRTILIPKTQDEEEMKKLTSWRPLTIGSVWIRIYTKILAKRLVETVKICSRQKGFISAPGCEENIAILDNLIKGAKRNGNEIAIVFVDLAKAFDSVGHGHIIAGLRRFGIDEHFIDIIRDLYDNCTTRVWVGDEATESILIRRGVKQGDPLSPILFNIAMDPLLTRLEVEGSGFYVKGNGVTSLAFADDVAILSSSYKGMIKNLGILEEFCKNTNLSVNVKKTKGFHILTKHKTYVVNPKDNWQIGSEEIEYVQPGDFEKYLGARIDPWIGVGGPVLKEKLKDWSENLIKAPLKPAPKILILQTYILPKLFYNLLLIEPPFNLLDDLDVLVRKIVKEILHLPQCITDGIFYSRGRDGGLALTKFSVQIPNMLIRKWRRHIVSRDDWMDLSYLYAGENLVDKILSFSAVTSHPKKWREEEFLRWSELRCQGIGIKYFKNDLISNSIFRNSSKVKSSAYIAALQLRANIYPTRETLARGRGGVNALCRWCGKVRETVPHISGQCYKTKNARIKRHNRVVSAVVDKVGKLGWKAMIEPHLRNSKGELRKPDIIFIKGDTAVVVDVTVRWEDNAGSLEQAHSEKVAYYLELEEEIKNLTGGKNIHFFGFVLGARGKWSEGNNDLLQLLGMDRSKNFKESICRLVLYSTIGMMAIFSDR

SEQ ID NO: 9404 - protein, 1192 aa, Actinemys marmorata
MEKSNLYFYTGLALDRVNNAPAVGFDAPADSVKYIRGVIRVAGPMDKMVWTIMKSHEHESENQVLPVEHGEEVEENVCDDHGEEILSILPMVFTRDTFNDLTMESFNPDFKYLSTFDDPYVRESGYLNAHLVNGSSLLNSFRPSTDFNRDRNKDLNSTGSNINILESSSWKDGVFYLEYPVDSFNCPICPQILPTFGKWAKHINVVHKSKAIRVVCSKCGKSSQYHNIACHYPKCIPKKADTPMKSHTCSVCGLGFHTRSGLSQHCRHRHPAVRNEQRKEDMAAKSKIKEGSTRSRIWTKDEVAQLIQLERKYIGKRNINKGIESEMRTKTNKQISDKRRELAKKKLVVTGDREEVTEVEDIRVNISEIPPPRERIFPLKGHPEVDLVEKICKRGKQSREGREIINSLGEIEGLLKEDLTKALGWAMLEKLCYSLVEGKDPRNESQIELRNKGKGKMRKEGRRKQFNVIRRYATKKAKYKFYQQLFDKDRRRLTRIIMGEPDKAKCAIPMKEIEEYYVNILGTIGHGNMIGWPSSTENADNDILMSPISVDEIRIALREIRKDSAPGPDKVKVSNLWDIFNLDSLILTKNFNIWFLNRQVPDEFKKNRTILIPKTQDEEEMKKLTSWRPLTIGSVWIRIYTKILAKRLVETVKICSRQKGFISAPGCEENIAILDNLIKGAKRNGNEIAIVFVDLAKAFDSVGHGHIIAGLRRFGIDEHFIDIIRDLYDNCTTRVWVGDEATESILIRRGVKQGDPLSPILFNIAMDPLLTRLEVEGSGFYVKGNSVTSLAFADDVAILSSSYKGLIKNLGILEEFCKNTNLSVNVKKTKGFHILTKHKTYVVNPKDNWQIGSEEIEYVQPGDFEKYLGARIDPWIGVGGPVLKEKLKDWSENLIKAPLKPAQKILILQTYILPKLFYNLLLIEPPFNLLDDLYVLVRKIVKEILHLPQCTTDGIFYSRGRDGGLALTKFSVQIPNMLIRKWKRHIVSRDDWMDLSYLYAGENLVDKILSFSAVTSHPKKWREEEFLRWSELRCQGIGIKYFKNDLISNSIFRNSSKVKSSAYIAALQLRANIYPTRETLARGRGGVNALCRWCGKVRETVPHISGQCYKTKNARIKRHNRVVSAVVDKVGKLGWKAMIEPHLRNSKGELRKPDIIFIPFIQQWWLMLQCDGRIMPEVWNKPTVRRWLIILS

SEQ ID NO: 9405 - protein, 1260 aa, Actinemys marmorata
MEKSNLYFYTGLALDRVNNAPAVGFDAPADSVKYIRGVIRVAGPMDKMVWTIMKSHEHESENQVLPVEHGEEVEENVCDDHGEEILSILPMVFTRDTFNDLTMESFNPDFKYLSTFDDPYVRESGYLNAHLVNGSSLLNSFRPSTDFNRDRNKDLNSTGSNINILESSSWKDGVFYLEYPVDSFNCPICPQILPTFGKWAKHINVVHKSKAIRVVCSKCGKSSQYHNIACHYPKCIPKKADTPMKSHTCSVCGLGFHTRSGLSQHCRHRHPAVRNEQRKEDMAAKSKIKEGSTRSRIWTKDEVAQLIQLERKYIGKRNINKCIESEMRTKTNKQISDKRRELAKKKLVVTGDREEVTEVEDIRVNILEIPPPRERIFPLKGHPEVDLVEKICKRGKQSREGREIINSLGEIEGLLKEDLTKALGWAMLEKLCYSLVEGKDPRNESQIELRNKGKGKMRKEGRRKQFNAIRRYATKKAKYKFYQQLFDKDRRRLTRIIMGEPDKAKCAIPMKEIEEYYVNILGTIGHGNMIGWPSSTENADNDILMSPISVDEIRIALREIRKDSAPGPDKVKVSNLWDIFNLDSLILTKFFNIWFLNRQVPDEFKKNRTILIPKTQDEEEMKKLTSWRPLTIGSVWIRIYTKILAKRLVETVKICSRQKGFISAPGCEENIAILDNLIKGAKRNGNEIAIVFVDLAKAFDSVGHGHIIAGLRRFGIDEHFIDIIRDLYDNCTTRVWVGDEATESILIRRGVKQGDPLSPILFNIAMDPLLTRLEVEGSGFYVKGNSVTSLAFADDVAILSSSYKGMIKNLGILEEFCKNTNLSVNVKKTKGFHILTKHKTYVVNPKDNWQIGSEEIEYVQPGDFEKYLGARIDPWIGVGGPVLKEKLKDWSENLIKAPLKPAPKILILQTYILPKLFYNLLLIEPPFNLLDDLDVLVRKIVKEILHLPQCTTDGIFYSRGRDGGLALTKFSVQIPNMLIRKWRRHIVSRDDWMDLSYLYAGENLVDKILSFSAVTSHPKKWREEEFLRWSELRCQGIGIKYFKNDLISNSIFRNSSKVKSSAYIAALQLRANIYPTRETLARGRGGVNALCRWCGKVRETVPHISGQCYKTKNARIKRHNRVVSAVVDKVGKLGWKAMIEPHLRNSKGELIKPDIIFIKGDTAVVVDVTVRWEDNAGSLEQAHSEKVAYYLELEEEIKNLTGGKNIHFFGFVLGARGKWSEGNNDLLQLLGMDRSKNFKESICRLVLYSTIGMMAIFSDR

SEQ ID NO: 9406 - protein, 1241 aa, Chrysemys picta
MEKSNLYFYTGLALDRVNNAPAVGFDAPADSVKYIRGVIRVAGPMDKMVWTIMKSHENESENQVFPVEHGEEVEENVCDDHGEEILSILPMVFTRDTFNDLTMDSFNPDFKYLSTFDDPYVRESSTDFNRDRNKDLNSIGSNINILESSSWKDGVFYLEYPVDSFNCPICPQILPTFGKWAKHINVVHKSKAIRVVCSKCGKSSQYHNIACHYPKCIPKKADTPMKSHMCSVCGLGFHTRSGLSQHCRHRHPAVRNEQRKEDMAAKSKIKEGSTRSRIWTKDEVAQLIQLERKYIGKRNINKCIESEMRTKTNKQISDKRRELAKKKLVVTGDREEVTEVEDIRVNILEIPPPRERIFPLKGHPEVDLVEKICKRGKQSREGREIINSLGEIEGLLKEDLTKALGWAMLEKLCYSLVEGQDPRNESQIELRNKGKGKIRKEGRRKQFNAIRRYATKKAKYKFYQQLFDKDRRRLTRIIMGEPDKAKCAIPMKEIEEYYVNILGTIGHGNMIGWPSSTENADNDILMSPISVDEIRIALTEIRKDSAPGPDKVKVSNLWDIFNLDSLILTKIFNIWFLNRQVPDEFKKNRTILIPKTQDEEEMKKLTSWRPLTIGSVWIRIYTKILAKRLVETVKICSRQKGFISAPGCEENIAILDNLIKGAKRNGNEIAIVFVDLAKAFDSVGHGHIIAGLRRFGIDEHFIDIIRDLYDNCTTRVWVGDEATESILIRRGVKQGDPLSPILFNIAMDPLLTRLEVEGSGFYVKGNSVMSLAFADDVAILSSSYKGMIKNLGILEEFCKNTNLSVNVKKTKGFHILTKHKTYVVNPKDNWQIGSEKIEYVQPGDFEKYLGARIDPWIGVGGPVLKEKLKDWSENLIKAPLKPAQKILILQTYILPKLFYNLLLIEPPFNLLDDLDVLVRKIVKEILHLPQCTTDGIFYSRGRDGGLALTKFSVQIPNMLIRKWRRHIVSRDDWMDLSYLYAGENLVDKILSFSAVTSHPKKWREEEFLRWSELRCQGIGIKYFKNDLISNSIFRNSSKVKSSAYIAALQLRANIYPTRETLARGRGGVNALCRWCGKVRETVPHISGQCYKTKNARIKRHNRVVSAVVDKVGKLGWKAMIEPHLRNSKGELRKPDIIFIKGDTAVVVDVTVRWEDNAGSLEQAHSEKVAYYLELEEEIKNLTGGKNIHFFGFVLGARGKWSEGNNDLLQLLGMDRSKNFKESICRLVLYSTIGMMAIFSDR

SEQ ID NO: 9407 - protein, 1221 aa, Chrysemys picta
MEKSNLYFYTGLALDRVNNAPAVGFDAPADSVKYIRGVIRVAGPMDKMVWTIMKSHENESENHVLPVEHGEEVEENVCDDHGEEILSILPMVFTRDTFNDLTMDSFNPDFKYLSTFDDPYVRESSTDFNRDSNKDLNSIGSNINILESSSWKDGVFYLEYPVDSFNCPICPQILPTFGKWAKHINVVHKSKAIRVVCSKCGKSSQYHNIACHYPKCIPKKADTPIKSHTCSVCGLGFHTRSGLSQHCRHRHPAVRNEQRKEDMAAKSKIKEGSTRSRIWTKDEVAQLIQLERKYIGKRNINKCIESEMRTKTNKQISDKRRELAKKKLVVTGDREEVTEVEDIRVNILEIPPPRERIFPLKGHPEVDLVEKICKWGKQSREGREIINSLGEIEGLLKEDLTKALGWAMLEKLCYSFVEGQDPRNESQIELRNKGKGKIRKEGRRKQFNAIRRYATKKAKYKFYQQLFDKDRRRLTRIIMGEPDKAKCAIPMKEIEEYYVNILGTIGHGNMIGWPSSTENADNDILMSPISVDEIRIALTEIRKDSAPGPDKVKVSNLWDIFNLDFLILTKIFNIWFLNRQVPDEFKKNRTILIPKTQDEEEMKKLTSWRPLTIGSVWIRIYTKILAKRLVETVKICSRQKGFISAPGCEENIAILDNLIKGAKRNGNEIAIVFVDLAKAFDSVGHGHIIAGLRRFGIDEHFIDIIRDLYDNCTTRVWVGDEATESILIRRGVKQGDPLSPILFNIAMDPLLTRLEVEGSGFYVKGNSVTSLAFADDVAILSSSYKGMIKNLGILEEFCKNTNLSVNVKKTKGFHILTKHKTYVVNPKDNWQIGSEKIEYVQPGDFEKYLGARIDPWIGVGGPVLKEKLKDWNENLIKAPLKPAQKILILQTYILPKLFYNLLLIEPPFNLLDDLDVLVRKIVKEILHLPQCTTDGIFYSRGRDGGLALTKFSVQIPNMLIRKWRRHIVSRDDWMDLSYLYAGENLVDKILSFSAVTSHPKKWREEEFLRWSELRCQGIGIKYFKNDLISNSIFRNSSKVKSSAYIAALQLRANIYPTRETLARGRGGVNALCRWCGKVRETVPHISGQCYKTKNARIKRHNRVVSAVVDKVGKLGWKAMIEPHLRNSKGELRKPDIIFIKGDTAVVVDVTVRWEDNAGTLEQAHSEKRRLLTVVTVVLRDVLLISIPLGVCAPRARSSEDFYPSNTGGSAVEPPRVAPSWR

SEQ ID NO: 9408 - protein, 1241 aa, Chrysemys picta
MEKSNLYFYTGLALDRVNNAPAVGFDAPADSVKYIRGVIRVAGPMDKMVWTIMKSHENESENQVLPVEHGEEVEENVCDDHGEEILSILPMVFTRDTFNDLTMDSFNPDFKYLSTFDDPYVRESSTDFNRDRNKDLNSIGSNINILESSSWKDGVFYLEYPVDSFNCPICPQILPTFGKWAKHINVVHKSKAIRVVCSKCGKSSQYHNIACHYPKCIPKKVDTPMKSHTCSVCGLGFHTRSGLSQHCRHRHPAVRNEQRKEDMAAKSKIKEGSTRSRIWTKDEVAQLIQLERKYIGKRNINKCIESEMRTKTNKQISDKRRELAKKKLVVTGDREEVTEVEDIRVNILEIPPPRERIFPRKGHPEVDLVEKICKRGKQSREGREIINSLGEIEGLLKEDLTKALGWAMLEKLCYSLVEGQDPRNESQIELRNKGKGKIRKEGRRKQFNAIRRYATKKAKYKFYQQLFDKDRRRLTRIIMGEPDKAKCAIPMKEIEEYYVNILGTIGHGNMIGWPSSTENADNDILMSPISVDEIRIALTEIRKDSAPGPDKVKVSNLWDIFNLDSLILTKIFNIWFLNRQVPDEFKKNRTILIPKTQDEEEMKKLTSWRPLTIGSVWIRIYTKILAKRLVETVKICSRQKGFISAPGCEENIAILDNLIKGAKRNGNEIAIVFVDLAKAFDSVGHGHIIAGLRRFGIDEHFIDIIRDLYDNCTTRVWVGDEATESILIRRGVKQGDPLSPILFNIAMDPLLTRLEVEGSGFYVKGNSVTSLAFADDVAILSSSYKGMIKNLGILEEFCKNTNLSVNVKKTKGFHILTKHKTYVVNPKDNWQIGSEKIEYVQPGDFEKYLGARIDPWIGVGGPVLKEKLKDWSENLIKAPLKPAQKILILQTYILPKLFYNLLLIEPPFNLLDDLDVLVRKIVKEILHLPQCTTDGIFYSRGRDGGLALTKFSVQIPNMLIRKWRRHIVSRDDWMDLSYLYAGENLVDKILSFSAVTSHPKKWREEEFLRWSELRCQGIGIKYFKNDLISNSIFSNSSKVKSSAYIAALQLRANIYPTRETLARGRGGVNALCRWCGKVRETVPHISGQCYKTKNARIKRHNRVVSAVVDKVGKLGWKAMIEPHLRNSKGELRKPDIIFIKGDTAVVVDVTVRWEDNAGSLEQAHSEKVAYYLELEEEIKNLTGGKNIHFFGFVLGARGKWSEGNNDLLQLLGMDRSKNFKESICRLVLYSTIGMMAIFSDR

SEQ ID NO: 9409 - protein, 1254 aa, Terrapene carolina
MEKSNLYFYTGLALDRVNNAPAVGFDAPADSVKYIRGVIRVAGPMDKMVWTIMKSHEHESENQVLPVEHGEEVEENVCDDHGEEILSILPMVFTRDTFNDLTMESFNPDFKYLSTFDDPYVSESGYLNAHLVNGSSLLNSFRPSTDFNRDRNKDLNSTGSNINILESSSWKDGVFYLEYPVDSFNCPICPQILPTFGKWAKHINVVHKSKAIRVVCSKCGKSSQYHNIACHYPKCIPKKADTPMKSHTCSVCGLGFHTRSGLSQHCRHRHPAVRNEQRKEDMAAKSKIKEGSTRSRIWTKDEVAQLIQLERKYIGKRNINKCIESEMRTKTNKQISDKRRELAKKKLVVTGDREEVTEVEDIRVNILEIPPPRERIFPLKGHPEVDLVEKICKRGKQSREGREIINSLGEIEGLLKEDLTKALGWAMLEKLCYSLVEGKDPRNESQIELRNKGKGKMRKEGRRKQFNAIRRYATKKAKYKFYQQLFDKDRRRLTRIIMGEPDKAKCAIPMKEIEEYYVNILGTIGHGNMIGWPSSTENADNDILMSPISVDEIRIALREIRKDKVKVSNLWDIFNLDSLILTKIFNIWFLNRQVPDEFKKNRTILIPKTQDEEEMKKLTSWRPLTIGSVWIRIYTKILAKRLVETVKICSRQKGFISAPGYEENIAILDNLIKGAKRNGNEIAIVFVDLAKAFDSVGHGHIIAGLRRFGIDEHFIDIIRDLYDNCTTRVWVGDEATESILIRRGVKQGDPLSPILFNIAMDPLLTRLEVEGSGFYVKGNGVTSLAFADDVAILSSSYKGMIKNLGILEEFCKNTNLSVNVKKTKGFHILTKHKTYVVNPKDNWQIGSEEIEYVQPGDFEKYLGARIDPWIGVGGPVLKEKLKDWSENLIKAPLKPAQKILILQTYILPKLFYNLLLIEPPFNLLDDLDVLVRKIVKEILHLPQCITDGIFYSRGRDGGLALTKFSVQIPNMLIRKWRRHIVSRDDWMDLSYLYAGENLVDKILSFSAVTSHPKKWREEEFLRWSELRCQGIGIKYFKNDLISNSIFRNSSKVKSSAYIAALQLRANIYPTRETLARGRGGVNALCRWCGKVRETVPHISGQCYKTKNARIKRHNRVVSAVVDKVGKLGWKAMIEPHLRNSKGELRKPDIIFIKGDTAVVVDVTVRWEDNAGSLEQAHSEKVAYYLELEEEIKNLTGGKNIHFFGFVLGARGKWSEGNNDLLQLLGMDRSKNFKESICRLVLYSTIGMMAIFSDR

SEQ ID NO: 9410 - protein, 1260 aa, Terrapene carolina
MEKSNLYFYTGLALDRVNNAPAVGFDAPADSVKYIRGVIRVAGPMDKMVWTIMKSHEHESENQVLPVEHGEEVEENVCDDHGEEILSILPMVFTRDTFNDLTMESFNPDFKYLSTFDDPYVSESGYLNAHLVNGSSLLNSFRPSTDFNRDRNKDLNSTGSNINILESSSWKDGVFYLEYPVDSFNCPICPQILPTFGKWAKHINVVHKSKAIRVVCSKCGKSSQYHNIACHYPKCIPKKADTPMKSHTCSVCGLGFHTRSGLSQHCRHRHPAVRNEQRKEDMAAKSKIKEGSTRSRIWTKDEVAQLIQLERKYIGKRNINKCIESEMRTKTNKQISDKRRELAKKKLVVTGDREEVSEVEDIRVNILEIPPPRERIFPLKGHPEVDLVEKICKRGKQSREGREIINSLGEIEGLLKEDLTKALGWAMLEKVCYSLVEGKDPRNESQIELRNKGKGKMRKEGRRKQFNAIRRYATKKAKYKFYQQLFDKDRRRLTRIIMGEPDKAKCAIPMKEIEEYYVNILGTIGHGNMIGWPSSTENADNDILMSPISVDEIKIALREIRKDSAPGPDKVKVSNLWDIFNLDSLILTKIFNIWFLNRQVPDEFKKNRTILIPKTQDEEEMKKLTSWRPLTIGSVWIRIYTKILAKRLVETVKICSRQKGFISAPGCEENIAILDNLIKGAKRNGNEIAIVFVDLAKAFDSVGHGHIIAGLRRFGIDEHFIDIIRDLYDNCTTRVWVGDEATESILIRRGVKQGDPLSPILFNIAMDPLLTRLEVEGSGFYVKGNGVTSLAFADDVAILSSSYKGMIKNLGILEEFCKNTNLSVNVKKTKGFHILTKHKTYVVNPKDNWQIGSEEIEYVQPGDFEKYLGARIDPWIGVGGPVLKEKLKDWSENLIKAPLKPAQKILILQTYILPKLFYNLLLIEPPFNLLDDLDVLVRKIVKEILHLPQCTTDGIFYSRGRDGGLALTKFSVQIPNMLIRKWRRHIVSRDDWMDLSYLYAGENLVDKILSFSAVTSHPKKWREEEFLRWSELRCQGIGIKYFKNDLISNSIFRNFTKVKSSAYIAALQLRANIYPTRETLARGRGGVNALCRWCGKVRETVPHISGQCYKTKNARIKRHNRVVSAVVDKVGKLGWKAMIEPHLRNSKGELRKPDIIFIKGDTAVVVDVTVRWEDNAGSLEQAHSEKVAYYLELEEEIKNLTGGKNIHFFGFVLGARGKWSEGNNDLLQLLGMDRSKNFKESICRLVLYSTIGMMAIFSDR

SEQ ID NO: 9411 - protein, 1260 aa, Terrapene carolina
MEKSNLYFYTGLALDRVNNAPAVGFDAPADSVKYIRGVIRVAGPMDKMVWTIMKSHEHESENQVLPVEHGEEVEENACDDHGEEILSILPMVFTRDTFNDLTMESFNPDFKYLSTFDDPYVSESGYLNAHLVNGSSLLNSFRPSTDFNRDRNKDLNSTGSNINILESSSWKDGVFYLEYPVDSFNCPICPQILPTFGKWAKHINVVHKSKAIRVVCSKCGKSSQYHNIACHYPKCIPKKADTPMKSHTCSVCGLGFHTRSGLSQHCRHRHPAVRNEQRKEDMAAKSKIKEGSTRSRIWTKDEVAQLIQLERKYIGKRNINKCIESEMRTKTNKQISDKRRELAKKKLVVTGDREEVTEVEDIRVNILEIPPPRERIFPLKGHPEVDLVEKICKRGKQSREGREIINSLGEIEGLLKEDLTKALGWAMLEKLCYSLVEGKDPRNESQIELRNKGKGKMRKEGRRKQFNAIRRYATKKAKYKFYQQLFDKDRRRLTRIIMGEPDKAKCAIPMKEIEEYYVNILGTIGHGNMIGWPSSTENADNDILMSPISVDEIRIALREIRKDSAPGPDKVKVSNLWDIFNLDSLILTKIFNIWFLNRQVPDEFKKNRTILIPKTQDEEEMKKLTSWRPLTIGSVWIRIYTKILAKRLVETVKICSRQKGFISAPGCEENIAILDNLIKGAKRNGNEIAIVFVDLAKAFDSVGHGHIIAGLRRFGIDEHFIDIIRDLYDNCTTRVWVGDEATESILIRRGVKQGDPLSPILFNIAMDPLLTRLEVEGSGFYVKGNGVTSLAFADDVAILSSSYKGMIKNLGILEEFCKNTNLSVNVKKTKGFHILTKHKTYVVNPKDNWQIGSEEIEYVQPGDFEKYLGARIDPWIGVGGPVLKEKLKDWSENLIKAPLKPAQKILILQTYILPKLFYNLLLIEPPFNLLDDLDVLVRKIVKEILHLPQCTTDGIFYSRGRDGGLALTKFSVQIPNMLIRKWRRHIVSRDDWMDLSYLYAGENLVDKILSFSAVTSHPKKWREEEFLRWSELRCQVIGIKYFKNDLISNSIFRNSSKVKSSAYIAALQLRANIYPTRETLARGRGGVNALCRWCGKVRETVPHISGQCYKTKNARIKRHNRVVSAVVDKVGKLGWKAMIEPHLRNSKGELRKPDIIFIKGDTAVVVDVTVRWEDNAGSLEQAHSEKVAYYLELEEEIKNLTGGKNIHFFGFVLGARGKWSEGNNDLLQLLGMDRSKNFKESICRLVLYSTIGMMAIFSDR

SEQ ID NO: 9412 - protein, 1241 aa, Chrysemys picta
MEKSNLYFYTGLALDRVNNAPAVGFDAPADSVKYIRGVIRVAGPMDKMVWTIMKSHENESENQVLPVEHGEEVEENVCDDHGEEILSILPMVFTRDTFNDLTMDSFNPDFKYLSTFDDPYVRESSTDFNRDRNKDLNSIGSNINILESSSWKDGVFYLEYPVDSFNCPTCPQILPTFGKWAKHINVVHKSKAIRVVCSKCGKSSQYHNIACHYPKCIPKKADTPMKSHTCSVCGLGFHTRSGLSQHCRHRHPAVRNEQRKEDMAAKSKIKEGSTRSRIWTKDEVAQLIQLERKYIGKRNINKCIESEMRTKTNKQIADKRRELAKKKLVVTGDREEVTEVEDIRVNILEIPPPRERIFPLKGHPEVDLVEKICKRGKQSREGREIINSLGEIEGLLKEDLTKALGWAMLEKLCYSLVEGQDPRNESQIELRNKGKGKIRKEGRRKQFNAIRRYATKKAKYKFYQQLFDKDRRRLTRIIMGEPDKAKCAIPMKEIEEYYVNILGTIGHGNMIGWPSSTENVDNDILMSPISVDEIRIALTEIRKDSAPGPDKVKVSNLWDIFNLDSLILTKIFNIWFLNRQVPDEFKKNRTILIPKTQDEEEMKKLTSWRPLTIGSVWIRIYTKILAKRLVETVKICSRQKGFISAPGCEENIAILDNLIKGAKRNGNEIAIVFVDLAKAFDSVGHGHIIAGLRRFGIDEHFIDIIRDLYDNCTTRVWVGDEATESILIRRGVKQGDPLSPILFNIAMDPLLTRLEVEGSGFYVKGNSVTSLAFADDLAILSSSYKGMIKNLGILEEFCKNTNLSVNVKKTKGFHILTKHKTYVVNPKDNWQIGSEKIEYVQPGDFEKYLGARIDPWIGVGGPVLKEKLKDWSENLIKAPLKPAQKILILQTYILPKLFYNLLLIEPPFNLLDDLDVLVRKIVKEILHLPQCTTDGIFYSRGRDGGLALTKFSVQIPNMLIRKWRRHIVSRDDWMDLSYLYAGENLVDKILSFSAVTSHPKKWREEEFLRWSELRCQGIGIKYFKNDLISNSIFRNSSKVKSSAYIAALQLRANIYPTRETLARGRGGVNALCRWCGKVRETVPHISGQCYKTKNARIKRHNRVVSAVVDKVGKLGWKAMIEPHLRNSKGELRKPDIIFIKGDTAVVVDVTVRWEDNAGSLEQAHSEKVAYYLDLEEEIKNLTGGKNIHFFGFVLGARGKWSEGNNDLLQLLGMDRSKNFKESICRLVLYSTIGMMAIFSDR

SEQ ID NO: 9413 - protein, 1241 aa, Chrysemys picta
MEKSNLYFYTGLALDRVNNAPAVGFDAPADSVKYIRGVIRVAGPMDKMVWTIMKSHENESENQVLPVEHGEEVEENVCDDHGEEILSILPMVFTRDTFNDLTMDSFNPDFKYLSTFDDPYVRESSTDFNRDRNKDLNSIGSNINILESSSWKDGVFYLEYPVDSFNCPICPQILPTFGKWAKHINVVHKSKAIRVVCSKCGKSSQYHNIACHYPKCIPKKADTPMKSHTCSVCGLGFHTRSGLSQHCRHRHPAVRNEQRKEDMAAKSKIKEGSTRSRIWTKDEVAQLIQLERKYIGKRNINKCIESEMRTKTNKQISDKRRELAKKKLVVTEDREEVTEVEDIRVNILEILPPRERIFPLKGHPEVDLVEKICKRGKQSREGREIINSLGEIEGLLKEDLTKALGWAMLEKLCYSLVEGQDPRNESQIELRNKGKGKIRKEGRRKQFNAIRRYATKKAKYKFYQQLFDKDRRRLTRIIMGEPDKAKCAIPMKEIEEYYVNILGTIGHGNMIGWPSSTENADNDILMSPISVDEIRIALTEIRKDSAPGPDKVKVSNLWDIFNLDSLILTKIFNIWFLNRQVPDEFKKNRTILIPKTQDEEEMKKLTSWRPLTIGSVWIRIYTKILAKRLVETVKICSRQKGFISAPGCEENIAILDNLIKGAKRNGNEIAIVFVDLAKAFDSVGHGHIIAGLRRFGIDEHFIDIIRDLYDNCTTRVWVGDEATESILIRRGVKQGDPLSPILFNIAMDPLLTRLEVEGSGFYVKGNSVTSLAFADDVAILSSSYKGMIKNLGILEEFCKNTNLSVNVKKTKGFHILTKHKTYVVNPKDNWQIGSEKIEYVQPGDFEKYLGARIDPWIGVGGPVLKEKLKDWSENLIKAPLKPAQKILILQTYILPKLFYNLLLIEPPFNLLDDLDVLVRKIVKEILHLPQCTTDGIFYSRGRDGGLALTKFSVQIPNMLIRKWRRHIVSRDDWMDLSYLYAGENLVDKILSFSAVTSHPKKWREEEFLRWSELRCQGIGIKYFKNDLISNSIFRNSSKVKSSAYIAALQLRANIYPTRETLARGRGGVNALCRWCGKVRETVPHISGQCYKTKNARIKRHNRVVSAVVDKVGKLGWKAMIEPHLRNSKGELRKPDIIFIKGDTAVVVDVTVRWEDNAGSLEQAHSEKVAYYLELEEEIKNLTGGKNIHFFGFVLGARGKWSEGNNDLLQLLGMDRSKNFKESICRLVLYSTIGMMAIFSDR

SEQ ID NO: 9414 - protein, 1260 aa, Terrapene carolina
MEKSNLYFYTGLALDRVNNAPAVGFDAPADSVKYIRGVIRVAGPMDKMVWTIMKSHEHESENQVLPVEHGEEVEENVCDDHGEEILSILPMVFTRDTFNDLTMESFNPDFKYLSTFDDPYVSESGYLNAHLVNGSSLLNSFRPSTDFNRDRNKDLNSTGSNINILESSSWKDGVFYLEYPVDSFNCPICPQILPTFGKWAKHINVVHKSKAIRVVCSKCGKSSQYHNIACHYPKCIPKKADTPMKSHTCSVCGLGFHTRSGLSQHCRHRHPAVRNEQRKEDMAAKSKIKEGSTRSRIWTKDEVAQLIQLERKYIGKRNINKCIESEMRTKTNKQISDKRRELAKKKLVVTGDREEVTEVEDIRVNILEIPPPRERIFPLKGHPEVDLVEKICKRGKQSREGREIINSLGEIEGLLKEDLTKALGWAMLEKVCYSLVEGKDPRNESQIELRNKGKGKMRKEGRRKQFNAIRRYATKKAKYKFYQQLFDKDRRRLTRIIMGEPDKAKCAIPMKEIEEYYVNILGTIGHGNMIGWPSSTENADNDILMSPISVDEIRIALREIRKDSAPGPDKVKVSNLWDIFNLDSLILTKIFNIWFLNRQVPDEFKKNRTILIPKTQDEEEMKKLTSWRPLTIGSVWIRIYTKILAKRLVETVKICSRQKGFISAPGCEENIAILDNLIKGAKRNGNEIAIVFVDLAKAFDSVGHGHIIAGLRRFGIDEHFIDIIRDLYDNCTTRVWVGDEATESILIRRGVKQGDPLSPILFNIAMDPLLTRLEVEGSGFYVKGNGVTSLAFADDVAILSSSYKGMIKNLGILEEFCKNTNLSVNVKKTKGFHILTKHKTYVVNPKDNWQIGSEEIEYVQPGDFEKYLGARIDPWIGVGGPVLKEKLKDWSENLIKAPLKPAQKILILQTYILPKLFYNLLLIEPPFNLLDDLDVLVRKIVKEILHLPQCTTDGIFYSRGRDGGLALTKFSVQIPNMLIRKWRRHIVSRDDWMDLSYLYAGENLVDKILSFSAVTSHPKKWREEEFLRWSELRCQGIGIKYFKNDLISNSIFRNSTKVKSSAYIAALQLRANIYPTRETLARGRGGVNALCRWCGKVRETVPHISGQCYKTKNARIKRHNRVVSAVVDKVGKLGWKAMIEPHLRNSKGELRKPDIIFIKGDTAVVVDVTVRWEDNAGSLEQAHSEKVAYYLELEEEIKNLTGGKNIHFFGFVLGARGKWSEGNNDLLQLLGMDRSKNFKESICRLVLYSTIGMMAIFSDR

SEQ ID NO: 9415 - protein, 1260 aa, Terrapene carolina
MEKSNLYFYTGLALDRVNNAPAVGFDAPADSVKYIRGVIRVAGPMDKMVWTIMKSHEHESENQVLPVEHGEEVEENVCDDHGEEILSILPMVFTRDTFNDLTMESFNPDFKYLSTFDDPYVSESGYLNAHLVNGSSLLNSFRPSTDFNRDRNKDLNSTGSNINILESSSWKDGVFYLEYPVDSFNCPICPQILPTFGKWAKHINVVHKSKAIRVVCSKCGKSSQYHNIACHYPKCIPKKADTPMKSHTCSVCGLGFHTRSGLSQHCRHRHPAVRNEQRKEDMAAKSKIKEGSTRSRIWTKDEVAQLIQLERKYIGKRNINKCIESEMKTKTNKQISDKRRELAKKKLVVTGDREEVTEVEDIRVNILEIPPPRERIFPLKGHPEVDLVEKICKRGKQSKEGREIINSLGEIEGLLKEDLTKALGWAMLEKLCYSLVEGKDPRNESQIELRNKGKGKMRKEGRRKQFNAIRRYATKKAKYKFYQQLFDKDRRRLTRIIMGEPDKAKCAIPMKEIEEYYVKIWGTIGHGNMIGWSSSTENADNDILMSPISVDEIRIALREIRKDSAPGPDKVKVSNLWDIFNLDSLILTKNFNIWFLNRQVPDEFKKNRTILIPKTQDEEEMKKLTSWRPLTIGSVWIRIYTKILAKRLVETVKICSRQKGFISAPGCEENIAILDNLIKGAKRNGNEIAIVFVDLAKAFDSVGHGHIIAGLRRFGIDEHFIDIIRDLYDNCTTRVWVGDEATESILIRRGVKQGDPLSPILFNIAMDPLLTRLEVEGSGFYVKGNGVTSLAFADDVAILSSSYKGMIKNLGILEEFCKNTNLSVNVKKTKGFHILTKHKTYVVNPKDNWQIGSEEIEYVQPGDFEKYLGARIDPWIGVGGPVLKEKLNDWSENLIKAPLKPAQKILILQTYILPKLFYNLLLIEPPFNLLDDLDVLVRKIVKEILHLPQCTTDGIFYSRGRDGGLALTKFSVQIPNMLIRKWRRHIVSRDDWMDLSYLYAGENLVDKILSFSAVTSHPKKWREEEFLRWSELKCQGIGIKYFKNDLISNSIFRNSSKVKSSAYIAALQLRANIYPTRETLARGRGGVNALCRWCGKVRETVPHISGQCYKTKNARIKRHNRVVSAVVDKVGKLGWKAMIEPHLRNSKGELRKPDIIFIKGDTAVVVDVTVRWEDNAGSLEQAHSEKVAYYLELEEEIKNLTGGKNIHFFGFVLGARGKWSEGNNDLLQLLGMDRSKNFKESICRLVLYSTIGMMAIFSDR

SEQ ID NO: 9416 - protein, 1260 aa, Terrapene carolina
MEKSNLYFYTGLALDRVNNAPAVGFDAPADSVKYIRGVIRVAGPMDKMLWTIMKSHEHESENQVLPVEHGEEVEENVCDDHGEEILSILPMVFTRDTFNDLTMESFNPDFKYLSTFDDPYVSESGYLNAHLVNGSSLLNSFRPSTDFNRDRNKDLNSTGSNINILESSSWKDGVFYLEYPVDSFNCPICPQILPTFGKWAKHINVVHKSKAIRVVCSKCGKSSQYHNIACHYPKCIPKKADTPMKSHTCSVCGLGFHTRSGLSQHCRHRHPAVRNEQRKEDMAAKSKIKEGSTRSRIWTKDEVAQLIQLERKYIGKRNINKCIESEMRTKTNKQISDKRRELAKKKLVVTGDREEVTEVEDIRVNILEIPPPRERIFPLKGHPEVDLVEKICKRGKQSREGREIINSLGEIEGLLKEDLTKALGWAMLEKVCYSLVEGKDPRNESQIELRNKGKGKMRKEGRRKQFNAIRRYATKKAKYKFYQQLFDKDRRRLTRIIMGEPDKAKCAIPMKEIEEYYVNILGTIGHGNMIGWPSSTENADNDILMSPISVDEIRIALREIRKDSAPGPDKVKVSNLWDIFNLDSLILTKIFNIWFLNRQVPDEFKKNRTILIPKTQDEEEMKKLTSWRPLTIGSVWIRIYTKILAKRLVETVKICSRQKGFISAPGCEENIAILDNLIKGAKRNGNEIAIVFVDLAKAFDSVGHGHIIAGLRRFGIDEHFIDIIRDLYDNCTTRVWVGDEATESILIRRGVKQGDPLSPILFNIAMDPLLTRLEVEGSGFYVKGNGVTSLAFADDVAILSSSYKGMIKNLGILEEFCKNTNLSVNVKKTKGFHILTKHKTYVVNPKDNWQIGSEEIEYVQPGDFEKYLGARIDPWIGVGGPVLKEKLKDWSENLIKAPLKPAQKILILQTYILPKLFYNLLLIEPPFNLLDDLDVLVRKIVKEILHLPQCTTDEIFYSRGRDGGLALTKFSVQIPNMLIRKWRRHIVSRDDWMDLSYLYAGENLVDKILSFSAVTSHPKKWREEEFLRWSELRCQGIGIKYFKNDLISNSIFRNSTKVKSSAYIAALQLRANIYPTRETLARGRGGVNALCRWCGKVRETVPHISGQCYKTKNARIKRHNRVVSAVVDKVGKLGWKAMIEPHLRNSKGELRKPDIIFIKGDTAVVADVTVRWEDNAGSLEQAHSEKVAYYLELEEEIKNLTGGKNIHFFGFVLGARGKWSEGNNDLLQLLGMDRSKNFKESICRLVLYSTIGMMAIFSDR

SEQ ID NO: 9417 - protein, 1259 aa, Terrapene carolina
MEKSNLYFYTGLALDRVNNAPAVGFDAPADSVKYIRGVIRVAGPMDKMVWTIMKSHEHESENQVLPVEHGEEVEENVCDDHGEEILSILPMVFTRDTFNDLTMESFNPDFKYLSTFDDPYVSESGYLNAHLVNGSSLLNSFRPSTDFNRDRNKDLNSTGSNINILESSSWKDGVFYLEYPVDSFNCPICPQILPTFGKWAKHINVVHKSKAIRVVCSKCGKSSQYHNIACHYPKCIPKKADTPMKSHTCSVCGLGFHTRSGLSQHCRHRHPAVRNEQRKEDMAAKSKIKEGSTRSRIWTKDEVAQLIQLERKYIGKRNINKCIESEMRTKTNKQISDKRRELAKKKLVVTGDREEVTEVEDRVNILEIPPPRERIFPLKGHPEVDLVEKICKRGKQSREGREIINSLGEIEGLLKEDLTKALGWAMLEKLCYSLVEGKDPRNESQIELRNKGKGKMRKEGRRKQFNAIRRYATKKAKYKFYQQLFDKDRRRLTRIIMGEPDKAKCAIPMKEIEEYYVNILGTIGPGNMIGWPSSTENADNDILMSPISVDEIRIALREIRKDSAPGPDKVKVSNLWDIFNLDSLILTKIFNIWFLNRQVPDEFKKNRTILIPKTQDEEEMKKLTSWRPLTIGSVWIRIYTKILAKRLVETVKICSRQKGFISAPGCEENIAILDNLIKGAKRNGNEIAIVFVDLAKAFDSVGHGHIIARLRRFGIDEHFIDIIRDLYDNCTTRVWVGDEATESILIRRGVKQGDPLSPILFNIAMDPLLTRLEVEGSGFYVKGNGVTSLAFADDVAILSSSYKGMIKNLGILEEFCKNTNLSVNVKKTKGFHILTKHKTYVVNPKDNWQIGSEEIEYVQPGDFEKYLGARIDPWIGVGGPVLKEKLKDWSENLIKAPLKPAQKILILQTYILPKLFYNLLLIEPPFNLLDDLDVLVRKIVKEILHLPQCTTDGIFYSRGRDGGLALTKFSVQIPNMLIRKWRRHIVSRDDWMDLSYLYAGENLVDKILSFSAVTSHPKKWREEEFLRWSELRCQGIGIKYFKNDLISNSIFRNSSKVKSSAYIAALQLRANIYPTRETLARGRGGVNALCRWCGKVRETVLHISGQCYKTKNARIKRHNRVVSAVVDKVGKLGWKAMIEPHLRNSKGELRKPDIIFIKGDTAVVVDVTVRWEDNAGSLEQAHSEKVAYYLELEEEIKNLTGGKNIHFFGFVLGARGKWSEGNNDLLQLLGMDRSKNFKESICRLVLYSTIGMMAIFSDR

SEQ ID NO: 9418 - protein, 984 aa, Trachemys scripta
MSKEKKIWLLKVKSKRDRLDLVYGPKMRLRIQLERKYIGKRNINKCIESEMRTKTNKQISDKRRELAKKKLVVTGDREEVTEVEDIRVNILEIPPPRERIFPLKGHPEVDLVEKICKRGKQSREGREIINSLGEIEGLLKEDLTKALGWAMLEKLCYSLVEGKDPRNESQIELRNKGKGKMRKKGRRKQFNAIRRYATKKAKYKFYQQLFDKDRRRLTRIIMGEPDKAKCAIPMKEIEEYYVNILGTIGHGNMIGWPSSTENADNDILMSPISVDEIRIALREIRKDSAPGPDKVKVSNLWDIFNLDSLILTKIFNIWFLNRQVPDEFKKNRTILIPKTQDEEEMKKLTSWRPLTIGSVWIRIHTKILAKRLVETVKICSRQKGFISAPGCEENIAILDNLIKGAKRNGNEIAIVFVDLAKAFDSVGHGHIIAGLRRFGIDEHFIDIIRDLYDNCTTRVWVGDEATESILIRRGVKQGDPLSTILFNIAMDPLLTRLEVEGSGFYVKGNSVTSLAFADDVEILSSSYKGMIKNLGILEEFCKNTNFSVNVKKTKGFHILTKYKTYVVNPKDNWQIGSEEIEYVQPGDFEKYLGARIDPWIGVGGPVLKEKLKDWSENLIKAPLKPAQKILILQTYILPKLFYNLLLIEPPFNLLDDLDVLVRKIVKGILHLPQCTTDGIFYSRGRDGGLALTKFSVQIPNMLIRKWRRHIVSRDDWMDLSYLYAGENLVDKILSFSAVTSHPKKWREEEFLRWSELRCQGIGIKYFKNDLISNSIFRNSSKVKSSAYIAALQLRANIYPTRETLARGRGGVNALCRWCGNVRETVPHISGQCYKTKNARIKRHNRVVSAVVDKVGKLGWKAMIEPHLRNSKGELRKPDIIFIKGDTAVVVDVTVQWEDNAGSLEQAHSEKVAYYLELEEEIKNLTGGKNIHFFGFVLGARGKWSEGNNDLLQLLGMDRSKNFKESICRLVLYFTIGMMAIFSDR

SEQ ID NO: 9419 - protein, 1260 aa, Actinemys marmorata
MEKSNLYFYTGLALDRVNNAPAVGFDAPADSVKYIRGVIRVAGPMDKMVWTIMKSHEHESENQVLPVEHGEEVEENVCDDHGEEILSILPMVFTRDTFNDLTMESFNPDFKYLSTFDDPYVRESGYLNAHLVNGSSLLNSFRPSTDFNRDRNKDLNSTGSNINILESSSWKDGVFYLEYPVDSFNCPICPQILPTFGKWAKHINVVHKSKAIRVVCSKCGKSSQYHNIACHYPKCIPKKADTPMKSHTCSVCGLGFHTRSGLSQHCRHRHPAVRNEQRKEDMAAKSKIKEGSTRSRIWTKDEVAQLIQLERKYIGKRNINKCIESEMRTKTNKQISDKRRELAKKKLVVTGDREEVTEVEDIRVNILEIPPPRERIFPLKGHPEVDLVEKICKRGKQSREGREIINSLGEIEGLLKEDLTKALGWAMLEKLCYSLVEGKDPRNESQIELRNKGKGKMRKEGRRKQFNAIRRYATKKAKYKFYQQLFDKDRRRLTRIIMGEPDKAKCAIPMKEIEEYYVNILGTIGHGNMIGWPSSTENADNDILMSPISVDEIRIALREIRKDSAPGPDKVKVSNLWDIFNLDSLILTKFFNIWFLNRQVPDEFKKNRTILIPKTQDEEEMKKLTSWRPLTIGSVWIRIYTKILAKRLVETVKICSRQKGFISAPGCEENIAILDNLIKGAKRNGNEIAIVFVDLAKAFDSVGHGHIIAGLRRFGIDEHFIDIIRDLYDNCTTRVWVGDEATESILIRRGVKQGDPLSPILFNIAMDPLLTRLEVEGSGFYVKGNSVTSLAFADDVAILSSSYKGMIKNLGILEEFCKNTNLSVNVKKTKGFHILTKHKTYVVNPKDNWQIGSEEIEYVQPGDFEKYLGARIDPWIGVGGPVLKEKLKDWSENLIKAPLKPAQKILILQTYILPKLFYNLLLIEPPFNLLDDLDVLVRKIVKEILHLPQCTTDGIFYSRGRDGGLALTKFSVQIPNMLIRKWRRHIVSRDDWMDLSYLYAGENLVDKILSFSAVTSHPKKWREEEFLRWSELRCQGIGIKYFKNDLISNSIFRNSSKVKSSAYIAALQLRANIYPTRETLARGRGGVNALCRWCGKVRETVPHISGQCYKTKNARIKRHNRVVSAVVDKVGKLGWKAMIEPHLRNSKGELRKPDIIFIKGDTAVVVDVTVRWEDNAGSLEQAHSQKVAYYLELEEEIKNLTGGKNIHFFGFVLGARGKWSEGNNDLLQLLGMDRSKNFKESICRLVLYSTIGMMAIFSDR

SEQ ID NO: 9420 - protein, 1004 aa, Chrysemys picta
MKSHTCSVCGLGFHTRSGLSQHCRHRHPAVRNEQRKEDMAAKSKIKEGSTRSRIWTKDEVAQLIQLERKYIGKRNINKCIESEMRTKTNKQISDKRRELAKKKLVVTGDREEVTEVEDIRVNILEIPPPREMIFPLKGHPEVDLVEKICKRGKQSREGREIINSLGEIEGLLKEDLTKALGWAMLEKLCYSLVEGKDPRNESQIELRNKGKGKMRKEGRRKQFTAIRRYATKKAKYKFYQQLFDKDRRRLTRIIMGEPDKAKCAIPMKEIEEYYVNILGTIGHGNMIGWPSSTENADNDILMSPISVDEIRIALREIRKDSAPGPDKVKVSNLWDIFNLDSLILTKNFNIWFLNRQVPDEFKKNRTILIPKTQDEEEMKKLTSWRPLTIGSVWIRIYTKILAKRLVETVKICSRQKGFISAPGCEENIAILDNLIKGAKRNGNEIAIVFVDLAKAFDSVGHGHIIAGLRRFGIDEHFIDIIRDLYDNCTTRVWVGDEAIESILIRRGVKQGDPLSPILFNIAMDPLLTRLEVEGSGFYVKGNSVTSLAFADDVAILSSSYKGMIKNLGILEEFCKNTNLSVNVKKTKGFHILTKYKTYVVNPKDNWQIGSEEIEYVQPGDFEKYLGARIDPWIGVGGPVLKEKLKDWSENLIKAPLKPAPKILILQTYILLKLFYNLLLIEPPFNLLDDLDVLVRKIVKEILHLPQCTTDGIFYSRGRDGGLALIKFSVQIPNMLIRKWRRHIVSRDDWMDLSYLYAGENLVDKILLFSAVTSHPKKWREEEFLRWSELRCQGVGIKYFKNDLISNSIFRNSSKVKSSAYIAALQLRANIYPTRETLARGRGGVNALCRWCGKVRETVPHISGQCYKTKNARIKRHNRVVSAVVDKVGKLGWKAIIEPHLRNSKGELRKPDIIFIKGDTAVVVDVTVRWEDNAGSLEQAHSEKVAYYLELEEEIKNLTGGKNIHFFGFVLGARGKWSEGNNDLLQLLGMDRSKNFKESICRLLV

SEQ ID NO: 9421 - protein, 1241 aa, Chrysemys picta
MEKSNLYFYTGLALDRVNNAPAVGFDAPADSVKYIRGVIRVAGPMDKMVWTIMKSHENESENQVLPVEHGEEVEENVCDDHGEEILSILPMVFTRDTFNDLTMDSFNPDFKYLSTFDDPYVRESSTDFNRDRNKDLNSIGSNINILESSSWKDGVFYLEYPVDSFNCPICPQILPTFGKWAKHINVVHKSKAIRVVCSKCGKSSQYHNIACHYPKCIPKKADTPMKSHTCSVCGLGFHTRSGLSQHCRHRHPAVRNEQRKEDMAAKSKIKEGSTRSRIWTKDEVAQLIQLERKYIGKRNINKCIESEMRTKTNKQISDKRRELAKKKLVVTGDREEVTEVEDIRVNILEIPPPRERIFPLKGHPEVDLVEKICKRGKQSREGREIINSLGEIEGLLKEDLTKALGWAMLEKLCYSLVEGQDPRNESQIELRNKGKGKIRKEGRRKQFNAIRRYATKKAKYKFYQQLFDKDRRRLTRIIMGEPDKAKCAIPMKEIEEYYVNILGTIGHGNMIGWPSSTENADNDILMSPISVDEIRIALTEIRKDSAPGPDKVKVSNLWDIFNLDSLILTKIFNIWFLNRQVPDEFKKNRTILIPKTEDEEEMKKLTSWRPLTIGSVWIRIYTKILAKRLVEIVKICSRQKGFISAPGCEENIAILDNLIKGAKRNGNEIAIVFVDLAKAFDSVGHGHIIAGLRRFGIDEHFIDIIRDLYDNCTTRVWVGDEATESILIRRGVKQGDPLSPILFNIAMDPLLTRLEVEGSGFYVKGNSVTSLAFADDVAILSSSYKGMIKNLGILEEFCKNTNLSVNVKKTKGFHILTKHKTYVVNPKDNWQIGSEKIEYVQPGDFEKYLGARIDPWIGVGGPVLKEKLKDWSENLIKAPLKPAQKILILQTYILPKLFYNLLLIEPPFNLLDDLDVLVRKIVKEILHLPQCTTDGIFYSRGRDGGLALTKFSVQIPNMLIRKWRRHIVSRDDWMDLSYLYAGENLVDKILSFSAVTSHPKKWREEEFLRWSELRCQGIGIKYFKNDLISNSIFRNSSKVKSSAYIAALQLRANIYPTRETLARGRGGVNALCRWCGKVRETVPHISGQCYKTKNAKIKRHNRVVSAVVDKVGKLGWKAMIEPHLRNSKGELRKPDIIFIKGDTAVVVDVTVRWEDNAGSLEQAHSEKVAYYLELEEEIKNLTGGKNIHFFGFVLGARGKWSEGNNDLLQLLGMDRSKNFKESICRLVLYSTIGMMAIFSDR

SEQ ID NO: 9422 - protein, 1241 aa, Chrysemys picta
MEKSNLYFYTGLALDRVNNAPAVGFDAPADSVKYIRGVIRVAGPMDKMVSTIMKSHENESENQVLPVEHGEEVEENVCDDHGEEILSILPMVFTRDTFNDLTMDSFNPDFKYLSTFDDPYVRESSTDFNRDRNKDLNSIGSNINILESSSWKDGVFYLEYPVDSFNCPICPQILPTFGKWAKHINVVHKSKAIRVVCSKCGKSSQYHNIACHYPKCIPKKADTPMKSHMCSVCGLGFHTRSGLSQHCRHRHPAVRNEQRKEDMAAKSKIKEGSTRSRIWTKDEVAQLIQLERKYIGKRNINKCIESEMRTKTNKQISDKRRELAKKKLVVTGDREEVTEVEDIRVNILEIPPPRERIFPLKGHPEVDLVEKICKRGKQSREGREIINSLGEIEGLLKEDLTKALGWAMLEKLCYSLVEGQDPRNESQIELRNKGKGKIRKEGRRKQFNAIRRYATKKAKYKFYQQLFDKDRRRLTRIIMGEPDKAKCAIPMKEIEEYYVNILGTIGHGNMIGWPSSTENADNDILMSPISVDEIRIALTEIRKDSAPGPDKVKVSNLWDIFNLDSLILTKIFNIWFQNRQVPDEFKKNRTILIPKTQDEEEMKKLTSWRPLTIGSVWIRIYTKILAKRLVETVKICSRQKRFISAPGCEENIAILDNLIKGAKRNGNEIAIVFVDLAKAFDSVGHGHIIAGLRRFGIDEHFIDIIRDLYDNCTTRVWVGDEATESILIRRGVKQGDPLSPILFNIAMDPLLTRLEVEGSGFYVKGNSVTSLAFADDVAILSSSYKGMIKNLGILEEFCKNTNLSVNVKKTKGFHILTKHKTYVVNPKDNWQIGSEKIEYVQPGDFEKYLGARIDPWIGVGGPVLKEKLKDWSENLIKAPLKPAQKILILQTYILPKLFYNLLLIEPPFNLLDDLDVLVRKIVKEILHLPQCTTDGIFYSRGRDGGLALTKFSVQIPNMLIRKWRRHIVSRDDWMDLSYLYAGENLVDKILSFSAVTSHPKKWREEEFLRWSELRCQGIGIKYFKNDLISNSIFRNSSKVKSSAYIAALQLRANIYPTRETLARGRGGVNALCRWCGKVRETVPHISGQCYKTKNARIKRHNRVVSAVVDKVGKLGWKAMIEPHLRNSKGELRKPDIIFIKGDTAVVVDVTVRWEDNAGSLEQAHSEKVAYYLELEEEIKNLTGGKNIHFFGFVLGARGKWSEGNNDLLQLLGMDRSKNFKESICRLVLYSTIGMMAIFSDR

SEQ ID NO: 9423 - protein, 1241 aa, Chrysemys picta
MEKSNLYFYTGLALDRVNNAPAVGFDAPADSVKYIRGVIRVAGPMDKMVWTIMKSHENESENQVLPVEHGEEVEENVCDDHGEEILSILPMVFTRDTFNDLTMDSFNPDFKYLSTFDDPYVRESSTDFNRDRNKDLNSIGSNINILESSSWKDGVFYLEYPVDSFNCPICPQILPTFGKWAKNINVVHKSKAIRVVCSKCGKSSQYHNIACHYPKCIPKKADTPMKSHTCSVCGLGFHTRSGLSQHCRHRHPAVRNEQRKEDMAAKSKIKEGSTRSRIWTKDEVAQLIQLERKYIGKRNINKCIESEMRTKTNKQISDKRRELAKKKLVVTGDREEVTEVEDIRVNILEIPPPRERIFPLKGHPEVDLVEKICKRGKQSREGREIINSLGEIEGLLKEDLTKALGWAMLEKLCYSLVEGQDPRNESQIELRNKGKGKIRKEGRRKQFNAIRRYATKKAKYKFYQQLFDKDRRRLTRIIMGEPDKAKCAIPMKEIEEYYVNILGTIGHGNMIGWPSSTENADNDILMSPISVDEIRIALTEIRKDSAPGPDKVKVSNLWDIFNLDSLILTKNFNIWFLNRQVPDEFKKNRTILIPKTQDEEEMKKLTSWRPLTIGSVWIRIYTKILAKRLVETVKICSRQKGFISAPGCEENIAILDNLIKGAKRNGNEIAIVFVDLAKAFDSVGHGHIIAGLRRFGIDEHFIDIIRDLYDNCTTRVWVGDEATESILIRRGVKQGDPLSPILFNIATDPLLTRLEVEGSGFYVKGNSVTSLAFADDVAILSSSYKGMIKNLGILEEFCKNTNLSVNVKKTKGFHILTKHKTYVVNPKDNWQIGSEKIEYVQPGDFEKYLGARIDPWIGVGGPVLKEKLKDWSENLIKAPLKPAPKILILQTYILPKLFYNLLLIEPPFNLLDDLDVLVRKIVKEILHLPQCTTDGIFYSRGRDGGLALTKFSVQIPNMLIRKWRRYIVSRDDWMDLSYLYAGENLVDKILSFSAVTSHPKKWREEEFLRWSELRCQGIGIKYFKNDLISNSIFRNSSKVKSSAYIAALQLRANIYPTRETLARGRGGVNDLCRWCGKVRETVPHISGQCYKTKNARIKRHNRVVSAVVDKVGKLGWKAMIEPHLRNSKGELRKPDIIFIKGDTAVVVDVTVRWEDNAGSLEQAHSEKVAYYLELEEEIKNLTGGKNIHFFGFVLGARGKWSEGNNDLLQLLGMDRSKHFKESICRLVLYSTIGMMAIFSDR

SEQ ID NO: 9424 - protein, 934 aa, Terrapene carolina
MRTKTNKQISDKRRELAKKKLVVTGDREEVTEVEDIRVNILEIPPPRERIFPLKGHPEVDLVEKICKRGKQSREGREIINSLGEIEGLLKEDLTKALGWAMLEKLCYSLVEGKDPRNESQIELRNKGKGKMRKEGRRKQFNAIRRYATKKAKYKFYQQLFDKDRRRLTRIIMGEPDKAKCAIPMKEIEEYYVNILGTIGHGNMIGWPSSTENADNDILMSPISVDEIRIALREIRKDSAPGPDKVKVSNLWDIFNLDSLILTKNFNIWFLNRQVPDEFKKNRTILIPKTQDEEEMKKLTSWRPLTIGSVWIRIYTKILAKRLVETVKICSRQKGFISAPGCEENIAILDNLIKGAKRNGNEIAIVFVDLAKAFDSVGHGHIIAGLRRFGIDEHFIDIIRDLYDNCTTRVWVGDEATESILIRRVVKQGDPLSPILFNIAMDPLLTRLEVEGSGFYVKGNGVTSLAFADDVAILSSSYKGMIKNLGILEEFCKNTNLSVNVKKTKGFHILTKHKTYVVNPKDNWQIGSEEIEYVQPGDFEKYLGARIDPWIGVGGPVLKEKLKDWSENLIKAPLKPAQKILILQTYILPKLFYNLLLIEPPFNLLDDLDVLVRKIVKEILHLPQCITDGIFYSRGRDGGLALTKFSVQIPNMLIRKWRRHIVSRDDWMYLSYLYAGENLVDKILSFSAVTSHPKKWREEEFLRWSELRCQGIGIKYFKNDLISNSIFRNSSKVKSSAYIAALQLRANIYPTRETLARGRGGVNALCRWCSKVRETVPHISGQCYKTKNARIKRHNRVVSAVVDKVGKLGWKAMIEPHLRNSKGELRKPDIIFIKGDTAVVVDVTVRWEDNAVSLEQAHSEKVAYYLELEEEIKNLTGGKNIHFFGFVLGARGKWSEGNNDLLQLLGMDRSKNFKESICRLVLYSTIGMMAIFSDR

SEQ ID NO: 9425 - protein, 1260 aa, Terrapene carolina
MEKSNLYFYTGLALDRVNNAPAVGFDAPADSVKYIRGVIRVAGPMDKMVWTIMKSHEHESENQVLPVEHGEEVEENVCDDHGEEILSILPMVFTRDTFNDLTMESFNPDFKYLSTFDDPYVSESGYLNAHLVNGSSLLNSFRPSTDFNRDRNKDLNSTGSNINILESSSWKDGVFYLEYPVDSFNCPICPQILPTLGKWAKHINVVHKSKAIRVVCSKCGKSSQYHNIACHYPKCIPKKADTPMKSHTCSVCGLGFHTRSGLSQHCRHRHPAVRNEQRKEDMAAKSKIKEGSTRSRIWTKDEVAQLIQLERKYIGKRNINKCIESEMRTKTNKQISDKRRELAKKKLVVTGDREEVTEVEDIRVNILEIPPPRERIFPLKGHPEVNLVEKICKRGKQSREGREIINSLGEIEGLLKEDLTKALGWAMLEKVCYSLVEGKDPRNESQIELRNKGKGKMRKEGRRKQFNAIRRYATKKAKYKFYQQLFDKDRRRLTRIIMGEPDKAKCAIPMKEIEEYYVNILGTIGHGNMIGWPSSTENADNDILMSPISVDEIRIALREIRKDSAPGPDKVKVSNLWDIFNLDSLILTKIFNIWFLNRQVPDEFKKNRTILIPKTQDEEEMKKLTSWRPLTIGSVWIRIYTKILAKRLVETVKICSRQKGFISAPGCEENIAILDNLIKGAKRNGNEIAIVFVDLAKAFDSVGHGHIIAGLRRFGIDEHFIDIIRDLYDNCTTRVWVGDEATESILIRRGVKQGDPLSPILFNIAMDPLLTRLEVEGSGFYVKGNGVTSLAFADDVAILSSSYKGMIKNLGILEEFCKNTNLSVNVKKTKGFHILTKHKTYVVNPKDNWQIGSEEIEYVQPGDFEKYLGARIDPWIGVGGPVLKEKLKDWSENLIKAPLKPAQKILILQTYILPKLFYNLLLIEPPFNLLDDLDVLVRKIVKEILHLPQCTTDGIFYSRGRDGGLALTKFSVQIPNMLIRKWRRHIVSRDDWMDLSYLYAGENLVDKILSFSAVTSHPKKWREEEFLRWSELRCQGIGIKYFKNDLISNSIFRNSTKVKSSAYIAALQLRANIYPTRETLARGRGGVNALCRWCGKVRETVPHISGQCYKTKNARIKRHNRVVSAVVDKVGKLGWKAMIEPHLRNSKGELRKPDIIFIKGDTAVVVDVTVRWEDNAGSLEQAHSEKVAYYLELEEEIKNLTGGKNIHFFGFVLGARGKWSEGNNDLLQLLGMDRSKNFKESICRLVLYSTIGMMAIFSDR

SEQ ID NO: 9426 - protein, 1260 aa, Terrapene carolina
MEKSNLYFYTGLALDRVNNAPAVGFDAPADSVKYIRGVIRVAGPMDKMVWTIMKSHEHESENQVLPVEHGEEVEENVCDDHGEEILSILPMVFTRDTFNDLTMESFNPDFKYLSTFDDPYVSESGYLNAHLVNGSSLLNSFRPSTDFNRDRNKDLNSTGSNINILESSSWKDGVFYLEYPVDSFNCPICPQILPTFGKWAKHINVVHKSKAIRVVCSKCGKSSQYHNIACHYPKCIPKKADTPRKSHTCSVCGLGFHTRSGLSQHCRHRHPAVRNEQRKEDMAAKSKIKEGSTRSRIWTKDEVAQLIQLERKYIGKRNINKCIESEMRTKTNKQISDKRRELAKKKLVVTGDREEVTEVEDIRVNILEIPPPRERIFPLKGHPEVDLVEKICKRGKQSREGREIINSLGEIEGLLKEDLTKALGWAMLEKVCYSLVEGKDPRNESQIELRNKGKGKMRKEGRRKQFNAIRRYATKKAKYKFYQQLFDKDRRRLTRIIMGEPDKAKCAIPMKEIEEYYVNILGTIGHGNMIGWPSSTENADNDILMSPISVDEIRIALREIRKDSAPGPDKVKVSNLWDIFNLDSLILTKIFNIWFLNRQVPDEFKKNRTILIPKTQDEEEMKKLTSWRPLTIGSVWIRIYTKILAKRLVETVKICSRQKGFISAPGCEENIAILDNLIKGAKRNGNEIAIVFVDLAKAFDSVGHGHIIAGLRRFGIDEHFIDIIRDLYDNCTTRVWVGDEATESILIRRGVKQGDPLSPILFNIAMDPLLTRLEVEGSGFYVKGNGVTSLAFADDVAILSSSYKGMIKNLGILEEFCKNTNLSVNVKKTKGFHILTKHKTYVVNPKNNWQIGSEEIEYVQPGDFEKYLGARIDPWIGVGGPVLKEKLKDWSENLIKAPLKPAQKVLILQTYILPKLFYNLLLIEPPFNLLDDLDVLVRKIVKEILHLPQCTTDGIFYSRGRDGGLALTKFSVQIPNMLIRKWRRHIVSRDDWMDLSYLYAGENLVDKILSFSAVTSHPKKWREEEFLRWSELRCQGIGIKYFKNDLISNSIFRNSTKVKSSAYIAALQLRANIYPTRETLARGRGGVNALCRWCGKVRETVPHISGQCYKTKNARIKRHNRVVSAVVDKVGKLGWKAMIEPHLRNSKGELRKPDIIFIKGDTAVVVDVTVRWEDNAGSLEQAHSEKVAYYLELEEEIKNLTGGKNIHFFGFVLGARGKWSEGNNDLLQLLGMDRSKNFKESICRLVLYSTIGMMAIFSDR

SEQ ID NO: 9427 - protein, 1260 aa, Terrapene carolina
MEKSNLYFYTGLALDRVNNAPAVGFDAPADSVKYIRGVIRVAGPMDKMVWTIMKSHEHESENQVLPVEHGEEVEENVCDDHGEEILSILPMVFTRDTFNDLTMESFNPDFKYLSTFDDPYVSESGYLNAHLVNGSSLLNSFRPSTDFNRDRNKDLNSTGSNINILESSSWKDGVFYLEYPVDSFNCPICPQILPTFGKWAKHINVVHKSKAIRVVCSKCGKSSQYHNIACHYPKCIPKKADTPMKSHTCSVCGLGFHTRSGLSQHCRHRHPAVRNEQRKEDMAAKSKIKEGSTRSRIWTKDEVAQLIQLERKYIGKRNINKCIESEMRTKTNKQISDKRRELAKKKLVVTGDREEVTEVEDIRVNILEIPPPRERIFPLKGHPEVDLVEKICKRGKQSREGREIINSLGEIEGLLKEDLTKALGWAMLEKVCYSLVEGKDPRNESQIELRNKGKGKMRKEGRRKQFNAIKRYATKKAKYKFYQQLFDKDRRRLTRIIMGEPDKAKCAIPMKEIEEYYVNILGTIGHGNMIGWPSSTENADNDILMSPISVDEIRIALREIRKDSAPGPDKVKVSNLWDIFNLDSLILTKIFNIWFLNRQVPDEFKKNRTILIPKTQDEEEMKKLTSWRPLTIGSVWIRIYTKILAKRLVETVKICSRQKGFISAPGCEENIAILDNLIKGAKRNGNEIAIVFVDLAKAFDSVGHGHIIAGLRRFSIDEHFIDIIRDLYDNCTTRVWVGDEATESILIRRGVKQGDPLSPILFNIAMDPLLTRLEVEGSGFYVKGNGVTSLAFADDVAILSSSYKGMIKNLGILEEFCKNTNLSVNVKKTKGFHILTKHKTYVVNPKDNWQIGSEEIEYVQPGDFEKYLGARIDPWIGVGGPVLKEKLKDWSENLIKAPLKPAQKILILQTYILPKLFYNLLLIEPPFNLLDDLDVLVRKIVKEILHLPQCTTDGIFYSRGRDGGLALTKFSVQIPNMLIRKWRRHIVSRDDWMDLSYLYAGENLVDKILSFSAVTSHPKKWREEEFLRWSELRCQGIGIKYFKNDLISNSIFRNSTKVKSSAYIAALQLRANIYPTRETLARGRGGVNALCRWCGKVRETVPHISGQCYKTKNARIKRHNRVVFAVVDKVGKLGWKAMIEPHLRNSKGELRKPDIIFIKGDTAVVVDVTVRWEDNAGSLEQAHSEKVAYYLELEEEIKNLTGGKNIHFFGFVLGARGKWSEGNNDLLQLLGMDRSKNFKESICRLVLYSTIGMMAIFSDR

SEQ ID NO: 9428 - protein, 1260 aa, Trachemys scripta
MEKSNLYFYTGLALDRVNNAPAVGFDAPADSVKYIRGVIRVAGPMDKMVWTIMKSHENESENQVLPVEHGEEVEENVYDDHGEEILSILPMVFTRDTFNDLTMDSFNPDFKYLSTFDDPYVRESGYLNAHLVNGSSLLNSFRPSTDCNRDRNKDLNSTGSNINILESSSWKDRVFYLEYPVDSFNCPICPQILPTFGKWAKHINVVHKSKAIRVVCSKCGKSSQYHNIACHYPKCIPKKADTPMKSHTCSVCGLGFHTRSGLSQHCRHRHPAVRNEQRKEDMAAKSKIKEGSTRSRIWTKDEVAQLIQLERKYTGKRNINKCIESEMRTKTNKQISDKRRELAKKKLVVTGDREEVTEVEDIRVNILEILPPRERIFPLKGHPEVDLVEKICKRGKQSREEREIINSLGEIEGLLKEDLTKALGWAMLEKLCYSLVEGKDPRNESQIELRNKGKGKMRKEGRRKQFNAIRRYATKKAKYKFYQQLFDKDRRRLTRIIMGEPDKAKCAIPMKEIEEYYVNILGTIGHGNMIGWPSSTENADNDILMSPISVDEIRIALTEIRKDSAPGPDKVKVSNLWDIFNLDSLILTKIFNIWFLNRQVPDEFKKNRTILIPKTQDEEEMKKLTSWRPLTIGSVWIRIYTKILAKRLVETVKICSRQKGFISTPGCEENIAILDNLIKGAKRNGNEIAIVFVDLAKAFDSVVHGHIIAGLRRFGIDEHFIDIIRDLYDNCTTRVWVGDEATESILIRRGVKQGDPLSPILFNIAMDPLLTRLEVEGSGFYVKGNSVTSLAFADDVAILSSSYKGMIKNLGILEEFCKNTNLSVNVKKTKGFHILTKHKTYVVNPKDNWQIGSEEIEYVQPGDFEKYLGARIDPWIGVGGPVLKEKLKDWSENLIKAPLKPAQKILILQTYILPKLFYNLLLIEPPFNLLDDLDVLVRKIVKEILHLSQCTTDGIFYSRGRDGGLALTKFSVQIPNMLIRKWRRHIVSRDDWMDLSYLYAGENLVDKILSFSAITSHPKKWREEEFLRWSELRCQGIGIKYFKNDLISNSIFRNSSKVKSSAYIAALQLRANIYPTRETLARGRGGVNALCRWCGKVRETVPHISGQCYKTKNARIKRHNRVVSAVVDKVGKLGWKARIEPHLRNSKGELRKPDIIFIKGDTAVVVDVTVRWEDNAGSLEQAHSEKVAYYLELEEEIKNLTGGKNIHFFGFVLGARGKWSEGNNDLLQLLGMDRSKNFKESICRLVLYSTIGMMAIFSDR

SEQ ID NO: 9429 - protein, 1260 aa, Actinemys marmorata
MEKSNLYFYTGLALDRVNNAPAVGFDAPADSVKYIRGVIRVAGPMDKMVWTIMKSHEHESENQVLPVEHGEEVEENVCDDHGEEILSILPMVFTRDTFNDLTMESFNPDFKYLSTFDDPYVRESGYLNAHLVNGSSLLNSFRPSTDFNRDRNKDLNSTGSNINILESSSWKDGVFYLEYPVDSFNCPICPQILPTFGKWAKHINVVHKSKAIRVVCSKCGKSSQYHNIACHYPKCIPKKADTPMKSHTCSVCGLGFHTRSGLSQHCRHRHPAVRNEQRKEDMAAKSKIKEGSIRSRIWTKDEVAQLIQLERKYIGKRNINKCIESEMRTKTNKQISDKRRELAKKKLVVTGDREEVTEVEDIRVNILEIPPPRERIFPLKGHPEVDLVEKICKRGKQSREGREIINSLGEIEGLLKEDLTKALGWAMLEKLCYSLVEGKDPRNESQIELRNKGKGKMRKEGRRKQFNAIRRYATKKAKYKFYQQLFDKDRRRLTRIIMGEPDKAKCAIPMKEIEEYYVNILGTIGHGNMIGWPSSTENADNDILMSPISVDEIRIALREIRKDSAPGPDKVKVSNLWDIFNLDSLILTKIFNIWFLNRQVPDEFKKNRTILIPKTQDEEEMKKLTSWRPLTIGSVWIRIYTKILAKRLVETVKICSRQKGFISAPGCEENIAILDNLIKGAKRNGNEIAIVFVDLAKAFDSVGHGHIIAGLRRFGIDEHFIDIIRDLYDNCTTRVWVGDEATESILIRRGVKQGDPLSPILFNIAMDPLLTRLEVEGSGFYVKGNSVTSLAFADDVAILSSSYKGMIKNLGILEEFCKNTNLSVNVKKTKGFHILTKHKTYVVNPKDNWQIGSEEIEYVQPGDFEKYLGARIDPWIGVGGPVLKEKLKDWSENLIKAPLKPAQKILILQTYILPKLFYNLLLIEPPFNLLDDLDVLVRKIVKKILHLPQCTTDGIFYSRGRDGGLALTKFSVQIPNMLIRKWRRHIVSRDDWMDLSYLYAGENLVDKILSFSAVTSHPKKWREEEFLRWSELRCQGIGIKYFKNDLISNSIFRNSSKVKSSAYIAALQLRANIYPTRETLARGRGGVNALCRWCGKVRETVPHISGQCYKTKNARIKRHNRVVSAVVDKVGKLGWKAMIEPHLRNSKGELRKPDIIFIKGDTAVVVDVTVRWEDNAGSLEQAHSEKVAYYLELEEEIKNLTGGKNIHFFGFVLGARGKWSEGNNDLLQLLGMDRSKNFKESICRLVLYSTIGMMAIFSDR

SEQ ID NO: 9430 - protein, 1258 aa, Chrysemys picta
MEKSNLYFYTGLALDRVNNAPAVGFDAPADSVKYIRGVIRVAGQMDKMVWTIMKSHENESENQVLPVEHGEEVEENVCDDRGEEILSILPMVFTRDTFNDLTMDSFNPDFKYLSTFDDPYVRESGYLNAHLVNGSSLLNSFRPSTDFNRDRNKDLNSTGGNINILESSSWKDGVFYLEYPVDSFNCPICPQILPTFGKWAKHINVVHKSKAIRVVCSKCGKSSQYHNIACHYPKCIPKKADTPMKSHMCSVCGLGFHTRSGLSQHCRHRHPAVRNEQRKEDMAAKSKIKEGSTRSRIWTKDEVAQLIQLERKYIGKRNINKCIESEMRTKTNKQISDKRRELAKKKLVVTGNREEVTEVEDIRVNILEIPPPRERIFPLKGHPEVDLVEKICKRGKQSREGREIINSLGEIEGLLKEDLTKALGWAMSEKLCYSLVEGKDPRNESQIELRNKGKGKMRKEGRRKQFNVIRRYATKKAKYKFYQQLFDKDRRRLTRIIMGEPDKAKCAIPMKEIEEYYVNILGTIGHGNMIGWPSSTENADNDILMSPISVDEIRIALREIRKDSAPGPDKVKVSNLWDIFNLDSLILFFNIWFLNRQVPDEFKKNRTILIPKTQDEEEMKKLTSWRPLTIGSVWIRIYTKILAKRLVETVKICSRQKGFISTPGCEENIAILDNLIKGAKRNGNEIAIVFVDLAKAFDSVGHGHIIAGLRRFGIDEHFIDIIRDLYDNCTTRVWVGDEATESILIRRGVKQGDPLSPILFNIAMDPLLTRLEVEGSGFYVKGNSVTSLAFADDVAILSSSYKGMIKNLGILEEFCKNTNLSVNVKKTKGFHILTKHKTYVVNPKDNWQIGSEEIEYVQPGDFEKYLGNRIDPWIGVGGPVLKEKLKDWSENLIKAPLKPAPKILILQTYILPKLFYNLLLIEPPFNLLDDLDVLVRKIVKEILHLPQCTTDGIFYSRGRDGGLALTKFSVQIPNMLIRKWRRHIVSRDDWMDLSYLYAGENLVDKILSFSAVTSHPKKWREEEFLRWSELRCQGIGIKYFKNDLISNSIFRNSSKVKSSAYIAALQLRANIYPTRETLARGRGGVNALCRWCGKVRETVPHISGQCYKTKNARIKRHNRVVSAVVDKVGKLGWKAMIEPHLRNSKGELRKPDIIFIKGDTAVVVDVTVRWEDNAGSLEQAHSEKVAYYLELEEEIKNLTGGKNIHFFGFVLGARGKWSEGNNELLQLLGMDKSKNFKESICRLVLYSTIGMMAIFSDR

SEQ ID NO: 9431 - protein, 834 aa, Chrysemys picta
MLEKLCYSLVEGKDPRNESQIELRNKGKGKMRKEGRRKQFNAIRRYATKKAKYKFYQQLFDKDRRRLTRIIMGEPDKAKCAIPMKEIEEYYVNILGTIGHGNMIGWPSSTENADNDILMSPISVDEIRIALREIRKDSAPGPDKVKVSNLWDIFNLDSLILTKIFNIWFLNRQVPDEFKKNRTILIPKTQDEEEMKKLTSWRPLTIGSVWIRIYTKILAKRLVETVKICSRQKGFISAPGCEENIAILDNLIKGAKRNGNEIAIVFVDLAKAFDSVGHGHIIAGLRRFGIDEHFIDIIRDLYDNCTTRVWVGDEATESILIRRGVKQGDPLSPILFNIAMDPLLTRLEVEGSGFYVKGNSVTSLAFADDVAILSSSYKGMIKNLGILEEFCKNTNLSVNVKKTKGFHILTKHKTYVVNPKDNWQIGSEKIEYVQPGDFEKYLGARIDPWIGVGGPVLKEKLKDWSENLIKAPLKPAQKILILQTYILPKLFYNLLLIEPPFNLLDDLDVLVRKIVKEILHLPQCTTDGIFYSRGRDGGLALTKFSVQIPNMLIRKWRRHIVSRDDWMDLSYLYAGENLVDKILSFSAVTSHPKKWREEEFLRWSELRCQGIGIKYFKNDLISNSIFRNSSKVKSSAYIAALQLRANIYPTRETLARGRGGVNALCRWCGKVRETVPHISGQCYKTKNARIKRHNRVVSAVVDKVGKLGWKAMIEPHLRNSKGELRKPDIIFIKGDTAVVVDVTVRWEDNAGSLEQAHSEKVAYYLELEEEIKNLTGGKNIHFFGFVLGARGKWSEGNNDLLQLLGMDRSKNFKESICRLVLYSTIGMMAIFSDR

SEQ ID NO: 9432 - protein, 1260 aa, Terrapene carolina
MEKSNLYFYTGLALDRVNNAPAVGFDAPADSVKYIRGVIRVAGPMDKMVWTIMKSHEHESENQVLPVEHGEEVEENVCDDHGEEILSILPMVFTRDTFNDLTMESFNPDFKYLSTFDDPYVSESGYLNAHLVNGSSLLNSFRPSTDFNRDRNKDLNSTGSNINILESSSWKDGVFYLEYPVDSFNCPICPQILPTFGKWAKHINVVHKSKAIRVVCSKCGKSSQYHNIACHYPKCIPKKADTPMKSHTCSVCGLGFHTRSGLSQHCRHRHPAVRNEQRKEDMAAKSKIKEGSTRSRIWTKDEVAQLIQLERKYIGKRNINKCIESEMRTKTNKQISDKRRELAKKKLVVTGDREEVTEVEDIRVNILEIPPPRERIFPLKGHPEVDLVEKICKRGKQSREGREIINSLGEIEGLLKEDLTKALGWAMLEKVCYSLVEGKDPRNESQIELRNKGKGKMRKEGRRKQFNAIRRYATKKAKYKFYQQLFDKDRRRLTRIIMGEPDKAKCAIPMKEIEEYYVNILGTIGHGNMIGWPSSTENADNDILMSPISVDEIRIALREIRKDSAPGPDKVKVSNLWDIFNLDSLILTKIFNIWFLNRQVPDEFKKNRTILIPKTQDEEEMKKLTSWRPLTIGSVWIRIYTKILAKRLVETVKICSRQKGFISAPGCEENIAILDNLIKGAKRNGNEIAIVFVDLAKAFDSVGHGHIIAGLRRFGIDEHFIDIIRDLYDNCTTRVWMGDEATESILIRRGVKQGDPLSPILFNTAMDPLLTRLEVEGSGFYVKGNGVTSLAFADDVAILSSSYKGMIKNLGILEEFCKNTNLSVNVKKTKGFHILTKHKTYVVNPKDNWQIGSEEIEYVQPGDFEKYLGARIDPWIGVGGPVLKEKLKDWSENLIKAPLKPAQKILILQTYILPKLFYNLLLIEPPFNLLDDLDVLVRKIVKEILHLPQCTTDGIFYSRGRDGGLALTKFSVQIPNMLIRKWRRHIVSRDDWMDLSYLYAGENLVDKILSFSAVTSHPKKWREEEFLRWSELRCQGIGIKYFKNDLISNSIFRNSTKVKSSAYIAALQLRANIYPTRETLARGRGGVNALCRWCGKVRETVPHISGQCYKTKNARIKRHNRVVSAVVDKVGKLGWKAMIEPHLRNSKGELRKPDIIFIKGDTAVVVDVTVRWEDNAGSLEQAHSEKVAYYLELEEEIKNLTGGKNIHFFGFVLGARGKWSEGNNDLLQLLGMDRSKNFKESICRLVLYSTIGMMAIFSDR

SEQ ID NO: 9433 - protein, 1260 aa, Terrapene carolina
MEKSNLYFYTGLALDRVNNAPAVGFDAPADSVKYIRGVIRVAGPMDKMVWTIMKSHEYESENQVLPVEHGEEVEENVCDDHGEEILSILPMVFTRDTFNDLTMESFNPDFKYLSTFDDPYVSESGYLNAHLVNGSSLLNSFRPSTDFNRDRNKDLNSTGSNINILESSSWKDGVFYLEYPVDSFNCPICPQILPTFGKWAKHINVVHKSKAIRVVCSKCGKSSQYHNIACHYPKCIPKKANTPMKSHTCSVCGLGFHTRSGLSQHCRHRHPAVRNEQRKEDMAAKSKIKEGSIRSRIWTKDEVAQLIQLERKYIGKRNINKCIESEMRTKTNKQISDKRRELAKKKLVVTGDREEVTEVEDIRVNILEIPPPRERIFPLKGHPEVDLVEKICKRGKQSREGREIINSLGEIEGLLKEDLTKALGWAMLEKLCYSLVEGKDPRNESQIELRNKGKGKMRKEGRRKQFNAIRRYATKKAKYKFYQQLFDKDRRRLTRIIMGEPDKAKCAIPMKEIEEYYVNILGTIGHGNMIGWPSSTENADNDILMSPISVDEIRIALREIRKDSAPGPDKVKVSNLWDIFNLDSLILTKIFNIWFLNRQVPDEFKKNRTILIPKTQDEEEMKKLTSWRPLTIGSVWIRIYTKILAKRLVETVKICSRQKGFISAPGCEENIAILDNLIKGAKRNGNEIAIVFVDLAKAFDSVGHGHIIAGLRRFGIDEHFIDIIRDLYDNCTTRVWVGDEATESILIRRGVKQGDPLSPILFNIAMDPLLTRLEVEGSGFYVKGNGVTSLAFADDVAILSSSYKGMIKNLGILEEFCKNTNLSVNVKKTKGFHILTKHKTYVVNPKDNWQIGSEEIEYVQPGDFEKYLGARIDPWIGVGGPVLKKKLKDWSENLIKAPLKPAQKILILQTYILQKLFYNLLLIEPPFNLLDDLDVLVRKIVKEILHLPQCTTDGIFYSRGRDGGLALTKFSVQIPNMLIRKWRRHIVSRDDWMDLSYLYAGENLVDKILSFSAVTSHPKKWREEEFLRWSELRCQGIGIKYFKNDLISNSIFRNSSKVKSSAYIAALQLRANIYPTRETLARGRGGVNALCRWCGKVRETVPHISGQCYKTKNARIKRHNRVVSAVVDKVGKLGWKAMIEPHLRNSKGELRKPDIIFIKGDTAVVVDVTVRWEDNAGSLEQAHSEKVAYYLELEEEIKNLTGGKNIHFFGFVLGARGKWSEGNNDLLQLLGMDRSKNFKESICRLVLYSTIGMMAIFSDR

SEQ ID NO: 9434 - protein, 1260 aa, Terrapene carolina
MEKSNLYFYTGLALDRVNNAPAVGFDAPADSVKYIRGVIRVAGPMDKMVWTIMKSHEHESENQVLPVEHGEEVEENVCDDHGEEILSILPMVFTRDTFNDLTMESFNPDFKYLSTFDDPYVSESGYLNAHLVNGSSLLNSFRPSTDFNRDRNKDLNSTGSNINILESSSWKDGVFYLEYPVDSFNCPICPQILPTFGKWAKHINVVHKSKAIRVVCSKCGKSSQYHNIACHYPKCIPKKADTPMKSHTCSVCGLGFHTRSGLSQHCRHRHPAVRNEQRKEDMAAKSKIKEGSTRSRIWTKDEVAQLIQLERKYIGKRNINKCIESEMRTKTNKQISDKRRELAKKKLVVTGDREEVTEVEDIRVNILEIPPPRERIFPLKGHPEVDLVEKICKRGKQSREGREIINSLGEIEGLLKEDLTKALGWAMLEKLCYSLVEGKDPRNESQIELRNKGKGKMRKEGRRKQFNAIRRYATKKAKYKFYQQLFDKDRRRLTRIIMGESDKAKCAIPMKEIEEYYVNILGTIGHGNMIGWPSSTENADNDILMSPISVDEIRIALREIRKDSAPGPDKVKVSNLWDIFNLDSLILTKIFNIWFLNRQVPDEFKKNRTILIPKTQDEEEMKKLTSWRPLTIGSVWIRIYTKILAKRLVETVKICSRQKGFLSAPGCEENIAILDNLIKGAKRNGNEIAIVFVDLAKAFDSVGHGHIIAGLRRFGIDEHFIDIIRDLYDNCTTRVWVGDEATESILIRRGVKQGDPLSPILFNIAMDPLLTRSEVEGSGFYVKGNGVTSLAFADDVAILSSSYKGMIKNLGILEEFCKNTNLSVNVKKTKGFHILTKHKTYVVNPKDNWQIGSEEIEYVQPGDFEKYLGARIDPWIGVGGPVLKEKLKDWSENLIKAPLKPAQKILILQTYILPKLFYNLLLIEPPFNLLDDLDVLVRKIVKEILHLPQCITDGIFYSRGRDGGLALTKFSVQIPNMLIRKWRRHIVSRDDWMDLSYLYAGENLVDKILSFSAVTSHPKKWREEEFLRWSELRCQGIGIKYFKNDLISNSIFRNSSKVKSSAYIAALQLRANIYPTRETLARGRGGVNALCRWCGKVRETVPHISGQCYKTKNARIKRHNRVVSAVVDKVGKLGWKAMIEPHLRNSKGELRKPDIIFIKGDTAVVVDVTVRWEDNAGSLEQAHSEKVAYYLELEEEIKNLTGGKNIHFFGFVLGARGKWSEGNNDLLQLLGMDRSKNFKESICRLVLYSTIGMMAIFSDR

SEQ ID NO: 9435 - protein, 1260 aa, Trachemys scripta
MEKSNLYFYTGLALDRVNNAPAVGFDAPADSVKYIRGVIRVAGPMDKMVWTIMKSHENESENQVLPVEHGEEVEENVCDDHGEEIVSILPMVFTRDTFNDLTMDSFNPDFKYLSTFDDPYVRESGYLNAHLVNGSSLLNSFRPSTDFNRDRNKDLNSTGSNINILESSSWKDGVFYLEYPIDSFNCPICPQILPTFGKWAKHINVVHKSKAIRVVCSKCGKSSQYHNIACHYPKCIPKKADTPMKSHTCSVCGLGFHTRSGLSQHCRHRHPAVRNEQRKEDMAAKSKIKEGSTRSRIWTKDEVAQLIQLERKYIGKRNINKCIESEMRTKTNKQISDKRRELAKKKLVVTGDSEEVTEVEDIRVNILEIPPPRERIFPLKGHPEVNLVEKICKRGKQSREGREIINSLGEIEGLLKEDLTKALGWAMLEKLCYSLVEGKDPRNESQIELRNKGKGKMRKEGRRKQFNAIRRYATKKAKYKFYQQLFDKDRRRLTRIIMGEPDKAKCAIPMKEIEEYYVNILGTIGHGNMIGWPSSTENADNDILMSPISVDEIRIALREIRKDSAPGPDKVKVSNLWDIFNLDSLILTKIFNIWFLNRQVPDEFKKNRTILIPKTQDEEEMKKLTSWRPLTIGSVWIRIYTKILAKRLVETVKICSRQKGFISAPGCEENIAILDNLIKGAKRNGNEIAIVFVDLAKAFDSVGHGHIIAGLRRFGIDEHFIDIIRDLYDNCTTRVWVGDEATESILIRRGVKQGDPLSPILFNIAMDPLLTRLEVEGSGFYVKGNSVTSLAFVDDVAILSSSYKGMIKNLGILEEFCKNTNLSVNVKKMKGFHILTKHKTYVVNPKDNWQIGSEEIEYVQPGDFEKYLGARIDPWIGVGGPVLKEKLKDWSENLIKAPLKPAQKILILQTYILPKLFYNLLLIEPPFNLLDDLDVLVRKIVKEILHLPQCTTDGIFYSRGRDGGLALTKFSVQIPNMLIRKWRRHIVSRDDWMDLSYLYAGENLVDKILSFSAVTSHPKKWREEEFLRWSELRCQGIGIKYFKNDLISNSIFRNSSKVKSSAYIAALQLRANIYPTRETLARGRGGVNALCRWCGKVWKTVPHISGQCYKTKNARIKRHNRVASAVVDKVGKLGWKAMIEPHLRNSKGELRKPDIIFIKGDTAVVVDVTVRWEDNAGSLEQAHSEKVAYYLELEEEIKNLTGGKNIHFFGFVLGARGKWSEGNNDLLQLLGMDRSKNFKESICRLVLYSTIGMMAIFSDR

SEQ ID NO: 9436 - protein, 1260 aa, Actinemys marmorata
MEKSNLYFYTGLALDRVNNAPAVGFDAPADSVKYIRGVIRVAGPMDKMVWTIMKSHEHESENQVLPVEHGEEVEENVCDDHGEEILSILPMVFTRDTFNDLTMESFNPDFKYLSTFDDPYVRESGYLNAHLVNGSSLLNSFRPSTDFNRDRNKDLNSTGSNINILESSSWKDGVFYLEYPVDSFNCPICPQILPTFGKWAKHINVVHKSKAIRVVCSKCGKSSQYHNIACHYPKCIPKKADTPMKSHTCSVCGLGFHTRSGLSQHCRHRHPAVRNEQRKEDMAAKSKIKEGSTRSRIWTKDEVAQLIQLERKYIGKRNINKCIESEMRTKTNKQISDKRRELAKKKIVVTGDREEVTEVEDIRVNILEIPPPRERIFPLTGHPEVDLVEKICKRGKQSREGREIINSLGEIEGLLKEDLTKALGWAMLEKLCYSLVEGKDPRNESQIELRNKGKGKMRKEGRRKQFNAIRRYATKKAKYKFYQQLFDKDRRRLTRIIMGEPDKAKCAIPMKEIEEYYVNILGTIGHGNMIGWPSSTENADNDILMSPISVDEIRIALREIRKDSAPGPDKVKVSNLWDIFNLDSLILTKIFNIWFLNRQVPDEFKKNRTILIPKTQDEEEMKKLTSWRPLTIGSVWIRIYTKILAKRLVETVKICSRQKGFISAPGCEENIAILDNLIKGAKRNGNEIAIVFVDLAKAFDSVGHGHIIAGLRRFGIDEHFIDIIRDLYDNCTTRVWVGDEATESILIRRGVKQGDPLSPILFNIAMDPLLTRLEVEGSGFYVKGNSVTSLAFADDVAILSSSYKGMIKNLGILEEFCKNTNLSVNVKKTKGFHILTKHKTYVVNPKDNWQIGSEEIEYVQPGDFEKYLGARIDPWIGVGGPVLKEKLKDWSENLIKAPLKPAQKILILQTYILPKLFYNLLLIEPPFNLLDDLDVLVRKIVKEILHLPQCTTDGIFYSRGRDGGLALTKFSVQIPNMLIRKWRRHIVSRDDWMDLSYLYAGENLVDKILSFSAVTSHPKKWREEEFLRWSELRCQGIGIKYFKNDLISNSIFRKSSKVKSSAYIAALQLRANIYPTRETLARGRGGVNALCRWCGKVRETVPHISGQCYKTKNARIKRHNRVVSAVVDKVGKLGWKAMIEPHLRNSKGELRKPDIIFIKGDTAVVVDVTVRWEDNAGHLEQVHSEKVAYYRELEEEIKNLTGGKNIHFFGFVLGARGKWSEGNNDLLQLLGMDRSKNFKESICRLVLYSTIGMMAIFSDR

SEQ ID NO: 9437 - protein, 1241 aa, Chrysemys picta
MEKSNLYFYTGLALDRVNNAPAVGFDAPADSVKYIRGVIRVAGPMDKMVWTIMKSHENESENQVLPVEHGEEVEENVCDDHGEEILSILPMVFTRDTFNDLTMDSFNPDFKYLSTFDDPYVRESSTDFNRDRNKDLNSIGSNINILESSSWKDGVFYLEYPVDSFNCPICPQILPTFGKWAKHINVVHKSKAIRVVCSKCGKSSQYHNIACHYPKCIPKKADTPMKSHTCSVCGLGFHTRSGLSQHCRHRHPAVRNEQRKEDMAAKSKIKEGSTRSRIWTKDEVAQLIQLERKYIGKRNINKCIESEMRTKTNKQISDKRRELAKKKLVVTGDREEVTEVEDIRVNILEIPPPRERIFPLKGHPEVDLVEKICKRGKQSREGREIINSLGEIEGLLKEDLTKALGWAMLEKLCYSLVEGQDPRNESQIELRNKGKGKIRKEGRRKQFNAIRRYATKKAKYKFYQQLFDKDRRRLTRIIMGEPDKAKCAIPMKEIEEYYVNILGTIGHGNMIGWPSSTENADNDILMSPISVDEIRIALTEIRKDSAPGPDKVKVSNLWDIFNLDSLILTKNFNIWFLNRQVPDEFKKNRTILIPKTQDEEEMKKLTSWRPLTIGSVWIRIYTKILAKRLVETVKICSRQKGFISAPGCEENIAILDNLIKGAKRNGNEIAIVFVDLAKAFDSVGHGHIIAGLRRFGIDEHFIDIIRDLYDNCTTRVWVGDEATESILIRRGVKQGDPLSPILFNIAMDPLLTRLEVEGSGFYVKGNSVTSLAFADDVAILSSSYKGMIKNLGILEEFCKNTNLSVNVKKTKGFHILTKHKTYVVNPKDNWQIGSEKIEYVQPGDFEKYLGARIDPWIGVGGPVLKEKLKDWSENLIKAPLKPAQKILILQTYILPKLFYNLLLIEPPFNLLDDLDVLVRKIVKEILHLPQCTTDGIFYSRGRDGGLALTKFSVQIPNMLIRKWRRHIVSRDDWMDLSYLYAGENLVDKILSFSAVTSHPKKWREEEFLRWSELRCQGIGIKYFKNDLISNSIFRNSSKVKSSAYIAALQLRANIYPTRETLARGRGGVNALCRWCGKVRETVPHISGQCYKTKNARIKRHNRVVSAVVDKVGKLGWKAMIEPHLRNSKGELRKPDIIFIKGDTAVVVDVTVRWEDNAGSLEQAHSEKVAYYLELEEEIKNLTGGKNIHFFGFVLGARGKWSEGNNDLLQLLGMDRSKNFKESICRLVLYSTIGMMAIFSDR

SEQ ID NO: 9438 - protein, 1241 aa, Chrysemys picta
MEKSNLYFYTGLALDRVNNAPAVGFDAPADSVKYIRGVIRVAGPMDKMVWTIMKSHENESENQVLPVEHGEEVEENVCDDHGEEILSILPMVFTRDTFNDLTMDSFNPDFKYLSTFDDPYVRESSTDFNRDRNKDLNSIGSNINILESSSWKDGVFYLEYPVDSFNCPICPQILPTFGKWAKHINVVHKSKAIRVVCSKCGKSSQYHNIACHYPKCIPKKADTPMKSHTCSVCGLGFHTRSGLSQHCRHRHPAVRNEQRKEDMAAKSKIKEGSTRSRIWTKDEVAQLIQLERKYIGKRNINKCIESEMRTKTNKQISDKRRELAKKKLVVTGDREEVTEVEDIRVNILEIPPPRERIFPLKGHPEVDLVEKICKRGKQSREGREIINSLGEIEGLLKEDLTKALGWAMLEKLCYSLVEGQDPRNESQIELKNKGKGKIRKEGRRKQFNAIRRYATKKAKYKFYQQLFDKDRRRLTRIIMGEPDKAKCAIPMKEIEEYYVNILGTIGHGNMIGWPSSTENADNDILMSPISVDEIRIALTEIRKDSAPGPDKVKVSNLWDIFNLDSLILTKIFNIWFLNRQVPDEFKKNRTILILKTQDEEEMKKLTSWRPLTIGSVWIRIYTKILAKRLVETVKICSRQKGFISAPGCEENIAILDNLIKGAKRNGNEIAIVFVDLAKAFDSVGHGHIIAGLRRFGIDEHFIDIIRDLYDNCTTRVWVGDEATESILIRRGVKQGDPLSPILFNIAMDPLLTRLEVEGSGFYVKGNSVTSLAFADDVAILSSSYKGMIKNLGILEEFCKNTNLSVNVKKTKGFHILTKHKTYVVNPKDNWQIGSEKIEYVQPGDFEKYLGARIDPWIGVGGPVLKEKLKDWSENLIKAPLKPAQKILILQTYILPKLFYNLLLIEPPFNLLDDLDVLVRKIVKEILHLPQCTTDGIFYSRGRDGGLALTKFSVQIPNMLIRKWRRHIVSRDDWMDLSYLYAGENLVDKILSFSAVTSHPKKWREEEFLRWSELRCQGIGIKYFKNDLISNSIFRNSSKVKSSAYIAALQLRANIYPTRETLARGRGGVNALCRWCGKVRETVPHISGQCYKTKNARIKRHNRVVSAVVDKVGKLGWKAMIEPHLRNSKGELRKPDIIFIKGDTAVVVDVTVRWEDNAGSLEQAHSEKVAYYLELEEEIKNLTGGKNIHFFGFVLGARGKWSEGNNDLLQLLGMDRSKNFKESICRLVLYSTIGMMAIFSDR

SEQ ID NO: 9439 - protein, 1310 aa, Chrysemys picta
MVPHGCPPGKGSLPQARVSFPLERVSFPQVRVSFPLERVSFPLRRVHLLAMEKSNLYFYTGLALDRVNNAPAVGFDAPADSVKYIRGVIRVAGPMDKMVWTIMKSHENESENQVLPVEHGEEVEENVCDDRGEEILSILPMVFTRDTFNDLTMDSFNPDFKYLSTFDDPYVRESGYLNAHLVNGSSLLNSFRPSTDFNRDRNKDLNSTGSNINILESSSWKDGVFYLEYPVDSFNCPICPQILPTFGKWAKHINVVHKSKAIRVVCSKCGKSSQYRNIACHYPKCITKKADIPMKSHTCSVCGLGFHTRSGLSQHCRHRHPAVRNEQRKEDMAAKSKIKEGSIRSRIWTKDEVAQLIQLERKYIGKRNINKCIESEMRTKTNKQISDKRRELAKKKIVVTGDREEVIEVEDIRVNILEILTPRERIFPLKGHPEVDLVEKICKRGKQSREGREIINSLGEIEGLLKEDLTKALGWAMLEKLCYSLVEGKDPRNESQIELRNKGKGKMRKEERRKQFNASRRYATKKAKYKFYQQLFDKDRRRLTRIIMGEPDKAKCAIPMKEIEEYYVNILGTIGHGNMIGWPSSTENADNDILMSPISVDEIRIALREIRKDSAPGPDKVKVSNLWDIFNLDSLILTKNFNIWFLNRQVPDEFKKNRTILIPKTQDEEEMKKLTSWRPLTIGSVWIRIYTKILAKRLVETVKICSRQKGFISAPGCEENIAILDNLIKGAKRNGNEIAIVFVDLAKAFDSVGHGHIIAGLRRFGIDEHFIDIIRDLYDNCTTRVWVGDEATESILIRRGVKQGDPLSPILFNIAMDPLLTRLEVEGSGFYVKGNSVTSLAFADGVAILSSSYKGMIKNLGILEEFCKNTNLSVNVKKTKGFHILTKHKTYVVNPKDNWQIGSEEIEYVQPGDFEKYLGARIDPWIGVGGPVLKEKLKDWSENLIKAPLKPAQKILILQTYILPKLFYNLLLIEPPFNLLDDLDVLVRKIVKEILHLPQCTTDGIFYSRGRDGGLALTKFSVQIPNMLIRKWRRHIVSRDDWMDLSYLYAGENLVDKILLFSAVTSHPKKWREEEFLRWSELRCQGVGIKYFKNDLISNSIFRNSNKVKSSAYIAALQLRANIYPTRETLARGRGGVNALCRWCGKVRETVPHISGQCYKTKNARIKRHNRVVSAVVDKVGKLGWKAIIGPHLRNSKGELRKPDIIFIKGDTAVVVDVTVRWEDNAGSLEQAHSEKVAYYLELEEEIKNLTGGKNIHFFGFVLGARGKWSEGNNDLLQLLGMDRSKNFKESICRLVLYSTIGMMAIFSDR

SEQ ID NO: 9440 - protein, 1260 aa, Terrapene carolina
MEKSNLYFYTGLALDRVNNAPAVGFDAPADSVKYIRGVIRVAGPMDKMVWTIMKSHEHESENQVLPVEHGEEVEENVCDDHGEEILSILPMVFTRDTFNDLTMESFNPDFKYLSTFDDPYVSESGYLNAHLVNGSSLLNSFRPSTDFNRDRNKDLNSTGSNINILESSSWKDGVFYLEYPVDSFNCPICPQILPTFGKWAKHINVVHKSKAIRVVCSKCGKSSQYHNIACHYPKCIPKKADTPMKSHTCSVCGLGFHTRSGLSQHCRHRHPAVRNEQRKEDMAAKSKIKEGSTRSRIWTKDEVAQLIQLERKYIGKRNINKCIESEMRTKTNKQISDKRRELAKKKLVVTGDREEVTEVEDIRVNILEIPPPRERIFPLKGHPEVDLVEKICKRGKQSREGREIINSLGEIEGLLKEDLTKALGWAMLEKVCYSLVEGKDPRNESQIELRNKGKGKMRKEGRRKQFNAIRRYATKKAKYKFYQQLFDKDRRRLTRIIMGEPDKAKCAIPMKEIEEYYVNILGTIGHGNMIGWPSSTENADNDILMSPISVDEIRIALREIRKDSAPGPDKVKVSNLWDIFNLDSLILTKIFNIWFLNRQVPDEFKKNRTILIPKTQDEEEMKKLTSWRPLTIGSVWIRIYTKILAKRLVETVKICSRQKGFISAPGCEENIAILDNLIKGAKRNGNEIAIVFVDLAKAFDSVGHGHIIAGLRRFGIDEHFIDIIRDLYDNCTTRVWVGDEATESILIRRGVKQGDPLSPILFNIAMDPLLTRLEVEGSGFYVKGNGVTSLAFADDVAILSSSYKGMIKNLGILEEFCKNTNLSVNVKKTKGFHILTKHKTYVVNPKDNWQIGSEEIEYVQPGDFEKYLGARIDPWIGVGGLVLKEKLKDWSENLIKAPLKPAQKILILQTYILPKLFYNLLLIEPPFNLLDDLDVLVRKIVKEILHLPQCTTDGIFYFRGRDGGLALTKFSVQIPNMLIRKWRRHIVSRDDWMDLSYLYAGENLVDKILSFSAVTSHPKKWREEEFLRWSELRCQGIGIKYFKNDLISNSIFRNSTKVKSSAYIAALQLRANIYPTRETLARGRGGVNALCRWCGKVRETVPHISGQCYKTKNARIKRHNRVVSAVVDKVGKLGWKAMIEPHLRNSKGELRKPDIIFIKGDTAVVVDVTVRWEDNAGSLEQAHSEKVAYYLELEEEIKNLTGGKNIHFFGFVLGARGKWSEGNNDLLQLLGMDRSKNFKESICRLVLYSTIGMMAIFSDR

SEQ ID NO: 9441 - protein, 1192 aa, Terrapene carolina
MEKSNLYFYTGLALDRVNNAPAVGFDAPADSVKYIRGVIRVAGPMDKMVWTIMKSHEHESENQVLPVEHGEEVEENVCDDHGEEILSILPMVFTKDTFNDLTMESFNPDFKYLSTFDDPYVSESGYLNAHLVNGSSLLNSFRPSTDFNRDRNKDLNSTGSNINILESSSWKDGVFYLEYPVDSFNCPICPQILPTFGKWAKHINVVHKSKAIRVVCSKCGKSSQYHNIACHYPKCIPKKADTPMKSHTCSVCGLGFHTRSGLSQHCRHRHPAVRNEQRKEDMAAKSKIKEGSTRSRIWTKDEVAQLIQLERKYIGKRNINKCIESEMRTKTNKQISDKRRELAKKKLVVTGDREEVTEVEDIRVNILKIPPPRERIFPLKGHPEVDLVEKICKRGKQSREGREIINSLGEIEGLLKEDLTKALGWAMLEKLCYSLVEGKDPRNESQIELRNKGKGKMRKEGRRKQFNAIRRYATKKAKYKFYQQLFDKDRRRLTRIIMGEPDKAKCAIPMKEIEEYYVNILGTIGHGNMIGWPSSTENADNDILMSPISVDEIRIALREIRKDSAPGPDKVKVSNLWDIFNLDSLILTKIFNIWFLNRQVPDEFKKNRTILIPKTQDEEEMKKLTSWRPLTIGSVWIRIYTKILAKRLVETVKICSRQKGFISAPGCEENIAILDNLIKGAKRNGNEIAIVFVDLAKAFDSVGHGHIIAGLRRFGIDEHFIDIIRDLYDNCTTRVWVGDEATESILIRRGVKQGDPLSPILFNIAMDPLLTRLEVEGSGFYVKGNGVTSLAFADDVAILSSSYKGMIKNLGILEEFCKNTNLSVNVKKTKGFHILTKHKTYVVNPKNNWQIGSEEIEYVQPGDFEKYLGARIDPWIGVGGPVLKEKLKDWSENLIKAPLKPAQKILILQTYILPKLFYNLLLIEPPFNLLDDLDVLVRKIVKEILHLPQCITDGIFYSRGRDGGLALTKFSVQIPNMLIRKWRRHIVSRDDWMDLSYLYAGENLVDKILSFSAVTSHPKKWREEEFLRWSELRCQGIGIKYFKNDLISNSIFRNSSKVKSSAYIAALQLRANIYPTRETLARGRGGVNALCRWCGKVRETVPHISGQCYKTKNARIKRHNRVVSAVVDKVGKLGWKAMIEPHLRNSKGELRKPDIIFIKGDTAVVVDVTVRWEDNAGSLEQAHSEKVAYYLE

SEQ ID NO: 9442 - protein, 1062 aa, Trachemys scripta
MVFTRDTFNDLTMDSFNPDFKYLSTFDDPYVRESSTDFNRDRNKDFNSTGSNINILESSSWKDGVFYLEYPVDSFNCPICPQILPTFGKWAKHINVVHKSKAIRVVCSKCGKSSQYHNIACHYPRCIPKKADTPMKSHTCSVCGLGFHTRSGLSQHCRHRHPAVRNEQRKEDMAAKSKIKEGSTRSRIWTKDEVAQLIQLERKYIGKRNINKCIESEMRTKTNKQISDKRRELAKKKLVVTGDREEVTEVEDITVNILEIPPPRERIFPLKGHPEVDLVEKICKRGKQSREGREIINSLGEIEGLLKEDLTKALGWAMLEKLCYSLVEGQDPRNESQIELRNKGKGKIRKEGRRKPFNAIRRYATKKAKYKFYQQLFDKDRRRLTRIIMGEPDKAKCAIPMKEIEEYYVNILGTIGHGNMIGWPSSTENADNDILMSPISVDEIRIALTEIRKDSAPGPDKVKVSNLWDIFNLDSLILTKIFNIWFLNRQVPDEFKKNRTILIPKTQDEEEMKKLTSWRPLTIGSVCIRIYTKILAKRLVETVKICSRQKGFISAPGCEENIAILDNLIKGAKRNGNEIAIVFVDLAKAFDSVGHGHIIAGLRRFGIDEHFIDIIRDLYDNCTTRVWVGDEATESILIRRGVKQGDPLSPILFNIAMDPLLTRLEVEGSGFYVKGNSVTSLAFADDVAILSSSYKGMIKNLGILEEFCKNTNLSVNVKKTKGFHILTKHKTYVVNPKDNWQIGSEKIDYVQPGDFEKYLGARIDPWIGVGGPVLKEKLKDWSENLIKAPLKPAQKILILQTYILPKLFYNLLLIEPPFNLLDDLDVLVRKIVKEILHLPQCTTDGIFYSRGRDGGLALTKFSVQIPNMLIRKWRRHIVSRDDWMDLSYLYAGENLVDKILSFSAVTSHPKKWREEEFLRWSELRCQGIGIKYFKNDLISNSIFRNSSKVKSSAYIAALQLRANIYPTRETLARGRGGVNALCRWCGKVRETVPHISGQCYKTKNARIKRHNRVVAAVVDKVGKLGWKAMIEPHLRNSKGELRKPDIIFIKGDTAVVVDVTVR

SEQ ID NO: 9443 - protein, 1260 aa, Actinemys marmorata
MEKSNLYFYTGLALDRVNNAPAVGFDAPADSVKYIRGVIRVAGPMDKMVWTIMKSHEHESENQVLPVEHGEEVEENVCDDHGEEILSILPMVFTRDTFNDLTMESFNPDFKYLSTFDDPYVRESGYLNAHLVNGSSLLNSFRPSTDFNRDRNKDLNSTGSNINILESSSWKDGVFYLEYPVDSFNCPICPQILPTFGKWAKHINVVHKSKAIRVVCSKCGKSSQYHNIACHYPKCIPKKADTPMKSHTCSVCGLGFHTRSGLSQHCRHRHPAVRNEQRKEDMAAKSKIKEGSTRSRIWTKDEVAQLIQLERKYIGKRNINKCIESEMRTKTNKQISDKRRELAKKKLVVTGDREEVTEVEDIRVNILEIPPPRERIFPLKGHPEVDLVEKICKRGKQSREGREIINSLGEIEGLLKEDLTKALGWAMLEKLCYSLVEGKDPRNESQIELRNKGKGKMRKEGRRKQFNAIRRYATKKAKYKFYQQLFDKDRRRLTRIIMGEPDKAKCAIPMKEIEEYYVNILGTIGHGNMIGWPSSTENADNDILMSPISVDEIRIALREIRKDSAPGPDKVKVSNLWDIFNLDSLILTKIFNIWFLNRQVPDEFKKNRTILIPKTQDEEEMKKLTSWRPLTIGSVWIRIYTKILAKRLVETVKICSRQKGFISAPGCEENIAILDNLIKGAKRNGNEIAIVFVDLAKAFDSVGHGHIIAGLRRFGIDQHFIDIVRDLYDNCTTRVWVGDEATESILIRRGVKQGDPLSPILFNIAMDPLLTRLEVEGSGFYVKGNSVTSLAFADDVAILSSSYKGMIKNLGILEEFCKNTNLSVNVKKTKGFHILTKHKTYVVNPKDNWQIGSEEIEYVQPGDFEKYLGARIDPWIGVGGPVLKEKLKDWSENLIKAPLKPAQKILILQTYILPKLFYNLLLIEPPFNLLDDLDVLVRKIVKEILHLPQCTTDGIFYSRGRDGGLALTKFSVQIPNMLIRKWRRHIVSRDDWMDLSYLYAGENLVDKILSFSAVTSHPKKWREEEFLRWSQLRCQGIGIKYFKNDLISNSIFRNSSKVKSSAYIAALQLRANIYPTRETLARGRGGVNALCRWCGKVRETVPHISGQCYKTKNARIKRHNRVVSAVVDKVGKLGWKAMIEPHLRNSKGELRKPDIIFIKGDTAVVVDVTVRWEDNAGSLEQAHSEKVAYYLELEEEIKNLTGGKNIHFFGFVLGARGKWSEGNNNLLQLLGMDRSKNFKESICRLVLYSTISMMAIFSDR

SEQ ID NO: 9444 - protein, 1260 aa, Actinemys marmorata
MEKSNLYFYTGLALDRVNNAPAVGFDAPADSVKYIRGVIRVAGPMDKMVWTIMKSHEHESENQVLPVEHGEEVEENVCDDHGEEILSILPMVFTRDTFNDLTMESFNPDFKYLSTFDDPYVRESGYLNAHLVNGSSLLNSFRPSTDFNRDRNKDLNSTGSNINILESSSWKDGVFYLEYPVDSFNCPICPQILPTFGKWAKHINVVHKSKAIRVVCSKCGKSSQYHNIACHYPKCIPKKADTPMKSHTCSVCGLGFHTRSGLSQHCRHRHPAVRNEQRKEDMAAKSKIKEGSIRSLIWTKDEVAQLIQLERKYIGKRNINKCIESEMRTKTNKQISDKRRELAKKKLVVTGDREEVTEVEDIRVNILEIPPPRERIFPLKGHPEVDLVEKICKRGKQSREGREIINSLGEIEGLLKEDLTKALGWAMLEKLCYSLVEGKDPRNESQIELRNKGKGKMRKEGRRKQFNAIRRYATKKAKYKFYQQLFDKDRRRLTRIIMGEPDKAKCAIPMKEIEEYYVNILGTIGHGNMIGWPSSTENADNDILMSPISVDEIRIALREIRKDSAPGPDKVKVSNLWDIFNLDSLILTKIFNIWFLNRQVPDEFKKNRTILIPKTQDEEEMKKLTSWRPLTIGSVWIRIYTKILAKRLVETVKICSRQKGFISAPGCEENIAILDNLIKGAKRNGNEIAIVFVDLAKAFDSVGHGHIIAGLRRFGIDEHFIDIIRDLYDNCTTRVWVGDEATESILIRRGVKQGDPLSPILFNIAMDPLLTRLEVEGSGFYVKGNSVTSLAFADDVAILSSSYKGMIKNLGILEEFCKNTNLSVNVKKTKGFHILTKHKTYVVNPKDNWQIGSEEIEYVQPGDFEKYLGARIDPWIGVGGPVLKEKLKDWSENLIKAPLKPSPKILILQTYILPKLFYNLLLIEPPFNLLDDLDVLVRKIVKEILHLPQCTTDGIFYSRGRDGGLALTKFSVQIPNMLIRKWRRHIVSRDDWMDLSYLYAGENLVDKILSFSAVTSHPKKWREEEFLRWSELRCQGIGIKYFKNDLISNSIFRNSSKVKSSAYIAALQLRANIYPTRETLARGRGGVNALCRWCGKVRETVPHISGQCYKTKNARIKRHNRVVSAVVDKVGKLGWKAMIEPHLRNSKGELRKPDIIFIKGDTAVVVDVTVRWEDNARSLEQAHSEKVAYYLELEEEIKNLTGGKNIHFFGFVLGARGKWSEGNNDLLQLLGMDRSKNFKESICRLVLYSTIGMMAIFSDR

SEQ ID NO: 9445 - protein, 1260 aa, Chrysemys picta
MEKSNLYFYTGLALDRVNNAPAVGFDAPADSVKYIRGVIRVAGPMDKMVWTIMKSHENESENQVLPVEHGEEVEENICDDRGEEILSILPMVFTRDTFNDLTMDSFNPDFKYLSTFDDPYVRESGYLNAHLVNGSSLLNSFRPSTDFNRDRNKDLNSTGSNINILESSSWKDGVFYLEYPVDSFNCPICSQILPTFGKWAKHINVVHKSKAIRVVCSKCGKSSQYHNIACHYPKCIPKKADTPMKSHTCSVCGLGFHTRSGLSQHCRHRHPAVRNEQRKEDMAAKNKIKEGSTRSRIWTKDEVAQLIQLERKYIGKRNINKCIESEMRTKTNKQISDKRRELAKKKLVVTGDREEVTEVEDIRVNILEIPPPRERIFPLKGHPEVDLVEKICKRGKQSREGREIINSLGEIEGLLKEDLTKALGWAMLEKLCYSLVEGKDPRNESQIELRNKGKGKMRKEGRRKQFNAIRRYATKKAKYKFYQQLFDKDRRRLTRIIMGEPDKAKCAIPMKEIEEYYVNILGTIGHGNMIGWPSSTENADNDILMSPISVDEIRIALREIRKDSAPGPDKVKVSNLWDIFNLDSLILTKIFNIWFLNRQVPDEFKKNRTILIPKTQDEEEMKKLTSWRPLTIGSVWIRIYTKILAKRLVETVKICSRQKGFISAPGCEENIAILDNLIKGAKRNGNEIAIVFVDLAKAFDSVGHGHIIAGLRRFGIDEHFIDIIRDLYDNCTTRVWVGDEATESILIRRGVKQGDPLSPILFNIAMDPLLTRLEVEGSGFYVKGNSVTSLAFADDVAILSSSYKGMIKNLGILEEFCKNTNLSVNVKKTKGFHILTKHKTYVVNPKDNWQIGSEEIEYVQPGDFEKYLGARIDPWIGVGGPVLKEKLKDWSENLIKAPLKPAQKILILQTYILPKLFYNLLLIEPPFNLLDDLDVLVRKIVKEILHLPQCTTDGIFYSRGRDGGLALTKFSVQIPNMLIRKWRRHIVSRDDWMDLSYLYAGENLVDKILSFSAVTSHPKKWREEEFLRWSELRCQGIGIKYFKNDLISNSIFRNSSKVKSSAYIAALQLRANIYPTRETLARGRGGVNALCRWCGKVRETVPHISGQCYKTKNARIKRHNRVVSAVVDKVGKLGWKAMIESHLRNSKGELRKPDIIFIKGDTAVVVDVTVQWEDNAGSLEQAHSEKVAYYLELEEEIKNLTGGKNIHFFGFVLGARGKWSEGNNDLLQLLGMDRSKNFKESICRLVLYSTISMMAIFSDR

SEQ ID NO: 9446 - protein, 1291 aa, Chrysemys picta
MVPHGCPPGKGSLPQARVSFPLERVSFPQVRVSFPLERVSFPLRRVNLLAMEKSNLYFYTGLALDRVNNAPAVGFDAPADSVKYIRGVIRVAGPMDKMVWTIMKSHENESENQVLPVEHGEEVEENVCDDHGEEILSILPMVFTRDTFNDLTMDSFNPDFKYLSTFDDPYVRESSTDFNRDRNKDLNSIGSNINILESSSWKDGVFYLEYPVDSFNCPICPQILPTFGKWAKHINVVHKSKAIRVVCSKCGKSSQYHNIACHYPKCIPKKVDTPMKSHTCSVCGLGFHTRSGLSQHCRHRHPAVRNEQRKEDMAAKSKIKEGSTRSRIWTKDEVAQLIQLERKYIGKRNINKCIESEMRTKTNKQISDKRRELAKKKLVVTGDREEVTEVEDIRVNILEIPPPRERIFPLKGHPEVDLVEKICKRGKQSREGREIINSLGEIEGLLKEDLTKALGWAMLEKLCYSLVEGQDPRNESQIELRNKGKGKIRKEGRRKQFNAIRRYATKKAKYKFYQQLFDKDRRRLTRIIMGEPDKAKCAIPMKEIEEYYVNILGTIGHGNMIGWPSSTENADNDILMSPISVDEIRIALTEIRKDSAPGPDKVKVSNLWDIFNLDSLILTKIFNIWFLNRQVPDEFKKNRTILIPKTQDEEEMKKLTSWRPLTIGSVWIRIYTKILAKRLVETVKICSRQKGFISAPGCEENIAILDNLIKGAKRNGNEIAIVFVDLAKAFDSVGHGHIIAGLRRFGIDEHFIDIIRDLYDNCTTRVWVGDEATESILIRRGVKQGDPLSPILFNIAMDPLLTRLEVEGSGFYVKGNSVTSLAFADDVAILSSSYKGMIKNLGILEEFCKNTNLSVNVKKTKGFHILTKHKTYVVNPKDNWQIGSEKIEYVQPGDFEKYLGARIDPWIGVGGPVLKEKLKDWSENLIKAPLKPAQKILILQTYILPKLFYNLLLIEPPFNLLDDLDVLVRKIVKEILHLPQCTTDGIFYSRGRDGGLALTKFSVQIPNMLIRKWRRHIVSRDDWMDLSYLYAGENLVDKILSFSAVTSHPKKWREEEFLRWSELRCQGIGIKYFKNDLISNSIFRNSSKVKSSAYIAALQLRANIYPTRETLARGRGSVNALCRWCGKVRETVPHISGQCYKTKNARIKRHNRVVSAVVDKVGKLGWKAMIEPHLRNSKGELRKPDIIFIKGDTAVVVDVTVRWEDNAGSLEQAHSEKVAYYLELEEEIKNLTGGKNIHFFGFVLGARGKWSEGNNDLLQLLGMDRSKNFKESICRLVLYSTIGMMAIFSDR

SEQ ID NO: 9447 - protein, 1241 aa, Chrysemys picta
MEKSNLYFYTGLALDRVNNAPAVGFDAPADSVKYIRGVIRVAGPMDKMVWTIMKSHENESENQVLPVEHGEEVEENVCDDHGEEILSILPMVFTRDTFNDLTMDSFNPDFKYLSTFDDPYVRESSTDFNRDRNKDLNSIGSNINILESSSWKDGVFYLEYPVDSFNCPICPQILPTFGKWAKHINVVHKSKAIRVVCSKCGKSSQYHNIACHYPKCIPKKAETPMKSHTCSVCGLGFHTRSGLSQHCRHRHPAVRNEQRKEDMAAKSKIKEGSTRSRIWTKDEVAQLIQLERKYIGKRNINKCIESEMRTKTNKQISDKRRELAKKKLVVTGDREEVTEVEDIRVNILEIPPPRERIFPLKGHPEVDLVEKICKRGKQSREGREIINSLGEIEGLLKEDLTKALGWAMLEKLCYSLVEGQDPRNESQIELRNKGKGKIRKEGRRKQFNAIRRYATKKAKYKFYQQLFDKDRRRLTRIIMGEPDKAKCAIPMKEIEEYYVNILGTIGHGNMIGWPSSTENADNDILMSPISVDEIRIALREIRKDSAPGPDKVKVSNLWDIFNLDSLILTKIFNIWFLNRQVPDEFKKNRTILIPKTQDEEEMKKLTSWRPLTIGSVWIRIYTKILAKRLVETVKICSRQKGFISAPGCEENIAILDNLIKGAKRNGNEIAIVFVDLAKAFDSVGHGHIIAGLRRFGIDEHFIDIIRDLYDNYTTRVWVGDEATESILIRRGVKQGDPLSPILFNIAMDPLLTRLEVEGSGFYVKGNSVTSLAFADDVAILSSSYKGMIKNLGILEEFCKNTNLSVNVKKTKGFHILTKHKTYVVNPKDNWQIGSEKIEYVQPGDFEKYLGARIDPWIGVGGPVLKEKLKDWSENLIKAPLKPAQKILILQTYILPKLFYNLLLIEPPFNLLDDLDVLVRKIVKEILHLPQCTTDGIFYSRGRDGGLALTKFSVQIPNMLIRKWRRHIVSRDDWMDLSYLYAGENLVDKILSFSAVTSHPKKWREEEFLRWSELRCQGIGIKYFKNDLISNSIFRNSSKVKSSAYIAALQLRANIYPTRETLARGRGGVNALCRWCGKVRETVPHISGQCYKTKNARIKRHNRVVSAVVDKVGKLGWKAMIEPHLRNSKGELRKPDIIFIKGDTAVVVDVTVRWEDNAGSLEQAHSEKVAYYLELEEEIKNLTGGKNIHFFGFVLGARGKWSEGNNDLLQLLGMDRSKNFKESICRLVLYSTIGMMAIFSDR

SEQ ID NO: 9448 - protein, 1241 aa, Chrysemys picta
MEKSNLYFYTGLALDRVNNAPAVGFDAPADSVKYIRGVIRVAGPMDKMVWTIMKSHENESENQVLPVEHGEEVEENVCDDHGEEILSILPMVFTRDTFNDLTMDSFNPDFKYLSTFDDPYVRESSTDFNRDRNKDLNSIGSNINILESSSWKDGVFYLEYPVDSFNCPICPQILPTFGKWAKHINVVHKSKAIRVVCSKCGKSSQYHNIACHYPKCIPKKADTPMKSHMCSVCGLGFHTRSGLSQHCRHRHPAVRNEQRKEDMAAKSKIKEGSTRSRIWTKDEVAQLIQLERKYIGKRNINKCIESEMRTKTNKQISDKRRELAKKKLVVTGDREEVTEVEDIRVNILEIPPPRERIFPLKGHPEVDLVEKICKRGKQSREGREIINSLGEIEGLLKEDLTKALGWAMLEKLCYSLVEGQDPRNESQIELRNKGKGKIRKEGRRKQFNAIRRYATKKAKYKFYQQLFDKDRRRLTRIIMGEPDKAKCAIPMKEIEEYYVNILGTIGHGNMIGWPSSTENADNDILMSPISVDEIRVALTEIRKDSAPGPDKVKVSNLWDIFNLDSLILTKIFNIWFLNRQVPDEFKKNRTILIPKTQDEEEMKKLTSWRPLTIGSVWIRIYTKILAKRLVETVKICSRQKGFISAPGCEENIAILDNLIKGAKRNGNEIAIVFVDLAKAFDSVGHGHIIAGLRRFGIDEHFIDIIRDLYDNCTTRVWVGDEATESILIRRGVKQGDPLSPILFNIAMDPLLNRLEVEGSGFYVKGNSVTSLAFADDVAILSSSYKGMIKNLGILEEFCKNTNLSVNVKKTKGFHILTKHKTYVVNPKDNWQIGSEKIEYVQPGDFEKYLGARIDPWIGVGGPVLKEKLKDWSENLIKAPLKPAQKILILQTYILPKLFYNLLLIEPPFNLLDDLDVLVRKIVKEILHLPQCTTDGIFYSRGRDGGLALTKFSVQIPNMLIRKWRRHIVSRDDWMDLSYLYAGENLVDKILSFSAVTSHPKKWREEEFLRWLELRCQGIGIKYFKNDLISNSIFRNSSKVKSSAYIAALQLRANIYPTRETLARGRGGVNALCRWCGKVRETVPHISGQCYKTKNARIKRHNRVVSAVVDKVGKLGWKAMIEPHLRNSKGELRKPDIIFIKGDTAVVVDVTVRWEDNAGSLEQAHSEKVAYYLELEEEIKNLTGGKNIHFFGFVLGARGKWSEGNNDLLQLLGMDRSKNFKESICRLVLYSTIGMMAIFSDR

SEQ ID NO: 9449 - protein, 1260 aa, Terrapene carolina
MEKSNLYFYTGLALDRVNNAPAVGFDAPADSVKYIRGVIRVAGPMDKMVWTIMKSHEHESENQVLPVEHGEEVEKNVCDDHGEEILSILPMVFTRDTFNDLTMESFNPDFKYLSTFDDPYVSESGYLNAHLVNGSSLLNSFRPSTDFNRDRNKDLNSTGSNINILESSSWKDGVFYLEYPVDSFNCPICPQILPTFGKWAKHINVVHKSKAIRVVCSKCGKSSQYHNIACHYPKCIPKKADTPMKSHTCSVCGLGFHTRSGLSQHCRHRHPAVRNEQRKEDMAAKSKIKEGSIRSRIWTKDEVAQLIQLERKYIGKRNINKCIESEMRTKTNKQISDKRRELAKKKLVVTGDREEVTEVEDIRVNILEIPPPRERIFPLKGHPEVDLVEKICKQGKQSREGREIINSLGEIEGLLKEDLTKALGWAMLEKVCYSLVEGKDPRNESQIELRNKGKGKMRKEGRRKQFNAIRRYATKKAKYKFYQQLFDKDRRRLTRIIMGEPDKAKCAIPMKEIEEYYVNILGTIGHGNMIGWPSSTENADNDILMSPISVDEIRIALREIRKDSAPGPDKVKVSNLWDIFNLDSLILTKIFNIWFLNRQVPDEFKKNRTILIPKTQDEEEMKKLTSWRPLTIGSVWIRIYTKILAKRLVETVKICSRQKGFISAPGCEENIAILDNLIKGAKRNGNEIAIVFVDLAKAFDSVGHGHIIAGLRRFGIDEHFIDIIRDLYDNCTTRVWVGDEATESILIRRGVKQGDPLSPILFNIAMDPLLTRLEVEGSGFYVKGNGVTSLAFADDVAILSSSYKGMIKNLGILEEFCKNTNLSVNVKKTKGFHILTKHKTYVVNPKDNWQIGSEEIEYVQPGDFEKYLGARIDPWIGVGGPVLKEKLKDWSENLIKAPLKPAQKILILQTYILPKLFYNLLLIEPPFNLLDDLDVLVRKIVKEILHLPQCTTDGIFYSRGRDGGLALTKFSVQIPNMLIRKWRRHIVSRDDWMDLSYLYAGENLVDKILSFSAVTSHPKKWREEEFLRWSELRCQGIGIKYFKNDLISNSIFRNSSKVKSSAYIAALQLRANIYPTRETLARGRGGVNALCRWCGKVRETVPHISGQCYKTKNARIKRHNRVVSAVVDKVGKLGWKAMIEPHLRNSKGELRKPDIIFIKGDTAVVVDVTVRWEDNAGSLEQAHSEKVAYYLELEEEIKNLTGGKNIHFFGFVLGARGKWSEGNNDLLQFLGMDRSKNFKESICRLVLYSTIGMMAIFSDR

SEQ ID NO: 9450 - protein, 1260 aa, Terrapene carolina
MEKSNLYFYTGLALDRVNNAPAVGFDAPADSVKYIRGVIRVAGPMDKMVWTIMKSHEHESENQVLPVEHGEEVEENVCDDHGEEILSILPMVFTRDTFNDLTMESFNPDFKYLSTFDDPYVSESGYLNAHLVNGSSLLNSFRPSTDFNRDRNKDLNSTGSNINILESSSWKDGVFYLEYPVDSFNCPICPQILPTFGKWAKHINVVHKSKAIRVVCSKCGKSSQYHNIACHYPKCIPKKADTPMKSHTCSVCGLGFHTRSGLSQHCRHRHPAVRNEQRKEDMAAKSKIKEGSTRSRIWTKDEVAQLIQLERKYIGKRNINKCIESEMRTKTNKQISDKRRELAKKKLVVTGDREEVTEVEDIRVNILEIPPPRERIFPLKGHPEVDLVEKICKRGKQSREGREIINSLGEIEGLLKEDLTKALGWAMLEKVCYSLVEGKDPRNESQIELRNKGKGKMRKEGRRKQFNAIRRYATKKAKYKFYQQLFDKDRRRLTRIIMGEPDKAKCAIPMKEIEEYYVNILGTIGHGNMIGWPSSTENADNDILMSPISVDEIRIALREIRKDSAPGPDKVKVSNLWDIFNLDSLILTKIFNIWFLNRQVPDEFKKNRTILIPKTQDEEEMKKLTSWRPLTIGSVWIRIYTKILAKRLVETVKICSRQKGFISAPGCEENIAILDNLIKGAKRNGNEIAIVFVDLAKAFDSVGHGHIIAGLRRFGIDEHFIDIIRDLYDNCTTRVWVGDEATESILIRRGVKQGDPLSPILFNIAMDPLLTRLEVEGSGFYVKGNGVTSLAFADDVAILSSSYKGMIKNLGILEEFCKNTNLSVNVKKTKGFHILTKHKTYVVNPKDNWQMGSEEIEYVQPGDFEKYLGARIDPWIGVGGPVLKEKLKDWSENLIKAPLKPAQKILILQTYILPKLFYNLLLIEPPFNLLDDLDVLVRKIVKEILHLPQCTTDGIFYSRGRDGGLALTKFSVQIPNMLIRKGRRHIVSRDDWMDLSYLYAGENLVDKILSFSAVTSHPKKWREEEFLRWSELRCQGIGIKYFKNDLISNSIFRNSTKVKSSAYIAALQLRANIYPTRETLARGRGGVNALCRWCGKVRETVPHISGQCYKTKNARIKRHNRVVSAVVDKVGKLGWKAMIEPHLRNSKGELRKPDIIFIKGDTAVVVDVTVRWEDNAGSLEQAHSEKVAYYLELEEEIKNLTGGKNIHFFGFVLGARGKWSEGNNDLLQLLGMDRSKNFKESICRLVLYSTIGMMAIFSDR

SEQ ID NO: 9451 - protein, 1260 aa, Terrapene carolina
MEKSNLYFYTGLALDRVNNAPAVGFDAPADSVKYIRGVIRVAGPMDKMVWTIMKSHEHESENQVLPVEHGEEVEENVCDDHGEEILSILPMVFTRDTFNDLTMESFNPDFKYLSTFDDPYVSESGYLNAHLVNGSSLLNSFRPSTDFNRDRNKDLNSTGSNINILESSSWKDGVFYLEYPVDSFNCPICPQILPTFGKWARHINVVHKSKAIRVVCSKCGKSSQYHNIACHYPKCIPKKADTPMKSHTCSVCGLGFHTRSGLSQHCRHRHPAVRNEQRKEDMAAKSKIKEGSTRSRIWTKDEVVQLIQLERKYIGKRNINKCIESEMRTKTNKQISDKRRELAKKKLVVTGDREEVTEVEDIRVNILEIPPPRERIFPLKGHPEVDLVEKICKRGKQSREGREIINSLGEIEGLLKEDLTKALGWAMLEKLCYSLVEGKDPRNESQIELRNKGKGKMRKEGRRKQFNAIRRYATKKAKYKFYQQLFDKDRRRLTRIIMGEPDKAKCGIPMKEIEEYYVNILGTIGHGNTIGWPSSTENADNDILMSPISVDEIRIALREIRKDSAPGPDKVKVSNLWDIFNLDSLILTKIFNIWFLNRQVPDEFKKNRTILIPKTQDEEEMKKLTSWRPLTIGSVWIRIYTKILAKRLVETVKICSRQKGFISAPGCEENIAILDNLIKGAKRNGNEIAIVFVDLAKAFDSVGHGHIIAGLRRFGIDEHFIDIIRDLYDNCTTRVWVGDEATESILIRRGVKQGDPLSPILFNIAMDPLLTRLEVEGSVFYVKGNGVTSLAFADDVAILSSSYKGMIKNLGILEEFCKNTNLSVNVKKTKGFHILTKHKTYVVNPKDNWQIGSEEIEYVQPGDFEKYLGARIDPWIGVGGPVLKEKLKDWSENLIKVPLKPAQKILILQTYILPKLFSNLLLIEPPFNLLDDLDVLVRKIVKEILHLPQCTTDGIFYSRGRDGGLALTKFSVQIPNMLIRKWRRHIVSRDDWMDLSYLYAGENLVDKILSFSAVTSHPKKWREEEFLRWSELRCQGIGIKYFKNDLISNSIFRNSSKVKSSAYIAALQLRANIYPTRETLARGRGGVNALCRWCGKVRETVPHISGQCYKTKNARIKRHNRVVSAVVDKVGKLGWKAMIEPHLRNSKGELRKPDIIFIKGDTAVVVDVTVRWEDNAGSLEQAHSEKVAYYLELKEEIKNLTGGKNIHFFGFVLGARGKWSEGNNDLLQLLGMDRSKNFKESICRLVLYSTIGMMAIFSDR

SEQ ID NO: 9452 - protein, 979 aa, Terrapene carolina
MAAKSKIKEGSTRSRIWTKDEVAQLIQLERKYIGKRNINKCIESEMRTKTNKQISDKRRELAKKKLVVTGDREEVTEVEDIRVNILEIPPPRERIFPLKGHPEVDLVEKICKRGKQSREGREIINSLGEIEGLLKEDLTKALGWAMLEKLCYSLVEGKDPRNESQIELRNKGKGKMRKEGRRKQFNAIRRYATKKAKYKFYQQLFDKDRRRLTRIIMGEPDNAKCAIPMKEIEEYYVNILGTIGHGNMIGWPSSTENADNDILMSPISVDEIRIALREIRKDSAPGPDKVKVSNLWDIFNLDSLILTKIFNIWFLNRQVPDEFKKNRTILIPKTQDEEEMKKLTSWRPLTIGSVWIRIYTKILAKRLVETVKICSRQKGFISAPGCEENIAILDNLIKGAKRNGNEIAIVFVDLAKAFDSVGHGHIIAGLRRFGIDEHFIDIIRDLYDNCTTRVWVGDEATESILIRRGVKQGDPLSPILFNIAMDPLLTRLEVEGSGVYVKGNGVTSLAFADDVAILSSSYKGMIKNLGILEEFCKNTNLSVNVKKTKGFHILTKHKTYVVNPKDNWQIGSEEIEYVQPGDFEKYLGARIDPWIGVGRPVLKEKLKDWSENLIKAPLKPAQKILILQTYILPKLFYNLLLIEPPFNLLDDLDVLVRKIVKEILHLPQCTTDGIFYSRGRDGGLALTKFSVQIPNMLIRKWRRHIVSRDDWMDLSYLYAGENLVDKILSFSAVTSHPKKWREEEFLRWSELRCQGIGIKYFKNDLISNSIFRNSSKVKSSAYIAALQLRANIYPTRETLARGRGGVNALCRWCGKVRETVPHISGQCYKTKNAKIKRHNRVVSAVVDKVAKLGWKAMIEPHLRNSKGELRKTDIIFIKGDTAVVVDVTVRWEDNAGSLEQAHSEKVAYYLELEERIKNLTGGKNIHFFGFVLGARGKWSEGNNDLLQLLGMDRSKNFKESICRLVLYSTIGMMAIFSDR

SEQ ID NO: 9453 - protein, 1215 aa, Terrapene carolina
MDKMVWTIMKSHEHESENQVLPVEHGEEVEENVCDDHGEEILSILPMVFTRDTFNDLTMESFNPDFKYLSTFDDPYVSESGYLNAHLVNGSSLLNSFRPSTDFNRDCNKDLNSTGSNINILESSSWKDGVFYLEYPVDSFNCPICPQILPTFGKWAKHINVVHKSKAIRVVCSKCGKSSQYHNIACHYPKCIPKKADTPMKSHTCSVCGLGFHTRSGLSQHCRHRHPAVRNEQRKEDMAAKSKIKEGSTRSRIWTKEEVAQLIQLERKYIGKRNINKCIESEMRTKTNKQISDKRRELAKKKLVVTGDREEVTEVEDIRVNILEIPPPRERIFPLKGHPEVDLVEKICKRGKQSREGREIINSLGEIEGLLKEDLTKALGWAMLEKLCYSLVEGKDPRNESQIELRNKGKGKMRKEGRRKQFNAIRRYATKKAKYKFYQQLFDKDRRRLTHIIMGEPDKAKCAIPMKEIEEYYVNILGTIGHGNMIGWPSSTENADNDILMSPISVDEIRIALREIRKDSAPGPDKVKVSNLWDIFNLDSLILTKNFNIWFLNRQVPDEFKKNRTILIPKTQDEEEMKKLTSWRPLTIGSVWIRIYTKILAKRLVETVKICSRQKGFISAPGCQENIAMLDNLIKGAKRNGNEIAIVFVDLAKAFDSVGHGHIIAGLRRFGIDEHFIDIIRDLYDNCTTRVWVGDEATESILIRRGVKQGDPLSPILFNIAMDPLLTRLEVEGSGFYVKGNGVTSLAFADDVAILSSSYKGMIKNLGILEFCKNTNLSVNVKKTKGFHILTKHKTYVVNPKDNWQIGSEEIEYVQPGDFEKYLGARIDPWIGVGGPVLKEKLKDWSENLIKAPLKPAQKILILQTYILPKLFYNLLLIEPPFNLLDDLDVLVRKIVKEILHLPQCITDGIFYSRGRDGGLALTKFSVQIPNMLIRKWRRHIVSRDDWMDLSYLYAGENLVDKILSFSAVTSHPKKWREEEFLRWSELRCQGIGIKYFKNDLISNSIFRNSSKVKSSAYIAALQLRANIYPTRETLARGRGGVNALCRWCGKVRETVPHISGQCYKTKNARIKRHNRVVSAVVDKVGKLGWKAMIEPHLRNSKGELRKPDIIFIKGDTAVVVDVTVRWEDNAGSLEQAHSEKVAYYLELEEEIKNLTGGKNIHFFGFVLGARGKWSEGNNDLLQLLGMDRSKNFKESICRLVLYSTIGMMAIFSDR

SEQ ID NO: 9454 - protein, 1125 aa, Chrysemys picta
MEKSNLYFYTGLALDRVNNAPAVGFDAPADSVKYIRGVIRVAGPMDKMVWTIMKSHENESENQVLPVEHGEEVEENVCDDRGEEILSILPMVFTRDTFNDLTMDSFNPDFKYLSTFDDPYVRESGYLNAHLVNGSSLLNSFRPSTDFNRDRNKDLNSTGSNINILESSSWKDGVFYLEYPVDSFNCPICPQILPTFGKWAKHINVVHKSKAIRVVCSKCGKSSQYRNIACHYPKCIPKKADTPMKSHTCSVCGLGFHTRSGLSQHCRHRHPAVRNEQRKEDMVAKSKIKEGSIRSRIWTKDEVAQLIQLERKYIGKRNINKCIESEMRTKTNKQISDKRRELAKKKLVVTGDREEVTEVEDIRVNILEIPPPRERIFPLKGHPEVDLVEKICKRGKQSREGREIINSLGEIEGLLKEDLTKALGWAMLEKLCSSLVEGKDPRNESPIELRNKGKGKMRKEGRRKQFNASRRYATKKAKYKFYQQLFDKDRRRLTRIIMGEPDKAKCAIPMKEIEEYYVNILGTIGHGNMIGWPSSTENADNDILMSPISVDEIRIALREIRKDSAPGPDKVKVSNLWDIFNLDSLILTKIFNIWFLNRQVPDEFKKNRTILIPKTQDEEEMKKLTSWRPLTIGSVWIRIYTKILAKRLVETVKICSRQKGFISAPGCEENIAILDNLIKGAKRNGNEIAIVFVDLAKAFDSVGHGHIIAGLRRFGIDEHFIDIIRDLYDNCTTRVWVGDEATECILIRRGVKQGDPLSPILFNIAMDPLLTRLEVEGSGFYVKGNSVTSLAFADDVAILSSSYKGMIKNLGILEEFCKNTNLSVNVKKTKGFHILTKHKAYVVNPKDNWQIGSEEIEYVQPGDFEKYLGARIDPWIGVGGPVLKEKLKDWSENLIKAPLKPAQKILILQTYILPKLFYNLLLIEPPFNLLDLDVLVRKIVKEILHLPQCTTDGIFYSRGRDGGLALTKFSVQIPNMLIRKWRRHIVLRDDWMDLSYLYAGENLVDKILLFSAVTSHPKKWREEEFLRWSELRCQGIGIKYFKNDLISNSIFRNSSKVKSSAYIAALQLRANIYPTRETLARGRGGVNALCRWCGKVRETVPHISGQCYKTKNARIKRHNRVVSAV

SEQ ID NO: 9455 - protein, 1239 aa, Chrysemys picta
MEKSNLYFYTGLALDRVNNAPAVGFDAPADSVKYIRGVIRVAGPMDKMVWTIMKSHENESENQVLPVEHGEEVEENVCDDHGEEILSILPMVFTRDTFNDLTMDSFNPDFKYLSTFDDPYVRESSTDFNRDRNKDLNSIGSNINILESSSWKDGVFYLEYPVDSFNCPICPQILPTFGKWAKHINVVHKSKAIRVVCSKCGKSSQYHNIACHYPKCIPQKADTPMKSHRCSVCGLGFHTRSGLSQHCRHRHPAVRNEQRKEDMAAKSKIKEGSTRSRIWTKDEVAQLIQLERKYIGKRNINKCIESEMRTKTNKQISDKRRELAKKKLVVTGDREEVTEVEDIRVNILEIPPPRERIFPLKGHPEVDLVEKICKRGKQSREGREIINSLGEIEGLLKEDLTKALGWAMLEKLCYSLVEGQDPRNESQIELRNKGKGKIRKEGRRKQFKAIRRYATKKAKYKFYQQLFDKDRRRLTRIIMGEPDKAKCAIPMKEIEEYYVNILGTIGHGNMIGWPSSTENADNDILMSPISVDEIRIALTEIRKDSAPGPDKVKVSNLWDIFNLDSLILTKIFNIWFLNRQVPDEFKKNRTILIPKTQDEEEMKKLTSWSPLTIGSVWIRIYTKILAKRLVETVKICSRQKGFISAPGCEENIAILDNFIKGAKRNGNEIAIVFVDLAKAFDSVGHGHIIAGLRRFGIDEHFIDIIRDLYDNCTTRVWVGDEATESILIRRGVKQGDPLSPILFNIAMDPLLTRLEGSGFYVKGNSVTSLAFAYDVAILSSSYKGMIKNLGILEEFCKNTNLSVNVKKTKGFHILTKHKTYVVNPKDNWQIGSEKIEYVQPGDFEKYLGARIDPWIGVGGPVLKEKLKDWSENLIKAPLKPAQKILILQTYILPKLFYNLLLIEPPFNLLDDLDVLVRKIVKEILHLPQCTTDGIFYSRDRDGGLALTKFSVQIPNMLIRKWRRHIVSRDDWMDLSYLYAGENLVDKILSFSAVTSHPKKWREEEFLRWSELRCQGIGIKYFKNDLISNSIFRNSSKVKSSAYIAALQLRANIYPTRETLARGRGGVNALCRWCGKVRETVPHISGQCYKTKNARIKRHNRVVSAVVDKVGKLGWKAMIEPHLRNSKGELRKPDIIFIKGDTAVVVDVTVRWEDNAGSLEQAHSEKVAYYLELEEEIKNLTGGKNIHFFGFVLGARGKWSEGNNDLLQLLGMDRSKNFKESICRLVLYSTIGMMAIFSDR

SEQ ID NO: 9456 - protein, 1239 aa, Trachemys scripta
MEKSNLYFYTGLALDRVNNAPTVGFDAPADSVKYIRGVIRVDGPMDKMVWTIMKSHEHESENQVLPVEHGEEVEENVCDDHGEEILSILPMVFTRDTFNDLTMDSFNPDFKYLSTFDDPYVRESSTDFNRDRNKDLNSTGSNINILESSSWKDGVFYLEYPVDSFNCPIRPQILPTFGKWAKHINVVHKSKAIRVVCSKCGKSSQYHNIACHYPKCIPKKADTPMKSHTCSVCGLGFHTRSGLSQHCRHRHPAVRNEQRKEDMAAKSKIKEGSTRSRIWTKDEVAQLIQLERKYIGKRNINKCIESEMRTKTNKQISDKRRELAKKKLVVTGDREEVTEVEDIRVNILEIPPPRERIFPLKGHPEVDLVEKICKRGKQSREGREIINSLGEIEGLLKEDLTKALGWAMLEKLCYSLVEGQDPRNESQIELRNKGKGKIRKEGRRKQFNAIRRYATKKAKYKFYQQLFDKDRRRLTRIIMGEPDKAKCAIPMKEIEEYDVNILGTIGHGNMIGWPSSTENADNDILMNPISVDEIRIALTEIRKDSAPGPDKVKVSNLWDIFNLDSLILTKIFNIWFLNRQVPDEFKKNRTILIPKTQDEEEMKKLTSWRPLTIGSVWIRIYTKTLAKRLVETVKICSRQKGFISAPGCEENIAILDNLIKGAKRNGNEIAIVFVDLAKAFDSVGHGHIIAGLRRFGIDEHFIDIIRDLYDNCTTRVWVGDEATESILIRRGVKQGDPLSPILFNIAMDPLLTRLEGSGFYVKGNSVTSLAFADDVAILSSSYKGMIKNLGILEEFCKNTNLSVNVKKTKGFHILTKHKTYVVNPKDNWQIGSEKIEYVQPGDFEKYLGARIDPWIGVGGPVLKEKLKDWSENLIKAPLKPAPKILILQTYILPKLFYNLLLIEPPFNLLDDLDVLVRKIVKEILHLPQCTTDGIFYSRGRDGGLALTKFSVQIPNMLIRKWRRHIVSRDDWMDLSFLYAGENLVDKILSFSAVTSHPKKWREEEFLRWSELRCQGIGIKYFKNDLISNLIFRNSSKVKSSAYMAALQLRANIYPTRETLARGRGGVNALCRWCGKVRETVPHISGQCYKTKNARIKRHNRVVAAVVDKVGKLGWKAMIEPHLRNSKGELRKPDIVFIKGDTAVVVDVTVRWEDNVGSLEQAHSEKVAYYLELEEEIKNLTGGKNIHFFGFVLGACGKWSEGNNDLLQLLGMDRSKNFKESICRLVLYSTIGMMAIFSDR

SEQ ID NO: 9457 - protein, 963 aa, Carposina sasakii
MLSNAPPIVTSSEAILSASLDNLIQCPKCSQAKFFKGHRGLKIHLGRAHKEVGGSQAPVTDEISTDDTPFWRTLGELKQSLPVLKRIPRAARVMVARTLSADIQKVVSENSKVAWEHLLTFPYRVLHVVKEINSSSTLAQRLKQNCINNNPLDPKLYFRQQNNRKIDYTFRQVENKISDGDIRGASRLLFSSEAVAPDTPDTLTSLHSKHPPPAANIQLPQPPVSSDQALQATCTDVLHAVTSFNSGSAGGLDGLSPQHLKDLIGGNIGPAGDTLLKNLTALVNLMLLGKVHKDILGILYGANLCALLKKDGGIRPIAVGCIYRRLTAKICCRASVNALANYFQPRQLGFGTKGGCEAAVHSLRTFLSAENDTIVLKVDVKNAFNCVDRGALLSAIKEKIPHCFNYLWQCYSEPSKLVYKDHPLDSAVGCQQGDPLGPGIFSLAIHTIIEKLNSKFNVWYLDDGTLGGEAETVLNDLNFIIDKFKNIGLELNFSKCELFVNSSNQNLITDTITKFKIIAPEIKIIDKSTLCLLGSPIFDDAVGPFFENTIINFNSVSDRLLKINTHMAHCIIRHCLFVPKCTYVLRWCNIWKHAHLLDLLDSIIQKTVTSIFNIHIDDRIWTQASLPIRMGGLGIRKISSVSLPAFLSSAYSTEKLVAKILQPTFGQNITICGLAEARNDWIARCPNVDLPKAPSSQRQWDEPLCGLVRNELIQTSSGTTERARLLAVGEWESGLWLQALPSPHTGTMLDRTTFRIAASLRLGATVTVPHICQCGDTVDRLGHHGLSCIRSLGRLPRHANINDSIRRALGKANAPAVLEPNGLARDDGKRPDGMTLVPWEMGRPLVWDATCVDTLAASHIGGTSSKAGSAACSAENAKRRKYAGLPGDYMFGAFGVETLGPWGPSAHRLYREISKRLFETSRDQKAGLFFGQKISIAIQRGNAASLLGTLPVDGNFIHTFNFL

SEQ ID NO: 9458 - protein, 963 aa, Carposina sasakii
MLSNAPPIVTSSEAILSASLDNLIQCPKCSQAKFFKGHRGLKIHLGRAHKEVGGSQAPVTDEISTDDTPFWRTLGELKQSLPVLKRIPRAARVMVARTLSADIQKVVSENSKVAWEHLLTFPYRVLHVVKEINSSSTLAQRLKQNCINNNPLDPKLYFRQQNNRKIDYTFRQVENKISDGDIRGASRLLFSSDAVAPDTPDTLTSLHSKHPPPAANIQLPQPPVSSDQALQATCTDVLHAVTSFNSGSAGGLDGLSPQHLKDLTGGNIGPAGDTLLKNLTALVNLMLLGKVHKDILGILYGANLCALLKKDGGIRPIAVGCIYRRLTAKICCRASVNALANYFQPRQLGFGTKGGCEAAVHSLRTFLSAENDTIVLKVDVKNAFNCVDRGALLSAIKEKIPHCFNYLWQCYSEPSKLVYKDHPLDSAVGCQQGDPLGPGIFSLAIHTIIEKLNSKFNVWYLDDGTLGGEAETVLNDLNFIIDKFKNIGLELNFSKCELFVNSSNQNLITDTITKFKIIAPEIKIIDKSTLCLLGSPIFDDAVGPFFENTIINFNSVSDRLLKINTHMAHCIIRHCLFVPKCTYVLRCCNIWKHAHLLDLLDSIIQKTVTSIFNIHIDDRIWTQASLPIRMGGLGIRKISNVSLPAFLSSAYSTEKLVAKILQPTFGQNITICGLAEARNDWIARCPNVDLPKDPSSQRQWDEPLCGLVRNELIQTSSGTTERARLLAVGEWESGLWLQALPSPHTGTMLDRTTFRIAASLRLGATVTVPHICQCGDTVDRLGHHGLSCIRSLGRLPRHANINDSIRRALGKANAPAVLEPNGLARDDGKRPDGMTLVPWVMGRPLVWDATCVDTLAASHIGGTSSKAGSAACSAENAKRRKYAGLPGDYMFGAFGVETLGPWGPSAHRLYREISKRLFETSRDQKAGLFFGQKISIAIQRGNAASLLGTLPVDGNFIHTFNFL

SEQ ID NO: 9459 - protein, 963 aa, Carposina sasakii
MLSNAPPIVTSSEAILSASLDNLIQCPKCSQAKFFKGHRGLKIHLGRAHKEVGGSQAPVTDEISTDDTPFWRTLGELKQSLPVLKRIPRAARVMVARTLSADIQKVVSENSKVAWEHLLTFPYRVLHVVKEINSSSTLAQRLKQNCINNNPLDPKLYFRQQNNRKIDYTFRQVENKISDGDIRGASRLLFSSDAVAPDTPDTLTSLHSKHPPPAANIQLPQPPVSSDQALQATCTDVLHAVTSFNSGSAGGLDGLSPQHLKDLIGGNIGPAGDTLLKNLTALVNLMLLGKVHKDILGILYGANLCALLKKDGGIRPIAVGCIYRRLTAKICCRASVNALANYFQPRQLGFGTKGGCEAAVHSLRTFLSAENDTIVLKVDVQNAFNCVDRGALLSVIKEKIPHCFNYLWQCYSEPSKLVYKDHPLDSAVGCQQGDPLGPGIFSLAIHTIIEKLNSKFNVWYLDDGTLGGEAETVLNDLNFIIDKFKNIGLELNFSKCVLFVNSSNQNLITDTITKFKIIAPEIKIIDKSTLCLLGSPIFDDAVGPFFENTIINFNSVSDRLLKINTHMAHCIIRHCLFVPKCTYVLRCCNIWKHAHLLDLLDSIIQKTVTSIFNIHIDDRIWTQASLPIRMGGLGIRKISNVSLPAFLSSAYSTEKLVAKILQPTFGQNITICGLAEARNDWIARCPNVDLPKDPSSQRQWDEPLCGLVRNELIQTSSGTTERARLLAVGEWESGLWLQALPSPHTGTMLDRTTFRIAASLRLGATVTVPHICQCGDTVDRLGHHGLSCIRSLGRLPRHANINDSIRRALGKANAPAVLEPNGLARDDGKRPDGMTLVPWEMGRPLVWDATCVDTLAASHIGGTSSKAGSAACSAENAKRRKYAGLPGDYMFGAFGVETLGPWGPSAHRLYREISKRLFETSRDQKAGLFFGQKISIAIQRGNAASLLGTLPVDGNFIHTFNFL

SEQ ID NO: 9460 - protein, 963 aa, Carposina sasakii
MLSNAPPIVTSSEAILSASLDNLIQCPKCSQAKFFKGHRGLKIHLGRAHKEVGGSQAPVTDEISTDDTPFWRTLGELKQSLPVLKRIPRAARVMVARTLSADIQKVVSENSKVAWEHLLTFPYRVLHVVKEINSSSTLAQRLKQNCINNNPLDPKLYFRQQNNRKIDYTFRQVENKISDGDIRGASRLLFSSDAVAPDTPDTLTSLHSKHPPPAANIQLPQPPVSSDQALQATCTDVLHAVTSFNSGSAGGLDELSPQHLKDLIGGNIGPAGDTLLKNLTALVNLMLLGKVHKDILGILYGANLCALLKKDGGIRPIAVGCIYRRLTAKICCRASVNALANYFQPRQLGFGTKGGCEAAVHSLRTFLSAENDTIVLKVDVENAFNCVDRGALLSAIKEKIPHCFNYLWQCYSEPSKLVYKDHPLDSAVGCQQGDPLGPGIFSLAIHTIIEKLNSKFNVWYLDDGTLGGEAETVLNDLNLIIDKFKNIGLELNFSKCELFVNSSNQNLITDTITKFKIIAPEIKIIDKSTLCLLGSPIFDDAVGPFFENTIINFNSVSDRLLKINTHMAHCIIRHCLFVPKCTYVLRCCNIWKHAHLLDLLDSIIQKTVTSIFNIHIDDRIWTQASLPIRMGGLGIRKISNVSLPAFLSSAYSTEKLVAKILQPTFGQNITICGLAEARNDWIARCPNVDLPKAPSSQRQWDEPLCGLVRNELIQTSSGTTERARLLAVGEWESGLWLQALPSPHTGTMLDRTTFRIAASLRLGATVTVPHICQCGDTVDRLGHHGLSCIRSLDRLPRHANINDSIRRALGKANAPAVLEPNGLARDDGKRPDGMTLVPWEMGRPLVWDATCVDTLAASHIGGTSSKAGSAACSAENAKRRKYAGLPGDYMFGAFGVETLGPWGPSAHRLYREISKRLFETSRDQKASMFFGQKISIAIQRGNAASLLGTLPVDGNFIHTFNFL

SEQ ID NO: 9461 - protein, 930 aa, Carposina sasakii
MLSNAPPLVTSSEAILSASLDNLIQCPKCSQAKFFKGHRGLKIHLGRAHKEVGGSQAPVTDEISTDDTPFWRTLGELKQSLPVLKRIPRAARVMVARTLSADIQKVVSENSKVAWEHLLTFPYRVLHVVKEINSSSTLAQRLKQNCINNNPLDPKLYFRQQNNRKIDYTFRQVENKISDGDIRGASRLLFSSDAVAPDTPDTLTSLHSKHPPPAANIQLPQPPVSSDQALQATCTDVLHAVTSFNSGSAGGLDGLSPQHLKDLIGGNIGPAGDTLLKNLTALVNLMLLGKVHKDILGILYGANLCALLKKDGGIRPIAVGCIYRRLTAKICCRASVNALANYFQPRQLGFGTKGGCEAAVHSLRTFLSAENDTIVLKVDVKNAFNCVDRGALLSAIKEKIPHCFNYLWQCYSEPSKLVYKDHPLDSAVGCQQGDPLGPGIFSLAIYTIIEKLNSKFNVWYLDDGTLGGEAETVLNDLNFIIDKFKNIGLELNFSKCELFVNSSNQNLITDTITKFKIIAPEIKIIDKSTLCLLGSPIFDDAVGPFFENTIINFNSVSDRLLKINTHMAHCIIRHCLFVPKCTYVLRCCNIWKHAHLLDLLDSIIQKTVTSIFNIHIDDRIWTQASLPIRMGGLGIRKISNVSLPAFLSSAYSTEKLVAKILQPTFGQNITICGLAEARNDWIARCPNVDLPKDPSSQRQWDEPLCGLVRNELIQTSSGTTERARLLAVGEWESGLWLQALPSPHTGTMLDRTTFRIAASLRLGATVTVPHICQCGDTVDRLGHHGLSCIRSLGRLPRHANINDSIRRALGKANAPAVLEPIGLARDDGKRPDGMTLVPWEMGRPLVWDATCVDTLAASHIGGTSSKAGSAACSAENAKRRKYAGLPGDYMFGAFGVETLGPWGPSAHRLYREISKRLFETSRDQKAGLFF

SEQ ID NO: 9462 - protein, 970 aa, Epargyreus clarus
MSQVPGPSNASAFCNHSGDTSFDFLQCPHCSQIKYFKGRRGLNIHISKCHKASQSINTILSNSLVDPPTQSLSDQNYNEEPFWKYLYKLKTSTPIVKRIPKGARISVATKLSHLINSIIKENSTHYWEQYLTFSFNILHAATDPLTKKTSITQKIKNNCLRSNFNNVLETKQPLRSSSIFHTVERKISDGDIKGASTLLFSNDVVAPDSSETLAALRSKHPSPTSPLLLGSSSPLNVPSLTVSHKDVYGAIMSFKNGSAGGLDALTPQHFKDLVCGATGDSGRVLLNDITNLINFMLSGKVNPEVTNLLYGANLCALKKKDGSIRPIAVGNTLRRIASKVCCRHVLPTLEKKFQPLQLGFGSKGGCEAAVHRSFLTNGGGDVVLKVGVKNAFNSVDRNILLEEIKTVIPEVYPYLFQCYGAPSHLLYRNNLIESAVGCQQGDPLGPAIFSLAIHPIISKLNSKLNMWYLDDGTLGGDATGVFEDFNYLLNALKSIGLELNFSKCELFISELLPATEREIVLNKFYSLSPDLKIVDKKSLRLLGSPVLKDSIPPFFDELLSKFDIVSERLGKIKIHMAYQIIRFCIFVPKFTYFLRCCPAWKFLNLLSFLDSQILGTLSNILNCNLDDRSWSQASLLIRFGGLGIRKASSVALPAFLSSVHSTSSLFQKITDASLGRTEISYCAEARDAWSEACPGVSPPLDLTVQRLWDEPLCTKTHTSLLDSSTCSAERARLLAVSVKESGFWLHAIPSSNLGTVLDNTSFSIAVSLRLGLTLNHPHCCPCGVQVDHLGHHGLSCRRSAGRQSRHASLNDVIRRALATVNVPAQLEPNGVVRDDGRRPDGLTLIPWKNGRCLVWDATCVDTLAPSHLTLSSRAAGVVATDAEIRKLQKYASLSRDYIFLPFGVETMGPWGSDARSFYKHLSKRLIECTNDQRAGAYLGQRISLAIQRGNVASVLGTLPKDNNLDEAYYI

SEQ ID NO: 9463 - protein, 968 aa, Chioides vintra
MSQVPSTSGNDCNQYSTSAHLIQCPHCSHSRYFKGTKGLNIHIGKSHNQLKPLVPNSSTNLHNNSFTSQINVSSTSSPCFWKTLSKFKSSVPIINRIPRGARISIATKLSECIKIIIKENSVRSWENFFSFSYNFLHAAHSSNKHISLTQKLKQNCLRPFGSLNHIDTRKPFHNNSIYHKVEKKVGDGDIKGAADLLFSNDIIAPDSPETLLALKSKHPSLSVPFFPSPPQNCNALEITSKEILGAIMSFKSGSAGGLDGLTPQHFKDLTCGATGEVGKALLKDITALVNLMISGNVNADITSILYGANLCALKKKDGGIRPIAVGNTVRRIASKVCCRHILPKLQDELQPIQLGFGSKGGCEAAVHSLRSYMLNDKKSVVLKVDVKNAFNSVKRDAFLVQAHQIVPEIYPFLWQAYGSSSNLIFRQNLIHSSVGCQQGDPLGPAIFSLSIQPTISALNSKLNLWYLDDGTLGGEATTVFDDLKLLIQNFKKLGLELNFSKCELYIPNSFDDLEKNNIIVQFKSLAPNIQLLNKESLRLLGSPVLEESIPFFLDEQISTFEKISSRLDKINSHVAYHIIRFCLFVPKFTYFLRCSPIWKHTSHLFVIDSLIQDCLVKILNCSLHENSWCQASLPIRYGGLGIRKISSIALPAFLSSAHSTKSLFQKLTLSSLGLSEISYCAEAKESWLAVCSGDSLPNCLTSQRQWDEPLCRIVYSELLNKSQNSTERARLLAVSVRESGYWLQALPSANLGTLLDNTSFSLAVGLRLGTFLNHPHCCPCGAQVDRLGLHGLSCQRSAGRLSRHAALNDVIRRALVTANVPAQLEPNGLVRGDGKKPDGLTLIPWKNGRCLVWDATCVDTLAPSHINISSRAAGVVATDAEIRKLQKYADLMKDYIFLPFGVETMGPWGSNARLFFKHLSERLIESTNDQRAGTYLGQRISLAIQRGNVASILGTHPKDSNLDVAFYI

SEQ ID NO: 9464 - protein, 969 aa, Telegonus anausis
MSQVPSTSGNGCNQHSTSAHLIQCPHCSHPRYFKGSKGLNIHIGKLHSELKSLTQNVSNNNLPKKTFNSQIIHSSLTSEPFWKNLSKLKSSVPVVSRIPRGARISIASKLSQCIKNIIKENSVASWQNFFTFSYNFLHATPDLTKKISLTQKLKQNCLKPFGNVHTFDITHTFRTNSIYHKVEKKVGDGDIRGAADLLFSSDVIAPDSSETLSALRSKHPPPLVPLHVDPPQNFIALKIAPKEIQGAVMSFKAGSAGGLDGLTPQHFKDLICGATGEAGNALLNDITELVNLILSGNVNPEITSTLFGANLCALKKKDGGVRPIAVGNTIRRIASKVCCRHILPELQDKFQPIQLGFGSKGGCEAAVHSLRSYMLNDNKNVVLKVDVKNAFNSVNRNTFLSEAHKIVPEIYPYLWQAYGTPSNLTFCENLIYSSTGCQQGDPLGPAIFSLAIQPIISALNSKLNLWYLDDGTLGGEAAIVLEDLKFLVQNFQDLGLELNFSKCELYIPNEICDVEKKFIFDKFNNLAPNIQLLNKESLRLLGSPVLEESIPSFLDEHISKFENISFRLNKINSHVAYHIIRFCLFVPKFTYFLRCSPIWKYTSHLLSIDSLIQDCLIKILNCSLSEKSWCQASLPIRYGGIGIRKISSIALPAFLSSVHSTKPLFEKLTLASLGLSEISYCAEAKDAWSAACPGESFPENLISQRQWDEPLCKFIHSNLLNNSQNSIERARLLAVSVRESGYWLQAIPSANLGTFLDNTSFSIAVGLRLGSFLNHPHCCPCGAQVDRLGLHGLSCKRSAGRLSRHAALNDVIRRALVTANVPAQLEPNGLVRSDGKKPDGLTLIPWKNGRCLVWDATCVDTLAPSHIHISSRAAGVVATDAEIHKLQKYADLIKDYIFLPFGVETMGPWGSNARLFFKHLSKRLMESTCDQRAGTYLGQRISLAIQRGNVASILGTHPRDSNLDAAFYI

SEQ ID NO: 9465 - protein, 968 aa, Epargyreus clarus
MSQVPSTSGSVSNQYGRSADLIQCPHCSQTRFFKGIKGLNIHIGKSHNQFKPLASNASNNSQHNSFNSQINVSSAPSQPFWKTLSKFKSSVPIINRIPRGARISIASKLSDCIKIILKENSVRSWENFFSFSYIFLHAAHSSNKHLSLTQKLKQNCSRPFGILNHDDTQRPFHNNSIFHKVEKKVGDGDIKGAADLLFSNDVIAPDSPETLLALRAKHPALSAPVHANPPQNCNVLEIAPKEILGAVMSFKPGSAGGLDGLTPQHFKDLTCGATGEAGRVLLNDITALINLMISGKVNADITSILYGANLCALKKKDGGIRPIAVGNTVRRIASKVCCRHILPKLQDKLEPVQLGFGSKGGCEAAVHSLRSYMLNDKKSVVLKVDVKNAFNSVRRDVFLAEANQIIPQIYPFLWQAYGSPSNLIFRDNLILSSVGCQQGDPLGPAIFSLSIQPIISALNSKLNMWYLDDGTLGGEAMTVFDDLKFLIQNFQNLGLDLNFSKCELYIPDSFLDLEKQNIIDKFKTLAPNIQLLNKESLRLLGSPVLEESIPFFLDEQISSFEYISSRLSKINSHVAYHIIRFCLFVPKFTYFLRCSPIWKHTSHLFLIDSLIQDCLVKILNCSLNENSWCQASLPIRYGGLGIRKISSIALPAFLSSAHSTKLLFQKLTLSSLGLSEISYCAEAKESWLAVCSGESLPESLSSQRQWDEPLCEHVHSELLNKSQNPVERARLLAVSVRESGYWLQALPSANLGTLLDNISFSTAVGLRLGTFLNHPHCCPCGAQVDRLGLHGLSCQRSAGRLSRHAALNDVIRRALVTANVPAQLEPNGLVRSDGKKPDGLTLIPWKNGRCLVWDATCVDTLAPSHIHISSRAAGVVATDAEIRKLQKYADLIKDYIFLPFGVETLGPWGSNARLFFKHLSKRLIESTNDQRAGTYLGQRISLAIQRGNVASILGTHPRDSNLDVAFYV

SEQ ID NO: 9466 - protein, 969 aa, Astraptes hopfferi
MSQVPSTSGNGCNQLSTSAHLIQCPHCSHPRYFKGSKGLNIHIGKLHSELKSLTQNVSNNKLPTKTFHSQIIHSSLTNEPFWKNLYKLKSSVPVVNRIPRGARISIASKLSQCIKNIIKENSVASWQNFFTFSYNFLHATPDLTKKTSLTQKLKQNCLKPFGNVHTFDITHQFRTNSIYHKVEKKVGDGDIRGAADLLFSSDVIAPDSPETLSALKSKHPSPLVPLLVDPPQNCIALKITPKDIQGAVMSFKAGSAGGLDGLTPQHFKDLICGATGEAGNALLNDITEFVNLILSGNVNPEITSTLFGANLCALKKKDGGIRPIAVGNTIRRIASKVCCRHILPELQDKFQPIQLGFGSKGGCEAAVHSLRSYMLSDNESVVLKVDVKNAFNSVNRDIFLAEASKIVPEIYPFLFQAYGFPSDLVFRENLIPSTVGCQQGDPLGPAIFSLAIQPIISALNSKLNLWYLDDGTLGGEVTSVLEDLQFLILNFQNLGLELNFSKCEIYIPNSFNDMVKRSIIDKFNNLAPNIQVLNKESLRLLGSPVLEESIPSFLDELISKFENTSFRLSKINSHVAYHIIRFCLFVPKFTYFLRCSPIWKYTSHLLSIDTLIQDCLIKILNCPLYDRSWCQASLPIRYGGIGIRKISSIALPAFLSSVHSTISLFQSLTFSSLGQSEISYCAEAKEAWLAACPGASLPECLSSQRQWDDGLCKFIHSELLDKSQNSIERARLLAVSVRESGFWLQALPSANLGTLLDNTSFSIAVGLRLGTFLNHPHCCPCGAQVDRLGLHGLSCQRSAGRFSRHAALNDVIRRALVTANVPAQLEPNGLVRGDGKKPDGITLIPWKNGRCLVWDATCVDTLAPSHVQISSRAAGVVATDAEIRKWQKYADLVKDYIFLPFGVETMGPWGSDAKLFFKHLSKRLIESTNDQRAGTYLGQRISLAIQRGNVASILGTHPRDGNLDAAFYI

SEQ ID NO: 9467 - protein, 967 aa, Autochton bipunctatus
MSQVPSTSGNASNQHNRSAHLIQCPHCPQHRYFKGSKGLNIHIGKSHNHSKSLVQNVCNNTSKTSFHNQNNHSSISNEPFWKKLYDLKSSVPIVKRIPRGARISIASKLSQCINNIIKENSVDSWKHFFTFSYNFLHATQDSNQNLSLTQKLKQNCLKPFGHLHKFDIKKEIRNNSIYNKVEQRVGDGDIKGAADLLFSNDVIAPDTSETLSALRSKHPSPIVSLLANPPHNSVELKITVKDIQKAIMSFKAGSAGGLDGLTPQHFKDLSCATGEAGKTLLNNITELVNLMLSGHVNVDITSILYGAKLCAFKKKDGGIRPIAVGNTIRRIASKVCCRHILPKLQDKFQPTQLGFGSKGGCEAAVHSLRSYMLNDTKNVILKVDIKNAFNSISRDIFLKEAQKIVPEIYPFLYQAYGFSSDLVFQKNLIESTIGCQQGDPLGPAIFSLAIHPIISALNSKLNLWYLDDGTLGGEANTVQEDLQYLIKNFQNLGLQLNFSKCELYIPNSYCDLERKYIIEKFTNLAPNIQLLNKESLRLLGSPVLEESIPSFLDEQISKFENISSRLYKINSHVAYHIIRFCLFVPKFTYFLRCSPIWKYTNHLSSIDSLIQDCLIKILNCPLNDKSWCQGSLPIRYGGIGIRKISSIALPAFLSSAHCTQPLFQKITLSSSNLSEISYCAEAKETWLAACPGESLPQCLGSQRQWDEPLCKIVYSDLVTNSQNSIERARLLAVSVQESGYWLQALPSANLGTLLDNTSFSLAVGLRLGTFLNHPHCCSCGAQVDRLGLHGLSCQRSAGRLSRHAALNDVIRRALVTANVPAQLEPNGLVRSDGKKPDGLTLIPWMNGRCLVWDATCVDTLAPSHIQISSRAAGVVATDAEIRKLQKYADLVKDYIFLPFGVETMGPWGSNARLFFKHLSKRLIESTNDQRAGTYLGQRISIAIQRGNVASILGTHPRDSNLDAAFYI

SEQ ID NO: 9468 - protein, 967 aa, Aurina azines
MSQVPSTSTCNQYNTSANLIQCPHCSQLRYFRGSKGLNIHIGKSHKQIKPLVQNVPGNPPTVSFSSQTNGSPFSSNQPIWKNLYKLKSSVPVVKRIPRGARISVASKLSQCIHNIIKENSVPSWEQFFTFSFNFLHAPQDSNNHLSLTQKLKQNCLKPLGNRNTFDIGRQFHNSSIYHIVERKVGDGDIKGAANLLFSNDVIASDSPETLHTLKIKHPSPSVPLLTNLSHNCNALKISHKEVYSAIMSFKTGSAAGLDGLTPQHLKDLICGATGETGRALLKDITSLINLMISGNVNIDIMNTLYGANLCALKKKDGGIRPIAVGNTVRRIASKVCCKQILPKLQGIFQPVQLGFGSKGGCEAAVHSLRSFMLNDKKSVILKVDVKNAFNSVSRDTFLTECSKIVPEIYPFLWQCYSSTSDLIFHENLIPSTVGCQQGDPLGPAIFSLSIHPVISALNSKLNLWYLDDGTLGGEADTVFVDLKFIINNFQKLGLELNFSKCELYVPESISQLEKNCITDKFKNLAPNIKILNKESLRLLGSPVLEESIPNFLDEQISKFEYISYRLSKINSHVAYHIMRFCLFVPKFMYFLRCSPIWKFKRHLISFDSLIQDCLVKILNCSLLENSWCQASLPIRYGGIGIRNISSIALPAFLSSVHSTKPLFQKLTLSFLGISEISYCAEAKETWLAACPGESLPVCLNSQRQWDEPLCRIVYSTLLNKSQNSIDRARLLAVSVPESGYWLQALPSANLGTLLDNNSFSIAVGLRLGTSLTHPHCCPCGAQVDRLGLHGLSCQRSAGRLSRHASINDVIRRALVTANVPAQLEPNGIVRGDGKKPDGLTLIPWKNGRCLVWDATCVDTMAPSHLSVSSRAAGVAATNAEIRKLQKYVGLIKDYIFLPFAVETMGPWGSDARLFIKHLSKRLIESTSDQRAGSYLGQRISLAIQRGNVASVLGTHPKDSNLDAAFYI

SEQ ID NO: 9469 - protein, 968 aa, Epargyreus clarus
MSQVPSTSGSVSNQYGRSANLIQCPHCSQTRFFKGIKGLNIHIGKSHNEFKPLVSNTSNNSQHDSFNSQINVSSAPSQPFWKTLSKFKSSVPIINRIPRGARISIASKLSDCIKIILKENSVRSWENFFSFSYIFLHAARSSNKHLSLTQKLKQNCSRPFGILNHDDTQRPFHNNSIFHKVEKKVGDGDIKGAADLLFSNDVIAPDSPETLLALRAKHPALSAPVHANPPQNCNVLEIAPKEILGAVMSFKPGSAGGLDGLTPQHFKDLTCGATGEAGKVLLNDITALVNLMISGKVNADITGILYGANLCALKKKDGGIRPIAVGNTVRRIASKVCCRHILPKLQDKLEPVQLGFGSKGGCEAAVHSLRSYMLNDKKSVVLKVDVKNAFNSVRRDVFLAEANQIIPQIYPFLWQAYGSPSNLIFRDNLILSSVGCQQGDPLGPAIFSLCIQPIISALNSKLNLWYLDDGTLGGEAMTVFDDLKFLIQNFQNLGLDLNFSKCELYIPDSFLDLEKQNIIDKFKTLAPNIQLLNKKSLRLLGSPVLEESIPFFLDEQISSFENISSRLSKINSHVAYHIIRFCLFVPKFTYFLRCSPIWKHTSHLFLIDSLIQDCLVKILNCSLNENSWCQASLPIRYGGLGIRKISSIALPAFLSSAHSTKLLFQKLTLSSLGLSEISYCAEAKESWLAVCSGESLPESLSSQRQWDEPLCKHVHSELLNKSQNPVERARLLAVSVRESGYWLQALPSANLGTLLDNTSFSTAVGLRLGTFLNHPHCCPCGAQVDRLGLHGLSCQRSAGRLSRHAALNDVIRRALVTANVPAQLEPNGLVRSDGKKPDGLTLIPWKNGRCLVWDATCVDTLAPSHIHISSRAAGVVATDAEIRKLQKYADLIKDYIFLPFGVETLGPWGSNARLFFKHLSKRLIESTNDQKAGTYLGQRISLAIQRGNVASILGTHPRDSNLDVAFYI

SEQ ID NO: 9470 - protein, 968 aa, Chioides albofasciatus
MSQVPSTSGNDCNQYSTSAHLIQCPHCSQSRYFKGTKGLNIHIGKSHNQLKSLIPNSSINLHNNSFKSHINVSSTSSACLWKTLSKFKSSVPIINRIPRGARISIATKLSECIKIIIKENSVCSWENFFSFSYNFLHAAHSPNKHLSLTQKLKQNCLRPFGNLNHIDTRQPFHNNSIYHKVEKKVGDGDIKGAADLLFSNDVIAPDSPETLLALKSKHPSLSVPFHSSPPQNCNALEITPKEIQGAIMSFKSGSAGGLDGLTPQHFKDLTCGATGEVGKALLKDITALVNLMLSGNVNADITSILYGANLCALKKKDGGIRPIAVGNTVRRIASKVCCRHILPKLQDELQPIQLGFGSKGGCEAAVHSLRSYMLNDKKSVVLKVDVKNAFNSVKRDAFLVQAHQIVPEIYPFLWQAYGSSSNLIFRQNLIHSSVGCQQGDPLGPAIFSLSIQPTISALNSKLNLWYLDDGTLGGEATTVFDDLKLLIQNFKKLGLELNFSKCELYIPNSFDDLEKNNIIDQFKSLAPNIQLLNKESLRLLGSPVLEESIPFFLDEQISTFEKISSRLDKINSHVAYHIIRFCLFVPKFTYFLRCSPIWKHTSHLFVIDSLIQDCLVKILNCSLHENSWCQASLPIRYGGLGIRKISSIALPAFLSSAHSTKSLFQKLTLSSLGLSEISYCAEAKESWLAVCSGDSLPNCLTSQRQWDEPLCRIVYSELLNKSQNSTERARLLAVSVRESGYWLQALPSANLGTLLDNTSFSLAVGLRLGTFLNHPHCCPCGAQVDRLGLHGLSCQRSAGRLSRHAALNDVIRRALVTANVPAQLEPNGLVRGDGKKPDGLTLIPWKNGRCLVWDATCVDTLAPSHINISSRAAGVVATDAEIRKLQKYADLMKDYIFLPFGVETMGPWGSNARLFFKHLSERLIESTNDQRAGTYLGQRISLAIQRGNVASILGTHPKDSNLDVAFYI

SEQ ID NO: 9471 - protein, 966 aa, Aurina dida
MSQFPSTSTCNQYNTSANLIQCPHCSQLRYFKGSKGLNIHIGKSHNQIKPLVQNIPGNSSTVSFSTQTNDSPFSSNEPIWKNLYKLKSSVPVVKRIPRGARISIASKLSKCIQNIIKENSVPSWEQFFTFSFNFLHAPTDSNKLSLTQKLKQNCVKPPGNRNTFDIGKQFHNTSIYRTVERKVGDGDIKGAANLLFSSDVIAPDSPETLNALKMKHPSPSVPLLTNLTPNCNTLKITHKEVYSAIMSFRTGSAGGLDGLTPQHFKDLICGATGETGRALLKDITSLINLMISGNINTDITNILYGANLCALKKKDGGIRPIAVGNTVRRIASKVCCKQILPKLQGIFQPIQLGFGSKGGCEAAVHSLRSYMLNDKKSVILKVDVKNAFNSVSRDTFLTECNKTVPEIYPFLWQCYSSTPDLIFRENLIPSTVGCQQGDPLGPAIFSLSIHPVISALNSKLNLWYLDDGTLGGEAESVLADLKFIINNFQKLGLELNFSKCELYIPESISQLERNSITEKFKNLAPNIIFLNKESLRLLGSPVLEESIPNFLDEQISKFEHISYRLSKINSHVAYHIIRFCLFVPKLMYFLRCSPIWKFKKHLFSFDSLIQDCLIKILNCSLLENSWCQASLPIRYGGIGIRKISSIALPAFLSSVHSTKPLFQKLTLSSLGISEISYCAEAKETWLAACPGESLPECSNSQRQWDEPLCRIVYSTLLNKTQNSIERARLLAVSVRESGYWLQALPSANLGTLLDNNSFSIAVGLRLGISLTHPHCCPCGAQVDRLGLHGLSCQRSAGRLSRHASINDVIRRALVTANVPAQLEPNGIVRGDGKKPDGLTLIPWKNGRCLVWDATCVDTMAPSHLSVSSKAAGVVATNAEIRKLQKYVGLTKDYIFLPFAVETMGPWGSDARLFFKHLSKRLIESTNDQRAGTYLGQRISLAIQRGNVASVLGTHPKDSNLDAAFYI

SEQ ID NO: 9472 - protein, 970 aa, Pyrgus malvae
MSQLPSTSGACNQFHNDTFAALVQCPQCPLPRYFKGQRGLRIHIGKTHSINQNNQNSTSFSSQNVSSSQVNVSNLDTHEPFWKYLHRLKLSIPIVKRIPKGARLSIASKLSECIKKLLKENTASTWKQFFTFSFNILHASLDHNNSLSLTQKLKSNCLKTFDSFGNFSECYSFQKNNHSVFHLVEKKISDGDIKGAANLLFSNDVIAPDSADTVTALRSKHPPPSEPPTPTSNNCSILKCNSKDVYAAIMSFKNGSAGGLDGLSPQHLKDLTCGATGEVGRTLLNDITSLINLMLSGKVNLEITDILYGANLCALKKKDGGIRQIAVGNTIRRIASKICCRHILPQLQNEFQPVQLGFGSKGGCEAAVHSLRSYLLNVTNEVVLKVDVKNAFNSVHRNAFLCEANKLVPDIFPYLWQCYSRPSNLLYRNNLILSAAGCQQGDPLGPAIFSLAIHPIISALKSKLNMWYLDDGTLGGEASLVYQDLQNLINSFQQVGLELNFSKCELYIPETISDSGKNDIINKFNTIAPNIQVLNKESLRLLGSPVLDESIPTFLDDQISKFEDYSEKLSKINAHMAYHIIRSCLFVPKFTYFLRCSPIWKHKNLLFSIDSLVQDCLAKILNCSLNIKSWTQACLPLRFGGIGIRQISSVSLPAFLSSVHSTKLLFKKITNSFHISNITYCEEAIDAWLTACPGVTLPQTLTSQRLWDEPLCKIVYTNLLNNCVNSAERARLLAVSVPESGYWLQALPSTKIGTLLDNVSFSIAVGLRLGSNLNHPHCCPCGTQVDRLGHHGLSCFRSAGRFSRHAALNDIIRRALVTVNVPAQLEPNGIVRGDGKRPDGLSLIPWMNGRCLVWDATCVDTLAPSHLHMSSRVAGLVATDAEIRKVQKYAALAEDYIFLPFGVETIGPWGSDAKVFIKHLSRRLIQATGDQKAGTYLGQRIALAIQRGNVASILGTHPQDSNLDAVFYVN

SEQ ID NO: 9473 - protein, 970 aa, Pyrgus malvae
MSQLPSTSGACNQFHNDTFAALVQCPQCPLPRYFKGQRGLRIHIGKTHSINQNNQNSTSFSSQNLSSSQVNVSNLDTHEPFWKYLHRLKLSIPIVKRIPKGARLSIASKLSECIKKLLKENTASTWKQFFTFSFNILHASLDHNNSLSLTQKLKSNCLKTFDSFGNFSECNSFKKNNHSVFRLVEKKISDGDIKGAANLLFSNDVIAPDSADTVTALRSKHPPPSEPPTPTSNNCSILKCNSKDVYAAIMSFKNGSAGGLDGLSPQHLKDLTCGATGEVGRTLLNDITSLINLMLSGKVNLEITDILYGANLCALKKKDGGIRPIAVGNTIRRIASKICCRHILPQLQNEFQPVQLGFGSKGGCEAAVHSLRSYLLNVTNEVVLKVDVKNAFNSVHRNAFLCEANKLVPDIFPYLWQCYSRPSNLLYRNNLILSAAGCQQGDPLGPAIFSLAIHPIISALKSKLNMWYLDDGTLGGEASLVYQDLQNLINSFQQVGLELNFSKCELYIPETISDSGKNDIINKFNTIAPNIQVLNKKSLRLLGSPVLDESIPTFLDDQISKFEDYSEKLSKINAHMAYHIIRSCLFVPKFTYFLRCSPIWKHKNLLFSIDSLVQDCLAKILNCSLNIKSWTQACLPLRFGGIGIRQISSVSLPAFLSSVHSTKLLFKKITNSFHISNITYCEEAIDAWLTACPGVTLPQTLTSQRLWDEPLCKIVYTNLLNNCVNSAERARLLAVSVPESGYWLQALPSTKIGTLLDNVSFSIAVGLRLGSNLNHPHCCPCGTQVDRLGHHGLSCFRSAGRFSRHAALNDIIRRALVTVNVPAQLEPNGIVRGDGKRPDGLSLIPWMNGRCLVWDATCVDTLAPSHLHMSSRVAGLVATDAEIRKVQKYAALAEDYIFLPFGVETIGPWGSDAKVFIKHLSRRLIQATGDQKAGTYLGQRIALAIQRGNVASILGTHPQDSNLDAVFYVN

SEQ ID NO: 9474 - protein, 970 aa, Pyrgus malvae
MSQLPSTSGACNQFHNDTFAALVQCPQCPLPRYFKGQRGLRIHIGKTHSINQNNQNSTSFSSQNLSSSQVNVSNLDTHEPFWKYLHRLKLSIPIVKRIPKGARLSIASKLSECIKKLLKENTASTWKQFFTFSFNILHASLDHNNSLSLTQKLKSNCLKTFDSFGNFSECNSFQKNNHSVFRLVEKKISDGDIKGAANLLFSNDVIAPDSADTVTALRSKHPPPSEPPTPTSNNCSILKCNSKDVYAAIMSFKNGSAGGLDGLSPQHLKDLTCGATGEVGRTLLNDITSLINLMLSGKVNLEITDILYGANLCALKKKDGGIRPIAVGNTIRRIASKICCRHILPQLQNEFQPVQLGFGSKGGCEAAVHSLRSYLLNVTNEVVLKVDVKNAFNSVHRNAFLCEANKLVPDIFPYLWQCYSRPSNLLYRNNLILSAAGCQQGDPLGPAIFSLAIHPIISALKSKLNMWYLDDGTLGGEASLVYQDLQNLINSFQQVGLELNFSKCELYIPETISDSGKNYIINKFNTIAPNIQVLNKESLRLLGSPVLDESIPTFLDDQISKFEDYSEKLSKINAHMAYHIIRSCLFVPKFTYFLRCSPIWKHKNLLFSIDSLVQDCLAKILNCSLNIKSWTQACLPLRFGGIGIRQISSVSLPAFLSSVHSTKLLFKKITNSFHISNITYCEEAIDAWLTACPGVTLPQTLTSQRLWDEPLCKIVYTNLLNNCVNSAERARLLAVSVPESGYWLQALPSTKIGTLLDNVSFSIAVGLRLGSNLNHPHCCPCGTQVDRLGHHGLSCFRSAGRFSRHAALNDIIRRALVTVNVPAQLEPNGIVRGDGKRPDGLSLIPWMNGRCLVWDATCVDTLAPSHLHMSSRVAGLVATDAEIRKVQKYAALAEDYIFLPFGVETIGPWGSDAKVFIKHLSRRLIQATGDQKAGTYLGQRIALAIQRGNVASILGTHPQDSNLDAVFYVN

SEQ ID NO: 9475 - protein, 970 aa, Pyrgus malvae
MSQLPSTSGAYNQFHNDTFAALVQCPQCPLPRYFKGQRGLRIHIGKTHSINQNNQNSTSFSSQNLSSSQVNVSNLDTHEPFWKYLHRLKLSIPIVKRIPKGARLSIASKLSECIKKLLKENTASTWKQFFTFSFNILHASLDHNNSLSLTQKLKSNCLKTFDSFGNFSECNSFQKNNHSVFRLVEKKISDGDIKGAANLLFSNDVIAPDSADTVTALRSKHPPPSEPPTPTSNNCSILKCNSKDVYAAIMSFKNGSAGGLDGLSPQHLKDLTCGATGEVGRTLLNDITSLINLMLSGKVNLEITDILYGANLCALKKKDGGIRPIAVGNTIRRIASKICCRHILPQLQNEFQPVQLGFGSKGGCEAAVHSLRSYLLNVTNEVVLKVDVKNAFNSVHRNAFLCEANKLVPDIFPYLWQCYSRPSNLLYRNNLILSAAGCQQGDPLGPAIFSLAIHPIISALKSKLNMWYLDDGTLGGEASLVYQDLQNLINSFQQVGLELNFSKCELYIPETISDSGKNDIINKFNTIAPNIQVLNKESLRLLGSPVLDESIPTFLDDQISKFEDYSEKLSKINAHMAYHIIRSCLFVPKFTYFLRCSPIWKHKNLLFSIDSLVQDCLAKILNCSLNIKSWTQACLPLRFGGIGIRQISSVSLPAFLSSVHSTKLLFKKITNSFHISNITYCEEAIDAWLTACPGVTLPQTLTSQRLWDEPLCKIVYTNLLNNCVNSAERARLLAVSVPESGYWLQALPSTKIGTLLDNVSFSIAVGLRLGSNLNHPHCCPCGTQVDRLGHHGLSCFRSAGRFSRHAALNDIIRRALVTVNVPAQLEPNGIVRGDGKRPDGLSLIPWMNGRCLVWDATCVDTLAPSHLHMSSRVAGLVATDAEIRKVQKYAALAEDYIFLPFGVETIGPWGSDAKVFIKHLSRRLIQATGDQKAGTYLGQRIALAIQRGNVASILGTHPQDSNLDAVFYVN

SEQ ID NO: 9476 - protein, 970 aa, Pyrgus malvae
MSQLPSTSGACNQFHNDTFAALVQCPQCPLPRYFKGQRGLRIHIGKTHSINQNNQNSTSFSSQNLSSSQVNVSNLDTHEPFWKYLHRLKLSIPIVKRIPKGARLSIASKLSECIKKLLKENTASTWKQFFTFSFNILHASLDHNNSLSLTQKLKSNCLKTFDSFGNFSECNSFQKNNHSVFRLVEKKISDGDIKGAANLLFSNDVIAPDSADTVTALRSKHPPPSEPPTPTSNNCSILKCNSKDVYAAIMSFKNGSAGGLDGLSPQHLKDLTCGATGEVGRTLLNDITSLINLMLSGKVNLEITDILYGANLCALKKKDGGIRPIAVGNTIRRIASKICCRHILPQLQNEFQPVQLGFGSKGGCEAAVHSLRSYLLNVTNEVVLKVDVKNAFNSVHRNAFLCEANKLVPDIFPYLWQCYSRPSNLLYRNNLILSAAGCQQGDPLGPAIFSLAIHPIISALKSKLNMWYLDDGTLGGEASLVYQDLQNLINSFQQVGLELNFSKCELYIPETISDSGKNDIINKFNTIAPNIQVLNKESLRLLGSPVLDESIPTFLDDQISKFEDYSEKLSKINAHMAYHIIRSCLFVPKFTYFLRCSPIWKHKNLLFSIDSLVQDCLAKILNCSLNIKSWTQACLPLRFGGIGIRQISSVSLPAFLSSVHSTKLLFKKITNSFHISNITYCEEAIDAWLTACPGVTLPQTLTSQRLWDEPLCKIVYTNLLNNCVNSAERARLLAVSVPESGYWLQALPSTKIGTLLDNVSFSIAVGLRLGSNLNHPHCCPCGTQVDRLGHHGLSCFRSAGRFSRHAALNDIIRRALVTVNVPAQLEPNGIVRGDGKRPDGLSLIPWMNGRCLVWDATCVDTLAPSHLHMSSRVAGLVATDAEIRKVQKYAALAEDYIFLPFGVETIGPWGSDAKVFIKHLSRRLIQATGDQKAGTYLGQRIALAIQRGNVASILGTHPQDSNLDAVFYVN

SEQ ID NO: 9477 - protein, 964 aa, Heliopetes sublinea
MSQVPSTSGAYNQFHNNNYAVLVQCPQCPLPRYFKGQRGLNIHIGKSHQNSTLLASQSFSSSHVKDSTFDCHEPFWKYLQRLKLSIPIVKRIPKGARLSIASKLSECIKRVLKENNDSAWKQFLTFSYNILHASSDHKNTLSLTQKLKYNCLKPFDTLKNISETNSFKKHKHSVFRFIERKISDGDIKGAANLLFSSDTIAPDSADTVTALKSKHPLPLELPTSYSNNNSVLKCNSKDVYGVIMSFKNGSAGGLDGLSPQHLKDLTCGATGEVGKTLLNDITNLINLMLSGNVNSQITNVLYGANLCALKKKDGGIRPIAVGNTIRRIASKICCRHILPKLQSEFQPVQLGFGSKGGCEAAVHSLRSYLLNVTNEVVLKVDVKNAFNSVHRNSFLCEVNKLVPDIFPYLWQCYSSPSNLLYSNNLILSAAGCQQGDPLGPAIFSLAIHPIISALNSKLNIWYLDDGTLGGEASLVHKDLQYLITNFKQLGLELNFSKCELYIPETISNLERKDIIKKFNTIAPNIQILNKESLRLLGSPVLDESIPAFLDDQISKFEDCSDKLTKINAHMAYHIIRSCLFVPKFTYVLRCSPIWKHTNLLHSIDSLVQNCLVKILNCSLNINSYNQACLPLRFGGIGIRKISSVSLPAFLSSVHSTKLLFEKITKSFHFSNISFSVEAQEAWLTACPGVPCPQQLTSQRLWDEPLCKIVFNNLINNCENSAERARLLAVSVPESGLWLQALPSAHLGTLLDNTSFSVAVGLRLGSIQNHPHCCPCGAQVDRLGHHGLSCFRSAGRFSRHAALNDIIRRALVTVNVPAQLEPNGIVRDDGKRPDGLSLIPWMNGRCLVWDATCVDTLAPSHLCMSSRVAGLVATDAEIRKVQKYAALARDYIFLPFGVETLGPWGSDAKVFIKHLSKRLIQVTGDQRAGAYLGQRIALAIQRGNVASILGTHPQDSNLDTAFYIN

SEQ ID NO: 9478 - protein, 970 aa, Pyrgus malvae
MSQLPSTSGACNQFHNDTFAALVQCPQCPLPRYFKGQRGLRIHIGKTHSINQNNQNSTSFSSQKLSSSQVNVSNLDTHEPFWKYLHRLKLSIPIVKRIPKGARLSIASKLSECIKKLLKENTASTWKQFFTFSFNILHASLDHNNSLSLTQKLKSNCLKTFDSFGNFSECNSFQKNNHSVFRLVEKKISDGDIKGAANLLFSNDVIAPDSADTVTALRSKHPPPSEPPTPTSNNCSILKCNSKDVYAAIMSFKNGSAGGLDGLSPQHLKDLTCGATGEVGRTLLNDITSLINLMLSGKVNLEITDILYGANLCALKKKDGGIRPIAVGNTIRRIASKICCRHILPQLQNEFQPVQLGFGSKGGCEAAVHSLRSYLLNVTNEVVLKVDVKNAFNSVHRNAFLCEANKLVPDIFPYLWQCYSRPSNLLYRNNLILSAAGCQQGDPLGPAIFSLAIHPIISALKSKLNMWYLDDGTLGGEASLVYQDLQNLINSFQQVGLELNFSKCELYIPETISDSGKNDIINKFNTIAPNIQVLNKESLRLLGSPVLDESIPTFLDDQISKFEDYSEKLSKINAHMAYHIIRSCLFVPKFTYFLRCSPIWKHKNLLFSIDSLVQDCLAKILNCSLNIKSWTQACLPLRFGGIGIRQISSVSLPAFLSSVHSTKLLFKKITNSFHISNITYCEEAIDAWLTACPGVTLPQTLTSQRLWDEPLCKIVYTNLLNNCVNSAERARLLAVSVPESGYWLQALPSTKIGTLLDNVSFSIAVGLRLGSNLNHPHCCPCGTQVDRLGHHGLSCFRSAGRFSRHAALNDIIRRALVTVNVPAQLEPNGIVRGDGKRPDGLSLIPWMNGRCLVWDATCVDTLAPSHLHMSSRVAGLVATDAEIRKVQKYAALAEDYIFLPFGVETIGPWGSDAKVFIKHLSRRLIQATGDQKAGTYLGQRIALAIQRGNVASILGTHPQDSNLDAVFYVN

SEQ ID NO: 9479 - protein, 970 aa, Pyrgus malvae
MSQLPSTSGACNQFHNDTFAALVQCPQCPLPRYFKGQRGLRIHIGKTHSINQNNQNSTSFSSQNLSSSQVNVSNLDTHEPFWKYLHRLKLSIPIVKRIPKGARLSIASKLSECIKKLLKENTASTWKQFFTFSFNILHASLDHNNSLSLTQKLKSNCLKTFDSFGNFSECNSFQKNNHSVFRLVEKKISDGDIKGAANLLFSNDVIAPDSADTVTALRSKHPPPSEPPTPTSNNCSILKCNSKDVYAAIMSFKNGSAGGLDGLSPQHLKDLTCGATGEVGRTLLNDITSLINLMLSGKVNLEITDILYGANLCALKKKDGGIRPIAVGNTIRRIASKICCRHILPQLQNEFQPVQLGFGSKGGCEAAVHSLRSYLLNVTNEVVLKVDVKNAFNSVHRNAFLCEANKLVPDIFPYLWQCYSRPSNLLYRNNLILSAAGCQQGDPLGPAIFSLAIHPIISALKSKLNMWYLDDGTLGGEASLVYQDLQNLINSFQQVGLELNFSKCELYIPETISDSGKNDIINKFNTIAPNIQVLNKESLRLLGSPVLDESIPTFLDDQISKFEDYSEKLSKINAHMAYHIIRSCLFVPKFTYFLRCSPIWKHKNLLLSIDSLVQDCLAKILNCSLNIKSWTQACLPLRFGGIGIRQISSVSLPAFLSSVHSTKLLFKKITNSFHISNITYCEEAIDAWLTACPGVTLPQTLTSQRLWDEPLCKIVYTNLLNNCVNSAERARLLAVSVPESGYWLQALPSTKIGTLLDNVSFSIAVGLRLGSNLNHPHCCPCGTQVDRLGHHGLSCFRSAGRFSRHAALNDIIRRALVTVNVPAQLEPNGIVRSDGKRPDGLSLIPWMNGRCLVWDATCVDTLAPSHLHMSSRVAGLVATDAEIRKVQKYAALAEDYIFLPFGVETIGPWGSDAKVFIKHLSRRLIQATGDQKAGTYLGQRIALAIQRGNVASILGTHPQDSNLDAVFYVN

SEQ ID NO: 9480 - protein, 966 aa, Heliopetes sublinea
MSQVPSTSGDACTQLSNNSSTNLILCPQCSQPRYFKGTKGLKIHIGKSHNTNSAPQDTNLTNILQCTQINSIDLNEPFWKTLYKLKSSIPLVKRIPKGARNSVASKLSQCIKKITKENSVLSWQQFFTFSYKILHAPKDSNKQLSLTQKIKSNCLNSTEIDRNFSVRHTIRNHSLFKLVENKISDGDVKGAAELLFSNDVRAPDSEETLSALRSKHPSSSCPLLSILPSNSSAIQVTSKQVYAALMSFKTGSSGGLDGLTPQHFKDLICGATGEAGRVLLNDITDLINIMLSGRVNSDVCEILYGANLCALKKKDGGVRPIAVGNSIRRIASKVCCKNILPKLQADFQPIQLGFGSKGGCEAAVHSLRSYMLNEEKEVVLKVDIKNAFNSVHRNSFLTEANTLVPKIYPYLWQSYSTPSNLVFYNNVIYSEVGCQQGDPLGPAVFSLAIHPIISKLKSKLNIWYLDDGTLGGDPSTVLSDLKFLINNFQSLGLVLNFSKCELYIPDTISETERNSILNQFNSLAPNINLINKETTRLLGAPVLDESIPSFLEDQILKFEDTSSRLYKINAHMAYHIIKFCVFVPKFTYFLRCSPIWKFIDHLNSIDGLVSECLSQILNCSLNEKSWMQASLPIRFGGIGIRKISSVSLPAFLSSVHSTKSLFLKITQAFGYADISFKPEAQETWLAACPDHSLPDPLHSQRLWDEPLCRKFYNSLISDCQNPTNLARLLAVSLPESGYWLQALPSSNLGTLLDQNSFCIAVALRLGTVLTHPHCCPCGVQVDCLGHHGLSCRRSAGRLSRHAALNDVIRRALVTANVPAQLEPNGIVRDDGKRPDGLTLIPWMNGRCLVWDATCVDTLAPSHLHLSSRVAGVIATDAEIRKMQKYAALVKEYIFLPFGVETMGPWGSDAKIFFKHLSKRLVQVTGDQRAGTYLGQRISLAIQRGNVASILGTLPHDSNLDEVFYVT

SEQ ID NO: 9481 - protein, 969 aa, Heliopetes ericetorum
MSQVPSTSGACNQFHNDTYAALVQCPQCPLPRYFKGQRGLNIHIRKTHITQNNQNLTLPASQSLSSSQGNNSTFDCHEPFWKYLNKLKLSLPIVKRIPKGARLTIASKLSNCIKKVLKENNATAWKQFFTFSYNILHASCNHNNSLSLTQKLKSNCLKSYDSLTNIIEKNTFQKHKHSIFRTVENKISDGDIKGAANLLFSNDIIAPDSADTVTALQSKHPLPLEPPTLSSNNSSFLKCSSKDIYAAIMSFKNGSAGGLDGLSPQHLKDLTCGATGEIGRTLLNDITNLINLMLSGNVNAEITNILYGANLCALKKKDGGIRPIAIGNTIRRIASKICCRHILPKLQSEFQPVQLGFGSKGGCEAAVHSLRSYLLNVANGVVLKVDVKNAFNSVNRNSFLREVNKIVPDIYPYLWQCYSTPSNLLYRNNLILSAAGCQQGDPLGPAIFSLAIHPIISALKSKLNMWYLDDGTLGGEASLVHEDLLYLLKNFQQLGLDLNFSKCELYVPETISELERNDIIKKFNTIAPNIQVLNKESLRLLGSPVLDESIPAFLDDQISKFEDYSEKLSKINAHMAYHIIRSCLFVPKFTYALRCSPIWKQKNLLYSIDSLVRDCLVKILNCPLNIKSWTQASLPLRFGGMGIRKISSVSLPAFLSSVHSTKLLFQKITKSFLISNISYCEEAQEAWLTACPGMSFPQKLTSQRLWDEPLCNIVFNNLVNDCENSAERSRLLAVSVPESGLWLQALPSANLGTLLDNTSFSVAVGLRLGSNQNHPHCCPCGAQVDRLGHHGLSCIRSAGRFSRHAALNDIIRRALVTVNVPAQLEPNGIVRSDGKRPDGISLIPWMNGRCLVWDSTCVDTLAPSHLHMSSRVAGLVATDAEIRKVQKYAVLTQDYIFLPFGVETLGPWGSDAKVFIKHLSRRLIQVTGDQRAGAYLGQRIALAIQRGNVASILGTHPQDSNLDSAFYIN

SEQ ID NO: 9482 - protein, 970 aa, Pyrgus malvae
MSQLPSTSGACNQFHNDTFAALVQCPQCPLPRYFKGQRGLRIHIGKTHSINQNNQNSTSFSSQNLSSSQVNVSNLDTHEPFWKYLHRLKLSIPIVKRIPKGARLSIASKLSECIKKLLKENTASTWKQFFTFSFNILHASLDHNNSLSLTQKLKSNCLKTFDSFGNFSECNSFQKNNHSVFRLVEKKISDGDIKGAANLLFSNDVIAPDSADTVTALRSKHPPPSEPPTPTSNNCSILKCNSKDVYAAIMSFKNGSAGGLDGLSPQHLKDLTCGATGEVGRTLLNDITSLINLMLSGKVNLEITDILYGANLCALKKKDGGIRPIVVGNTIRRIASKICCRHILPQLQNEFQPVQLGFGSKGGCEAAVHSLRSYLLNVTNEVVLKVDVKNAFNSVHRNAFLCEANKLVPDIFPYLWQCYSRPSNLLYRNNLILSAAGCQQGDPLGPAIFSLAIHPIISALKSKLNMWYLDDGTLGGEASLVYQDLQNLINSFQQVGLELNFSKCELYIPETISDSGKNDIINKFNTIAPNIQVLNKESLRLLGSPVLDESIPTFLDDQISKFEDYSEKLSKINAHMAYHIIRSCLFVPKFTYFLRCSPIWKHKNLLFSIDSLVQDCLAKILNCSLNIKSWTQACLPLRFGGIGIRQISSVSLPAFLSSVHSTKLLFKKITNSFHISNITYCEEAIDAWLTACPGVTLPQTLTSQRLWDEPLCKIVYTNLLNNCVNSAERARLLAVSVPESGYWLQALPSTKIGTLLDNVSFSIAVGLRLGSNLNHPHCCPCGTQVDRLGHHGLSCFRSAGRFSRHAALNDIIRRALVTVNVPAQLEPNGIVRGDGKRPDGLSLIPWMNGRCLVWDATCVDTLAPSHLHMSSRVAGLVATDAEIRKVQKYAALAEDYIFLPFGVETIGPWGSDAKVFIKHLSRRLIQATGDQKAGTYLGQRIALAIQRGNVASILGTHPQDSNLDAVFYVN

SEQ ID NO: 9483 - protein, 970 aa, Pyrgus malvae
MSQLPSTSGACNQFHNDTFAALVQCPQCPLPRYFKGQRGLRIHIGKTHSINQNNQNSTSFSSQNLSSSQVNVSNLDTHEPFWKYLHRLKLSIPIVKRIPKGARLSIASKLSECIKKLLKENTASTWKQFFTFSFNILHASLDHNNSLSLTQKLKSNCLKTFDSFGNFSECNSFQKNNHSVFRLVEKKISDGDIKGAANLLFSNDVIAPDSADTVTALRSKHPPPSEPLTPTSNNCSILKCNSKDVYAAIMSFKNGSAGGLDGLSPQHLKDLTCGATGEVGRTLLNDITSLINLMLSGKVNLEITDILYGANLCALKKKDGGIRPIAVGNTIRRIASKICCRHILPQLQNEFQPVQLGFGSKGGCEAAVHSLRSYLLNVTNEVVLKVDVKNAFNSVHRNAFLCEANKLVPDIFPYLWQCYSRPSNLLYRNNLILSAAGCQQGDPLGPAIFSLAIHPIISALKSKLNMWYLDDGTLGGEASLVYQDLQNLINSFQQVGLELNFSKCELYIPETISDSGKNDIINKFNTIAPNIQVLNKESLRLLGSPVLDESIPTFLDDQISKFEDYSEKLSKINAHMAYHIIRSCLFVPKFTYFLRCSPIWKHKNLLFSIDSLVQDCLAKILNCSLNIKSWTQACLPLRFGGIGIRQISSVSLPAFLSSVHSTKLLFKKITNSFHISNITYCEEAIDAWLTACPGVTLPQTLTSQRLWDEPLCKIVYTNLLNNCVNSAERARLLAVSVPESGYWLQALPSTKIGTLLDNVSFSIAVGLRLGSNLNHPHCCPCGTQVDRLGHHGLSCFRSAGRFSRHAALNDIIRRALVTVNVPAQLEPNGIVRGDGKRPDGLSLIPWMNGRCLVWDATCVDTLAPSHLHMSSRVAGLVATDAEIRKVQKYAALAEDYIFLPFGVETIGPWGSDAKVFIKHLSRRLIQATGDQKAGTYLGQRIALAIQRGNVASILGTHPQDSNLDAVFYVN

SEQ ID NO: 9484 - protein, 966 aa, Pyrgus malvae
MSQVPSTSGDGCSQLSNNNSANLLLCPQCTQPRYFKGSKGLRIHIGKSHNINSAPQVVNVTNIQPSSQINHFDSNEPFWKSLYKLKTSIPLVKRIPKGARISIASKLSQCIKKITKENSILSWHQFFTFSYNILHASTDLNKQLSLTQKLKSNCLNPIEIDKNLHKRIPFRNHSVFKLVENKIGDGDIKGAAELLFSSDVRAPDSEETLSVLQSKHPSSSCPLLPTSPPNSSALQATSEQVYAAMMSFKTGSSGGLDGLTPQHFKDLICGATGEAGRVLLSDITDLINLMLSGRVNSEVCDILYGANLCALKKKDGGIRPIAVGNTIRRIASKVCCKNILPKLQADFQPVQLGFGSKGGCEAAVHSLRSYILNEEKEVVLKVDIKNAFNSVSRNAFLTEAHTSVPEIYPYLWQSYSSPSNLVFFNNVISSAVGCQQGDPLGPAIFSLAIHPIISKLKSKLNLWYLDDGTLGGDPSTVLSDLQFLINNFQTLGLELNFSKSELYVPDTISDTERINILHNFNSLAPGIHIVNKDTLRLLGSPVLDESIPSFLDEQILKFEDSSNRLLKINAHMAYHIIKFCAFVPKFTYFLRCSPIWKFSAHLNSIDILISECLSQILNSPLNEKSWMQASLPIRFGGIGIRKISSVSLPAFLSSVHSTKSLFLKITQAFGYSDISFKTEAQENWLAACPGQSLPNPLHSQRLWDEPLCKKIHTFLLNNSSNLADRSRLLALSLPESGYWLQALPSANLGTLLDRNSFCIAMGLRLGTVLTHPHCCPCGVQVDRLGHHGLSCKRSAGRLSRHAALNDVIRRAFVTVNVPAQLEPNGIVRDDGKRPDGLTLIPWMNGRCLVWDATCVDTLAPSHLQLSSRAAGLIATDAEIRKMQKYVVLVKDYIFLPFGVETMGPWGSDAKTFVKHLSKRLVQVTGDQRAGTYLGQRISLAIQRGNVASVLGTFPHGSNLDEVFYIN

SEQ ID NO: 9485 - protein, 971 aa, Elymnias hypermnestra
MSQQSITSSHQGSASNQPTTNKSAELVQCPHCSNLRLFKGQRGLNIHLGKSHNFNQSSHNQNSQLDFNSSTNSPLELQKPFWKFIYKLKSSVPVVKRIPKGARICIATKLSQTIRNVLKKNDLCSWEQYFTFSYNILHANSDPNKSLTQKLKSNCLEPFSVFNNSFGKQNFKHRSKLNIVEKKISDGDIKGAADLLFSSDVLAPDSPETLSALNSKHPSPTVPLHLLNLPLNSCSPLTVSSKEVYAALMTFKPGSAGGLDGLTPQHFKDLICGVTGEAGNTLLLDITSLINLMLSGNVNKDVTCILYGAQLCALQKRDGGIRPIAVGNTIRRLASKVCCKNVFSKLQGIFQPIQLGFGSKGGCEAAVHSLRSYLLNCKDEVVLKVDVKNAFNSVDRKIFLSEIYNTVPEIYSFLKQSYSTPSHLVFNNNLISSTVGCQQGDPLGPAIFGLAIHPIISKLNSKLNIWYLDDGTFGGEATTVLEDLNIIIDNFKTLGLELNFNKCELYVPNTFPYIERKKVIDKFNELAPNIKIIDIESLRLLGAPVLEDSIPSFLEDQISKFINIFDNLSKINVHMAYHIIRFCLFVPKFTYFLRCCPIWKFLNHLNLIDSSIQDILIKTLNCSLTEQSWRQASLPIRFGGIGIRKVSSVALPAFLSSVHSTKSLFEKITHSLDLSQNEIPYCTEAKAAWVDACPGESLPVSLASQRLWDEPLCKLEYNRLLNESKNPTERARLLAVSTRESGFWLQALPSPNLGTLLDNNSFCISIGLRLGLPLVHPHCCPCGVQVDRLGHHGLSCQRSAGRLSRHAALNDIIRRALATANVPAQLEPNGVVRSDGKRPDGITLIPWKNGRCLVWDATCVDTMAPSHLKLSSSLPGIVATDAEIKKLQKYGSITQDHIFLPFGVETMGPWGSEAKIFFKHLSKRLLDSTSDLKAGAYLGQRISLAIQRGNVASILGTHPMDSNLDAAYYLI

SEQ ID NO: 9486 - protein, 971 aa, Elymnias hypermnestra
MSQQSITSSHQGSASNQPTTNKSAELVQCPHCSNLRLFKGQRGLNIHLGKSHNFNQSSHNQNSQLDFNSSTNSPLELQKPFWKFIYKLKSSVPVVKRIPKGARICIATKLSQTIRNVLKKNDLCSWEQYFTFSYNILHANSDPNKSLTQKLKSNCLEPFSVFNNSFGKQNFKHRSKLNIVEKKISDGDIKGAADLLFSSDVLAPDSPETLSALNSKHPSPTVPLHLLNLPLNSCSPLTVSSKEVYAALMTFKPGSAGGLDGLTPQHFKDLICGVTGEAGNTLLLDITSLINLMLSGNVNKDVTCILYGAQLCALQKRDGGIRPIAVGNTIRRLASKVCCKNVFSKLQGIFQPIQLGFGSKGGCEAAVHSLRSYLLNCKDEVVLKVDVKNAFNSVDRKIFLSEIYNTVPEIYSFLKQSYSTPSHLVFNNNLISSTVGCQQGDPLGPAIFGLAIQPIISKLNSKLNIWYLDDGTFGGEATTVLEDLNIIIDNFKTLGLELNFNKCELYVPNTFPYIERKKVIDKFNELAPNIKIIDIESLRLLGAPVLEDSIPSFLEDQISKFINIFDNLSKINVHMAYHIIRFCLFVPKFTYFLRCCPIWKFLNHLNLIDSSIQDILIKTLNCSLTEQSWRQASLPIRFGGIGIRKVSSVALPAFLSSVHSTKSLFEKITHSLDLSQNEIPYCTEAKAAWVDACPGESLPVSLASQRLWDEPLCKLEYNRLLNESKNPTERARLLAVSTRESGFWLQALPSPNLGTLLDNNSFCISIGLRLGLPLVHPHCCPCGVQVDRLGHHGLSCQRSAGRLSRHAALNDIIRRALATANVPAQLEPNGVVRSDGKRPDGITLIPWKNGRCLVWDATCVDTMAPSHLKLSSSLPGIVATDAEIKKLQKYGSITQDHIFLPFGVETMGPWGSEAKIFFKHLSKRLLDSTSDLKAGAYLGQRISLAIQRGNVASILGTHPMDCNLDAAYYLI

SEQ ID NO: 9487 - protein, 905 aa, Orses cynisca
MSQTSSVFNLQGSVSSQYNSISADLLQCPHCSQIRFFKGQRGLNIHISKSHNLLHSVQNQNFQIHSNHFNSHSQNNISQEPNEPFWKYLYNLKSSIPIVKRIPKGARICIASKLSQIIKNILKENTVRSWEQFFTFSFNILHASEDKNNHISLTQKLKTNCFKPHNSFNKFIKKTFHQNHSFFHRVERKVSDGDIKGAADLLFSNDTIAPDSPDTLSALQSKHPLPFVPLHLQNFTESSCTPLEVSCKEVYAAVMSFKPGSAGGIDGLTPQHFKDLLCGATAEAGNTLLNDITSLINFMLSGNVNKDITNILYGAHLIALKKKDGGIRPIAIGNTIRRMASKVCCKNIFPKLQTKFQPIQLGFGSKGGCEAAIHSLRSYLLNSKDEVVLKVDVKNAFNSVNRNIFLSEINNSLPEIYPFIKQAYSSPSHLIFRNNLLSSAVGCQQGDPLGPAIFSLAIHPIISSLNSKLNLWYLDDGTIGSEVTTVLDDLGKIICGFKSLGLELNFNKCELYIPDTIPELERKSIIDKFNTLAPNIQILNKESLRLLGAPVLEESIPSFLDEQISKFENTCDKLSKINVHMAYHIIRFCLFVPKFTYFLRCSPIWKFVDHLNSLDSSIQNILIKILNCSLNARSWCQASLPIRYGGIGIRKISSVALPAFLSSVHSTNPLFKKITHHLDLSVAEISYCSEAKETWLKICSNDSLPVSLTSQKQWDEPLCKLIHKQLLNETQSSTERARLLAVSVRESGYWLQALPSSNLGTLLDNNSFCIAINLRLGSSLAHPHCCPCGVQVDRLGLHGLSCQRSAGRLSRHAALNDVIRRALVTANVPAQLEPNGIVRSDGKRPDGMTLIPWKNGRCLVWDATCVDTMAPSHLKMSSRVAGMVATDAEIHKLQKYVSITQDYIF

SEQ ID NO: 9488 - protein, 971 aa, Elymnias hypermnestra
MSQQSITSSHQGSASNQPTTNKSAELVQCPHCSNLRLFKGQRGLNIHLGKSHNFNQSSHNQNSQLDFNSSTNSPLELQKPFWKFIYKLKSSVPVVKRIPKGARICIATKLSQTIRNVLKKNDLCSWEQYFTFSYNILHANSDPNKSLTQKLKSNCLEPFSVFNNSFGKQNFKHRSKLNIVEKKISDGDIKGAADLLFSSDVLAPDSPETLSALNSKHPSPTVPLHLLNLPLNSCSPLTVSSKEVYAALMTFKPGSAGGLDGLTPQHFKDLICGVTGEAGNTLLLDITSLINLMLSGNVNKDVTCILYGAQLCALQKRDGGIRPIAVGNTIRRLASKVCCKNVFSKLQGIFQPIQLGFGSKGGCEAAVHSLRSYLLNCKDEVVLKVDVKNAFNSVDRKIFLSEIYNTVPEIYSFLKQSYSTPSHLVFNNNLISSTVGCQQGDPLGPAIFGLAIQPIISKLNSKLNIWYLDDGTFGGEATTVLEDLNIIIDNFKTLGLELNFNKCELYVPNTFPYIERKKVIDKFNELAPNIKIIDIESLRLLGAPVLEDSIPSFLEDQISKFINIFDNLSKINVHMAYHIIRFCLFVPKFTYFLRCCPIWKFLNHLNLIDSSIQDILIKTLNCSLTEQSWRQASLPIRFGGIGIRKVSSVALPAFLSSVHSTKSLFEKITHSLDLSQNEIPYCTEAKAAWVDACPGESLPVSLASQRLWDEPLCKLEYNRLLNESKNPTERARLLAVSTRESGFWLQALPSPNLGTLLDNNSFCISIGLRLGLPLVHPHCCPCGVQVDRLGHHGLSCQRSAGRLSRHAALNDIIRRALATANVPAQLEPNGVVRSDGKRPDGITLIPWKNGRCLVWDATCVDTMAPSHLKLSSSLPGIVATDAEIKKLQKYGSITQDHIFLPFGVETMGPWGSEAKIFFKHLSKRLLDSTSDLKAGAYLGQRISLAIQRGNVASILGTHPMDSNLDAAYYLI

SEQ ID NO: 9489 - protein, 969 aa, Sarmientola browni
MSQVPSTSGSSRNQYNTSADLIQCPHCSQQRYFKGFKGLNIHIGKTHNQIKSSVQNISGKSSNVYVSSQIDDSSVLTNEPFWKTLSKLKSSVPVVKRIPRGARISIASKLSKCISNIIKENSVVSWEQFFTFSFNFLHAAPDSNKHLSLTQKLKQNCLKPFGILNSSDVKRQVHSNNSIYRTVERKVGDGDIKGAADLLFSNDIIAPDSPDTLSALRLKHPSSSAPLHTDPPLNCNPLKITHTEVYSAIMSFKSGSAGGLDGLTPQHLKDLTCGATGESGRSLLKDITDLINLMLSGNVNSDITNILYGANLCALKKKDGGIRPIAVGNTVRRIASKVCSKHILPKLQNLLQPTQLGFGCKGGCEAAVHSLRSYMLNDKGSVILKVDVKNAFNSVNRDTFLTEVNKIVPEIFPYLWQSYSSPSDLIFRQNLIPSTVGCQQGDPLGPAIFSLSIQPIISVLNSKLNLWYLDDGTLGGEVATVLEDLKFLINRFQELGLQLNFSKCELHVPHLEKNTITDKFKNLAPGIQILNKESLRLLGSPVLEESIPSFLDEQISKFDNISFRLSKINSHVAYHIIRLCLFVPKFLYFLRSSPIWKYKSHLFLIDSLIQDCLTKILNCSLSENSWCQASLPIRYGGIGIRKISSIALPAFLSSVHSTKPLFQKLTLSSLGLSEISYCAEAKEAWLAACPNESLPEYLSSQRQWDEPLCRTIHSELLNKSQNVVERARLLAVSVRESGYWLQALPSASLGTLLDNLSFSIAVGLRLGTYLSHPHCCPCGAQVDRLGLHGLSCQRSAGRLSRHAALNDVIRRALVTANVPAQLEPNGIVRDDGKKPDGITLIPWKNGRCLVWDATCADTLAPSHLPISSRVAGVVATNAEIRKLQKYADLTKDYIFLPFGVETMGPWGSDARLFFKHLSKRLIESTNDQRAGTYLGQRISLAIQRGNVASVLGTHPRQSNLDEVFYVNTM

SEQ ID NO: 9490 - protein, 894 aa, Myrinia binoculus
MSQALSGGACNQYSSNNSAGLIICPQCSQPRYFKGKRGLNIHIGKSHNSVQISTQNNVSSNDLSSPQINHYSLNSNEPFSKTLYKLKASIPIVKRIPKGARINIASKLSQCINIVIKENSVHSWEQFFTFSFNILHASNSNKSSSLTQKLKTNCSKPLSSFNNFDSQQYTINTHTINSKSVYRLVERKISDGDIKGAADLLFSSDVIAPDSPETISALQSKHPTNSNPLLPNFPHDVTAFQANSKQVYAAIMSFKTGSAGGLDGLTPQHFKDLVCGATGEAGRTLLNDITSLINLMLSGKVNNEISNILYGANLCALKKKDGGVRPIAVGNTIRRIASKICCKHILPTLQNKFQPVQLGFGSKGGCEAAVHSLRTYLLCEKSQVVLKVDVKNAFNSINRSAFLNEANKTIPEIYPYLWQSYSKPSNLIFHNNIIQSAVGCQQGDPLGPAVFSLAIHPIVSEIKSKLNLWYLDDGTLGGEASIVWNDLNFLINSFQGLGLELNFSKCELYIPDAICNSERNDIITKFNSLAPNIQILNKQSLRFLGAPVLEESIPSFLDEQILKFENTSNQLTKINNHMAYHIIKFCLFVPKFTYFLRCSPIWKFTDHLHSIDFLIQTFLIKILNCSLNEISWSQASLPIRFGGIGIRKISTVALPAFLSSSHSTNSLFKKITRPFNYSAISYSTDAQGIWLSACPGQSIPKSPESQRLWDEPLCRNIYGDLLNHCRDSTERARLIALSVPESGYWLQALPSANLGTLLDPNSFSIAIGLRLGTVLNHPHCCPCGVQVDRLGHHGLSCKRSAGRLSRHAALNDVIRRALVTANVPAQLEPNGIVRDDGKRPDGLTLIPWKNGRCLVWDATCVDTLAPSHIHISSRVAGMVATDAEIRKLQKYAAL

SEQ ID NO: 9491 - protein, 968 aa, Pseudonascus paulliniae
MSQVPSTSGSACNQYNTSADFIQCPHCSQLRYFKGQKGLNIHIGKTHSQSKPSVRNASDISSIFTFSSQINHSPASSEPFWKTIYKLKSSISVVKRIPKGARLCIASKFSECINNIIRENSIASWEQYFTFSFNFLHAASNSNSNQLSLTQKLKQNCSKPLDIQNVFEVRRQFHNHSIFRTVERKVGDGDIKGAAELLFSNDIIAPDSPETLSALKLKHPSPSVPLLANPPHNYNSLKITNKEVYSAIMSFKTGSAGGLDGLTPQHFKDLICAATGEVGKVLLNNITSLINIMLSGKVHTDITNILYGANLCALKKKDGGIRPIAVGNTLRRIASKICCKQILPKLQSKFQPVQLGFGSKGGCEAAVHSLRSYMLKDQESVILKVDVKNAFNSVNRDSFLEQVNTIVPEIYPFLWQSYGSPSNLIFHENLISSTVGCQQGDPLGPAIFSLSIHPIVSALNSKLNLWYLDDGTLGGEAKTVLDDLKFIIYNFEKVGLELNFSKCELYVPESYTETEKKDVIGNFKKIAPNIQILNKQSLRLLGSPVLEESIESFLDEQISKFQNISFRLNKINSHVAYHIIRFCLFVPKFMYFLRCSPIWKFKSQLFAFDALIQDCLIKILNCSLLENSWCQATLPIRYGGIGIRKISSVALPAFLSSVHSTKPLFEKLTLPLGLSEISYCAEAKEIWLAACSGESLPECLNSQRQWDEPLCKIIHTALLENSQNSVERARLLAVSVKESGYWLQALPSANLGTLLDNLSFSVAVGLRLGTPLTHPHCCPCGAQVDRLGLHGLSCQRSAGRLSRHAALNDVIRRALVTANVPAQLEPNGLVRGDGKKPDGLTLIPWKYGKCLVWDATCVDTLAPSHLSVSSRVAGVVATNAEIRKLQKYVGLVKDYIFLPFAVETMGPWGSDAKLFFKHLSKRLIESTNDQRAGTYLGQRISLTIQRGNVASVLGTHPRDNNVDVLFYS

SEQ ID NO: 9492 - protein, 968 aa, Heliopetes ericetorum
MSQVPSTSRGNCSQWNGSISAGLVLCPQCSQPRYFKGVKGLNIHIGKAHNTKVLSQNLSSSNIVSSSQIDPCKDSSEPFWKYLYKLKSSVPIVKRIPKGARISIATKLSQCIKKVLNENSINSWEQFLTFSFKILHACSDTHKHTSLTQKLKSNCLNSLDSVQNWDIRQGNRHHSIFRLVERKVGDGDLKGAADLLFSNDVLAPDSLETLTILNSKHPSPPSDVLIPTPPQNYKCVTATSKQVYAAVMSFKAGSAGGLDGLTPQHFKDLICGATGEAGRTLLNDITDLINMLLSGKVNNEICDLLYGANLCALKKKDGGIRPIAVGNTIRRIASKICCKDILPKLQAHFQPTQLGFGSKGGCEAAVHSLRSYMLNESVDVILKVDVKNAFNSINRNAFLNEACNFVPQIYPYLWQSYSTPSKLIFHDNIISSATGCQQGDPLGPAVFSLAIQPIVSKLKSKLNVWYLDDGTLGGNAASVLEDLKFLIENFKTLGLELNFSKCELFVPETIQETDKNGIIHSFNSLAPNLQILNKKSLRLLGSPVLEESIPPFLDEKILHFEDNLNRLFKINSHMAYHIIKFCLFVPKFTYFLRCSPLWKFTDHLNSIDLLIQECLTKILNTSINENSWMQASLPIRFGGIGIRKISSIALPAFLSSAHGTKSLFLKITQSLGYSDIAYCTEAQNIWLASCHDQSLPNPLHSQKLWDEPLCRNIHTHLLNNCQNSAERARLLAVSVPESGYWLQALPSANLGTLLDNNTFSTAIGLRLGTILNHPHCCPCGVQVDPLGHHGLSCKRSAGRASRHAAINDVIRRALVTVNVPAQLEPNGIVRDDGKRPDGVTLIPWMNGRCLVWDATCVDTLAPSHLYLSSRVAGVVATDAEIRKMRKYVALTQDYIFLPFGVETMGPWGQDAKSFFKHLAKRLIQVTGDQRAGTYLGQRIGLAIQRGNVASILGTHPHDSNLDAAFYIN

SEQ ID NO: 9493 - protein, 888 aa, Zopyrion sandace
MSQLPTTSGGVCNQLSNNTSADLILCPHCSRPRYFKGLKGLKIHCGKSHHTNSASPNLNLSSSLSSLPLHHSLDSNEPLWKCLNKLKSSIKIVKRIPKGARISIATKLSQCIHKITKENSVLSWEQFFNFSYKILHASSDSPNLSLTQKLKSNCLKPLDLVKNLDTKYHTNNHSIYNLVERKIGDGDIKGAADLLFSSDVMAPDSPETFSALKSKHPSPSKPVPLNPPQNIPPFQATSKQVYAAIMSFKAGSAGGLDGLTPQHFKDLICGATGEAGKELLNNITCLINIMLSGSVNNEVCNILYGANLCALKKKDGGIRPIAVGNTIRRIASKVCCKNILPKLQTHFQPIQLGFGSKGGCEAAVHSLRSYVLNEKKELVLKVDVKNAFNSVNRSAFLSETHNLLPEIYPYLSQCYSFPSNLVFHNNVISSEVGCQQGDPLGPAIFSLAIHPIISKLISKLNLWYLDDGTIGGDSSTVINDLKFLIHNFQALGLELNFSKCELYIPDTISDTERNSIIDRFDSVAPNIQILNKETLRLLGSPVLEESIPSFLDQQTLKFEDNIYRLTKINAHMAYHIIKFCLFVPKFTYFLRCSPMFKFKEQLNSIDTLIRECLTKILNCTLSEKTWMQASLPIRFGGIGVRKISSVSLPAFLSSAHSTLPLFLKITQAFGYSNISFCAEAQENWLAACPGQSLPDPLHSQKLWDEPLCRIVHNFLLNSSQSPAERARLLAVSVPESGYWLQALPSPNLGTLLDKNSFSVAIGLRLGSVLNHPHCCPCGAQVDRLGHHGLSCKRSAGRLSRHATLNDVIRRALVTVNVPAQLEPNGIVRDDGKRPDGLTLIPWMNGRCLVWDATCVDTLAPSHLHLSSSVAGMVATDAEIRKMQKYASL

SEQ ID NO: 9494 - protein, 966 aa, Pyrgus malvae
MSQVPSTSGDGCSQLSNNNSANLLLCPQCTQPRYFKGSKGLRIHIGKSHNINSAPQVVNVTNIQPSSQINHFDSNEPFWKSLYKLKTSIPLVKRIPKGARISIASKLSQCIKKITKENSILSWHQFFIFSYNILHASTDLNKQLSLTQKLKSNCLNPIEIDKNLHKRIPFRNHSVFKLVENKIGDGDIKGAAELLFSSDVRAPDSEETLSVLQSKHPSSSCPLLPTSPPNSSALQATSKQVYAAMMSFKTGSSGGLDGLTPQHFKDLICGATGEAGRVLLSDITDLINLMLSGRVNSEVCDILYGANLCALKKKDGGIRPIAVGNTIRRIASKVCCKNILPKLQADFQPVQLGFGSKGGCEAAVHSLRSYILNEEKEVVLKVDIKNAFNSVSRNAFLTEAHTSVPEIYPYLWQSYSSPSNLVFFNNVISSAVGCQQGDPLGPAIFSLAIHPIISKLKSKLNLWYLDDGTLGGDPSTVLSDLQFLINNFQTLGLELNFAKSELYVPDTISDTERNNILHNFNSLAPGIHIVNKDTLRLLGSPVLDESIPSFLDEQILKFEDSSNRLLKINAHMAYHIIKFCAFVPKFTYFLRCSPIWKFSAHLNSIDILISECLSQILNCPLNEKSWMQASLPIRFGGIGIRKISSVSLPAFLSSVHSTKSLFLKITQAFGYSDISFKTEAQENWLAACPGQSLPNPLHSQRLWDEPLCKKIHTFLLNNSYNLADRSRLLALSLPESGYWLQALPSANLGTLLDRNSFCIAMGLRLGTVLTHPHCCPCGVQVDRLGHHGLSCKRSAGRLSRHAALNDVIRRALVTVNVPAQLEPNGIVRDDGKRPDGLTLIPWMNGRCLVWDATCVDTLAPSHIQLSSRAAGLIATDAEIRKMQKYVVLVKDYIFLHFGVETMGPWGSDAKTFVKHLSKRLVQVTGDQRAGTYLGQRISLAIQRGNVASVLGTFPHGSNLDEVFYIN

SEQ ID NO: 9495 - protein, 967 aa, Pyrgus malvae
MSQVPSTSRVDCSQLNSSSSAGLVLCPQCSQPRYFKGAKGLKIHIGKAHNINVISQNFNSSNILSSSQINSSTDTSEPFWKYLYKLKSSVPIVKRIPKGARIIIASKLSECIKKVVKENSILSWEQFFTFSFKILHASSESQKQISLTQKLKSNCLNSLDSIQNVDIGQGNRHHSIFRLVERKVGDGDLKGAADLLFSNDVLAPDSKETHSALKSKHPPPSQAFNATPPQNCSSITATSKQVFAAVMSFKAGSAGGLDGLTPQHFKDLICGATGEAGRALLNDITDLINLLLSGKVNNEVCDLLYGANLCALKKKDGGIRPIAIGNTIRRIASKICCKDILPKLQTNFQPTQLGFGSKGGCEAAVHSLRSFMLNENVDVILKVDVKNAFNSISRNAFLNEASNSVPEIYSYLWQSYSAPSKLIFNNNIILSATGCQQGDPLGPAIFSLAIHPIVSKLKSKLNMWYLDDGTLGGNPSLVVDDLKFLIDHFRTLDLELNFSKCELFIPDAIQETERNNIIHSFNSLAPNIQILSKKSLRLLGSPVLEESIPPFLDEQILRFEDNLNRLFKINSHMAYHIVKFCLFVPKFTYFLRCSPMWKFSDHLNSIDLLIQECLVKILNSSISENSWIRATLPIRFGGIGIRRISSIALPAFLSSAHGTKSLFIKITQSLGYSDISYRTEAQDIWLETCPGQSLPDPLHSQRLWDEPLCRNIHNHLMNNCQNSAEKARLLAVSLPESGYWLQALPSANLETLLDNNTFSTAIGLRLGSVLNHPHCCPCGVQVDRLGHHGLSCKRSAGRTSRHAALNDVIRRALVTVNVPAQLEPNGIVRDDGKRPDGITLIPWMNGRCLVWDATCVDTLAPSHLYISSRAAGVVATDAEIRKMRKYVALTQDYIFLPFGVETMGPWGSDAKIFFKHLSRRLIQITGDQRAGTYLGQRISLAIQRGNAASILGTHPHGSNLDAAFYIN

SEQ ID NO: 9496 - protein, 967 aa, Pyrgus malvae
MSQVPSTSRVDCSQLNSSSSAGLVLCPQCSQPRYFKGAKGLKIHIGKAHNINVISQNFNSSNILSSSQINSSTDTSEPFWKYLYKLKSSVPIVKRIPKGARIIIASKLSECIKKVVKENSILSWEQFFTFSFKILHASSESQKQISLTQKLKSNCLNSLDSIQNVDIGQGNRHHSIFRLVERKVGDGDLKGAADLLFSNDVLAPDSEETHSALKSKHPPPSHALNATPPQNCSSITATSKQVFAAVMSFKAGSAGGLDGLTPQHFKDLICGATGEAGRALLNDITDLINLLLSGKVNNEVCDILYGANLCALKKKDGGIRPIAIGNTIRRIASKICCKNILPKLQTNFQPTQLGFGSKGGCEAAVHSLRSYMLNENVDVILKVDVKNAFNSISRNAFLNEASNSVPERYSYLWQSYSAPSKLIFNNNIISSATGCQQGDPLGPAIFSLAIHPIVSKLKSKLNMWYLDDGTLGGNPSLVVDDLKFLIDHFRTLDLELNFSKCELFIPDTIQETERKNIIHSFNSLAPNIQILSKKSLRLLGSPVLEESIPPFLDEQILRFEDNLNRLFKINSHMAYHIVKFCLFVPKFTYFLRCSPMWKFSDHLNSIDLLIQECLVKILNSSFSENSWIQATLPIRFGGIGIRRISSIALPAFLSSAHGTKSLFIKITQSLGYSDISYRTEAQDIWLETCPGQSLPDPLHTQRLWDEPLCRNIHTHLMNNCQNSAEKARLLAVSLPESGYWLQALPSANLGTLLDNNTFSTAIGLRLGSVLNHPHCCPCGVQVDRLGHHGLSCKRSAGRTSRHAALNDVIRRALVTVNVPAQLEPNGIVRDDGKRPDGITLIPWMNGRCLVWDATCVDTLAPSHLYISSRAAGVVATDAEIRKMRKYVALTQDYIFLPFGVETMGPWGSDAKTFFKHLSRRLIQITGDQRAGTYLGQRISLAIQRGNAASILGTHPHGSNLDAAFYIN

SEQ ID NO: 9497 - protein, 966 aa, Pyrgus malvae
MSQVPSTSGDGCSQLSNNNSANLLLCPQCTQPRYFKGSKGLRIHIGKSHNINSAPQVVNVTNIQPSSQINHFDSNEPFWKSLYKLKTSIPLVKRIPKGARISIASKLSQCIKKITKENSILSWHQFFTFSYNILHASTDLNKQLSLTQKLKSNCLNPIEIDKNLHKRIPFRNHSVFKLLENKIGDGDIKGAAELLFSSDVRAPDSEETLSVLQSKHPSSSCPLLPTSPPNSSALQATSKQVYAAMMSFKTGSSGGLDGLTPQHFKDLICGATGEAGRVLLSDITDLINLMLSGRVNSEVCDILYGANLCALKKKDGGIRPIAVGNTIRRIASKVCCKNILPKVQADFQPVQLGFGSKGGCEAAVHSLRSYILNEEKEVVLKVDIKNAFNSVSRNAFLTEAHTSVPEIYPYLWQSYSSPSNLVFFNNVISSEVGCQQGDPLGPAIFSLAIHPIISKLKSKLNLWYLDDGTLGGDPSTVLSDLQFLINNFQTLGLELNFCKSELYVPDTISDTERINILHNFNSLAPGIHIVNKDTLRLLGSPVLDESIPSFLDEQILKFEDSSNRLLKINAHMAYHIIKFCAFVPKFTYFLRCSPIWKFSAHLNSIDILISECLSQILNCPLNEKSWMQASLPIRFGGIGIRKISSVSLPAFLSSVHSTKSLFLKITQAFGYSDISFKTEAQENWLAACPGQSLPNPLHSQRLWDEPLCKKIHTFLLNNSSNLADRSRLLALSLPESGYWLQALPSANLGTLLDRNSFCIAMGLRLGTVLTHPHCCPCGVQVDRLGHHGLSCKRSAGRLSRHAALNDVIRRALVTVNVPAQLEPNGIVRDDGKRPDGLTLIPWMNGRCLVWDATCVDTLAPSHLQLSSRAAGLIATDAEIRKMQKYVVLVKDYIFLPFGVETMGPWGSDAKTFVKHLSKRLVQVTGDQRAGTYLGQRISLAIQRGNVASVLGTFPHGSNLDEVFYIN

SEQ ID NO: 9498 - protein, 963 aa, Astraptes hopfferi
MSQVPGPSNVALGNHSGDTSFDFIQCPYCSQSKYFKGRRGLNIHISKSHKISQSSNTPASAPAPSRNISNEEPFWKYLYNLKSSIPIIKRIPKGARVAVANKLSHIIKDILKENSKYHWEQYLTFSYNILHAASDSGSKQTSITQKIKNNCYKPHNICNVLEVRKHPSSVFLSVERKISDGDLKGASTLLFSNDVVAPDSPETLSALRLKHPPPSSSLFPGLSNSSNTPSLEVSSKDVYGAIMSFKNGSAGGLDALTPQHFKDLVCGASGDSGRILLNDITNLINFMLSGKINPEIAPLLYGANLIALKKKDGGIRPIAIGNTLRRIASKVCCKHILPTLQQKFQPIQLGFGSKGGCEAAVHSLRSFLLQGGGDVVLKVDVKNAFNSVDRSTLLHEIKSVIPEIFPYLLQCYGAPSHLLYKNNLIESAVGCQQGDPLGPAIFSLAIHPIISKLNSKLNMWYLDDGTLGGDATSVYEDFYLLLDNFKKIGLELNFSKCELFLSDSIRSPDKEIILQKFHSLSPNIQIVDKNSLRLLGSPVLEEAIPPFFDELFSKFDMVSERLGKIKIHMAFHIIRFCIFVPKFTYFLRCCPAWKFLNLLTFLDSHISKTLSNILNCNLDDRAWSQASLPIRFGGLGIRNPTSVALPAFLSSVHSTRSLFQKITETSLGRTEISYCAEAMNAWSTACPGVSLPVDLNVQRLWDEPLCRIVQTNLLNSSTCPAERARLLAVSVKESGFWLHAIPSFNLGTVLDDTSFTIAASLRLGLIVNHPHCCPCGVQVDHLGHHGLSCRRSAGRQSRHASINDVIRRALATVNVPAQLEPNGIVRDDGKRPDGMTLIPWKNGRCLVWDATCVDTLAPSHLHLSSRAAGVVATDAEIRKLQKYASLSRDYIFLPFGVETMGPWGSDARSFFKHLCKRLIECTNDQRAGAYLGQRISLAIQRGNVASVLGTLPRGYNLDEAHYI

SEQ ID NO: 9499 - protein, 972 aa, Astraptes hopfferi
MSQVPGPSNVSSLGNHYGDASFDFIQCPYCSQSKYFKGRRGLSIHISKSHKATQSSNTVLSTSPVNLLSPSKCIKNSSEEPFWKYLYKLKTSLPIVKRIPKGARISVATKLSQLINNILKENSTHYWEQYFTFSFNILHAASDSLAKQISITQKIKNYCSKTHFHDILDTRKQFRPSSIFHIVERKIGDGDIKGASTLLFSNDVVAPDSPETLSALRHKHPSAPSPFIIGSSTPSNVPALIATTKDVYGAIMSFKNGSAGGLDGLSPQHFKDLVCGATGDSGRALLNDITNLINFILSGKVNHNITSLLFGANLCALKKKDGGIRPIAIGNTLRRIASKVCCKHILPSLKEKFQPIQLGFGSKGGCEAAVHSLRSFLLNGGGEVVLKVDVKNAFNSVDRSTLLNEIKSFIPEVYPYLFQCYGSPSHLLYQNNLIESAVGCQQGDPLGPAIFSLAIHPIISKLNSKLNMWYLDDGTLGGDASSVFNDLNFLLDSLKKIGLELNFSKCELFISDSLSDPVKEIILQKFFSLSADIKIIDKNSLRLLGSPVLEDSIPPFFDELLSKFDTISERLGKIKIHMAYHIIRFCIFVPKFIYFLRCCPAWKFLNLLSQLDSQISLTLSNILNCNLDDRSWSQASLPIRFGGLGIRKATSVALPAFLSSVHSTNALFQKITESFLGHTEISYCVEARNAWSTACPGVSLPVDLNVQRLWDEPLCRIEQTTLINSSACPAERARLLAVSVKESGLWLHAIPSNNLGTALDDTSFTIAASLRLGLALNHPHCCPCGVQVDHLGHHGLSCRRSAGRQSRHASLNDVIRRALATVNVPAQLEPNGIVRDDGKRPDGMTLIPWKNGRCLVWDATCVDTLAPSHLHLSSRAAGVVATDAEIRKLQKYASLSRDYIFLPFGVETMGPWGSDARSFFKHLSKRLIECTNDQRAGAYLGQRISLAIQRGNVASVLGTLPRGNNLDEAYYI

SEQ ID NO: 9500 - protein, 955 aa, Nerula fibrena
MSQVQGPSKQVSSQNSDASLDYIQCPNCSQTKFFRGKRGLNIHNSKVHKTDAITNASLDSNLQSQNSNSSNPHQPFWKYIYNLKSSLPVVKRVPKGARISVAQKLSQVISVVNKNNSLQSWEQLLTFSFNILHVAADNSSKKQISITQKIKSNCSKLIEDPISDPKKTFRLSSLYRTIESKISDGDIKGASKLLFSNDVIAPDSKETLTALQSKHPPSPSPISPVVSSFDTTPSLQVSNKDVYGAIMSFKNGSASGLDGLSPQHLKDLVCGTTGETGRALLNDITILINLMLCGRVNPAITNILYGANLCALKKKDGGIRPIAVGNTLRRIASKVCCKHIISKLQLKFQPLQLGFGSKGGCEAAVHSLRSYLLNESDGVVLKVDVKNAFNSVDRSSLLQEIKNEIPEIYSYLWQCYGTPSSLLYRNNLIESAVGCQQGDPLGPAIFSLVIHPIISTLNSKLNMWYLDDGTLGGAASTVLSDLISLKDSFKNIGLQLNFSKCELFIPDAMCTEEKTQIVQDFHLVCPNISVLNKNTLRLLGSPVLEESIPPFLEEQLSKFEDISDRLGKIKIHMAYHIIRHCIFVPNFTYFLRCCPAWKFKDSLKILDDYIYSTLKNIFNSNLNERSWCQASLPVRFGGLGIRKPSSVALPAFLSSISSTKLLFQKITLSSLGSSDVSYCLEARNAWNVACPGESFPKHENIQKQWDEPLCKTLHSYLLQSSASPAERARLLAVSVKESGFWLDALPSFNLGTLLDDTSFSIAISLRLGVNVNHPHCCPCGAQVDRLGHHGLSCRRSAGRQSRHAALNDVIRRALATVNVPAQLEPNGIVRDDGKRPDGLTLIPWKNGRCLVWDATCADTLAPSHIHLTSKAAGVLATDAEIRKLQKYVALNRDYIFLPFGVETMGPWGSDARIFFKHLSRRLTECTHDQKAGAYLGQRISLAIQRGNVASILGTH

SEQ ID NO: 9501 - protein, 972 aa, Epargyreus clarus
MSQVPGPSNASAFCNHSGDTSFDFLQCPHCSQIKYFKGRRGLNIHISKCHKASQSINTILSNSLVDPPTQSLSDQNYNEEPFWKYLYKLKTSTPIVKRIPKGARISVATKLSHLINSIIKKNSTYYWEQYLTFSFNILHAATDPLTKKTSITQKIKNNCLRSNFNNVLEKKQPLRSSSIFHTVERKISDGDIKGASTLLFSNDVVAPDSSETLSALRSKHPSPTSPLLLGCSSPLNVPSLTVSHKDVYGAIMSFKNGSAGGLDALTPQHFKDLVCGATGDSGRVLLNDITNLINFMLSGKVNPEVTNLLYGANLCALKKKDGSIRPIAVGNTLRRIASKVCCRHVLPTLEKKFQPLQLGFGSKGGCEAAVHSLRSFLTNGGGDVVLKVDVKNAFNSVDRSILLEETKTVIPEVYPYLFQCYGAPSHLLYRNNLIESAVGCQQGDPLGPAIFSLAIHPIISKLNSKLNMWYLDDGTLGGDATGVFEDFNYLLNALKSIGLELNFSKCELFISELLPATEREIVLNKFYSLSPDLKIVDKKSLRLLGSPVLEDSIPPFFDELLSKFDIVSERLGKIKIHMAYQIIRFCIFVPKFTYFLRCCPAWKFLNLLSFLDSQILGNLSNILNCNLDDRSWSQASLPIRFGGLGIRKASSVALPAFLSSVHSTSSLFQKITDASLGRTEISYCAEARDAWSQACPGISPPLDLTVQRLWDEPLCRKTHTSLLDSSTCSAERARLLAVSVKESGFWLHAIPSSNLGTVLDNTSFSIAVSLRLGLTLNHPHCCPCGVQVDHLGHHGLSCRRSAGRQSRHASLNDVIRRALATVNVPAQLEPNGVVRDDGRRPDGLTLIPWKNGRCLVWDATCVDTLAPSHLTLSSRAAGVVATDAEIRKLQKYASLSRDYIFLPFGVETMGPWGSDARSFYKHLSKRLIECTNDQRAGAYLGQRISLAIQRGNVASVLGTLPKDNNLDEAYYI

SEQ ID NO: 9502 - protein, 967 aa, Heliopetes ericetorum
MSQVPGPSNVYISSQNSDTSFDYIQCPHCSQIKYFKGQRGLKIHISKIHNPNSVTNSSLNFDLQLQNNTSSNCNEPFWKYIQKLKSSLPLVKRIPKGARISVAQKLSEVINNIKKSNTYHNWQKLLTFSFQILHAADDSSVKQTSLTQKIKSNCSKLLENQTYVKRKPFRPSTLYRAIENKISDGNLKGASNLLFSSDVIAPDSTETLTVLQSKHPPSTSPPNPQGLSFDTTPPLHVSSKDIYGAIMSFRNGSASGLDGLSPQHLKDLVCGATGETGRALLNDITDLVNLMLSGGVNPEITNILYGANLCALKKKDGGVRPIAVGNTLRRIASKVCCKHILAKLKEKFQPLQLGFGSKGGCEAAVHSLRSYLLKEPGGVVLKVDVKNAFNSVDRSSLLEEVKREIPEIYTYLWQCYGLPSSLLYQSNLIESAVGCQQGDPLGPAIFSLVIHPIISALNSKLNMWYLDDGTLAGEPSTVLSDLISLKNCFKNVGLDLNYSKCELFLPDTMTAEEKTLIIRDFNLVAPKIQIVNKETLRLLGAPVLEESITPFFEQQLSKFENISDRLEKIKIHMAYHIIRHCVFVPKFTYFLRCCPAFKFKDSLYLLDDFIRSTLKNIFNSNLDEKSWCQATLPIKFGGLGIRKPSAIALPAFLSSTNSVKILFDKITNSSLGPTDISYGLEARNAWSLACPGVSPPKNEHIQRQWDEPLCKSLHLSLIQSTVCQAERARLLSVSVKESGFWLDALPSINLGTLLDNNSFMIAACLRLGIKLNHPHCCPCGAQVDRLGHHGLSCRRSAGRQSRHAALNDVIRRALATVNVPAQLEPNGIVRDDGKRPDGVTLIPWKNGRCLVWDATCVDTLAPSHIHISCRAAGVVATDAEIQKLRKYVALNQDYIFLPFGVETMGPWGPDAKNFFKHLSRRLIECTHDPRAGSYLGQRISLAIQRGNVASILGTHPKDSNLDAAFYI

SEQ ID NO: 9503 - protein, 968 aa, Pyrgus malvae
MSQVPGPSSVCTVSGQNSDTLFDFIQCPHCSQSKYFKGQRGLKIHISKVHNLNSIDNVSLDSDLQSQNNKNSNFSEPFWKKLQKLKSTIALVKRIPKGARICVAQKLSQVINNIIKNNSIENWEQLLTFSFKILHAADDTSGKQNSLTQKIKSNCSQLLEFHNFDKGKSFRPSTLYRAIENKISDGDLKGASNLLFSNDVIAPDSTETLIALQSKHPPSTSHINLQALPFNATPPLHVSSKDVYGAIMSFKNGSASGLDGLSPQHLKDLVCGMTGETGRTLLNDITVLINLMLSGGVNSEISSVLYGANLCALKKKDGGIRPIAVGNTLRRIASKVCCKHIISKLQVKFQPLQLGFGSKGGCEAAVHSLRSFLLKETGGVVLKVDVKNAFNSVDRNSLLQEIKNEIPEIFSYLYQCYGAPTSLIYRSNLIESAVGCQQGDPLGPAIFSLVIHPIISALNSKLNMWYLDDGTLGGDASTVLADLILLKDSFMKVGLQLNFSKCELYISDILTEKEKTSIIQDFNVVSPQIQILNKETLRLLGSPVLEDSIPHFLEEQLSKFENISDRLDKIKIHMAYHIIRHCVFVPQFTYFLRCCPAWKFKDSLSILDDYIHGTLKNILNSNLNEKSWCQASLPIRFGGLGIRKPSSIALPAFLSSTSKIKIIFQKITFLSLGLSDVSYSLEARNAWSLACPGVSPPKNEYIQKLWDEPLCKNLHLSLIESSASPAERARLLAVSAKESGFWLDALPSSNLGTLLDNNTFTIGVSLRLGIKVTHPHCCPCGTQVDCLGYHGLSCRRSAGRQSRHAALNDVIRRALATVNVPAQLEPNGIVRDDGKRPDGLTLVPWKNGRCLVWDATCVDTLAPSHIHLSSRAAGVVATDAEIRKLQKYVALNRDYIFLPFGVETMGPWGPDAKVFYKHLSRRLIECTHDPRAGSYLGQRISLAIQRGNVASVLGTLPKDSNLDAAFYI

SEQ ID NO: 9504 - protein, 911 aa, Epargyreus clarus
MSQVPGPSNASAFCNHSGDTSFDFLQCPHCSQIKYFKGRRGLNIHISKCHKASQSINTILSNSLVDPPTQSLSDQNYNEEPFWKYLYKLKTSTPIVKRIPKGARISVATKLSHLINSIIKENSTYYWEQYLTFSFNILHAATDPLTKKTSITQKIKNNCLRSNFNNVLEKKQPLHSSSIFHTVERKISDGDIKGASTLLFSNDVVAPDSSETLSALRSKHPSPTSPLLLGCSSPLNVPSLTVSHKDVYGAIMSFKNGSAGGLDALTPQHFKDLVCGATGDSGRVLLNDITNLINFMLSGKVNPEVTNLLYGANLCALKKKDGSIRPIAVGNTLRRIASKVCCRHVLPTLEKKFQPLQLGFGSKGGCEAAVHSLRSFLTNGGGDVVLKVDVKNAFNSVDRSILLEETKTVIPEVYPYLFQCYGAPSHLLYRNNLIESAVGCQQGDPLGPAIFSLAIHPIISKLNSKLNMWYLDDGTLGGDATGVFEDFNYLLNALKSIGLELNFSKCELFISELLPATEREIVLNKFYSLSPDLKIVDKKSLRLLGSPVLEDSIPPFFDELLSKFDIVSERLGKIKIHMAYQIIRFCIFVPKFTYFLRCCPAWKFLNLLSFLDSQILGTLSNILNCNLDDRSWSQASLPIRFGGLGIRKASSVALPAFLSSVHSTSSLFQKITDASLGRTEISYCAEARDAWSQACPGISPPLDLTVQRLWDEPLCRKTHTSLLDSSTCSAERARLLAVSVKESGFWLHAIPSSNLGTVLDNTSFSIAVSLRLGLTLNHPHCCPCGVQVDHLGHHGLSCRRSAGRQSRHASLNDVIRRALATVNVPAQLEPNGVVRDDGRRPDGLTLIPWKNGRCLVWDATCVDTLAPSHLTLSSRAAGVVATDAEIRKLQKYASLSRDYIFLPFGVETMGP

SEQ ID NO: 9505 - protein, 972 aa, Urbanus velinus
MSQVPGPSNVSAFSNHYGDTSFDFVQCPYCSQSKYFKGRRGLNIHISKSHRASQSTNTVLSTSLTNPLIQSNFDKDSSVEPFWKYLYKLKTSIPIVKRIPKGARISVATKLSQLINSILKENSTHYWEQYFTFSFNILHASSDPSAKQISLTQKIKNNCSKSHFTSIIETKKPFHPSSIFHVVERKIGDGDIKGAATLLFSNDVVAPDSPETLSALRHKHPSPSSPLLLESSPPSNDLPLIVSCKDVYGAIMSFKNGSAGGLDGLTPQHFKDLVCGAMGDSGRTLLNDITNLINFILSGKINPNVTSLLFGANLCALKKKDGGIRPIAVGNTLRRIASKVCCKHILPSLQEKFQPIQLGFGSKGGCEAAVHSLRSFLLNGGGEAVLKVDVKNAFNSVDRSTLLNEIKSSIPEIYPYLFQCYGSPSHLLYQNNLIESAVGCQQGDPLGPAIFSLAIHPIISKLNSKLNMWYLDDGTLGGDAASVFDDLNFLLDALKKIGLDLNFSKCELFISELLPDPTKKIILQKFLSLSPNIKILDKKSLRLLGSPVLEDSIPPFFDELFSKFDIVSERLGKIKIHMAYHIIRFCIFVPKFTYFLRCCPAWKFSSLLSHLDSQILSSLSNILNCNLDDRSWSQASLPIRFGGLGIRKSTSVALPAFLSSVHSTSSLFQKITESFLGRTEISYCAEARKAWSAACPGVSPPVDLNVQRLWDEPLCRIVQANLLNSSTCPAERARLLAVSVKESGFWLHAIPSYNLGTVLDDTSFTIAASLRLGLPVNHPHCCPCGVQVDHLGHHGLSCRRSAGRQSRHAALNDVIRRALATVNVPAQLEPNGIVRDDGKRPDGMTLIPWKNGRCLVWDATCVDTLAPSHLHLSSRAAGIVATDAEIRKLQKYASLNRDYIFLPFGVETLGPWGSDARSFFQHLSKRLIECTNDQRTGAYLGQRISLAIQRGNVASVLGTLPRGNNLDEAFYI

SEQ ID NO: 9506 - protein, 973 aa, Epargyreus clarus
MSQVPSTSNALAFGNNFGDSSFDFVQCPYCSQPKYFKGRRGLNIHISKSHKVSQSSNTVLNTSAIDPLCQTHSNKISNEEPFWKYLYKLKSSIPIVKRIPKGARISVATKLSQLINCILKDNSKQYWEQYFTFSYNILHASSDPLSKHTSITQKIKNNCSKTLHSGFILEGRKPFHPSCIFRTIERKISDGDVKGASTLLFSNDVVAPDSTETLSALRNKHPPPSSSLLPGLTPNCSDSSLTVLPKDVFGAIMSFKNGSAGGLDALTPQHFKDLVCGATGDSGRTLLNDITKLINFMLAGKVNPEITNLLYGANLCALKKKDGGIRPIAIGNTLRRIASKVCCRHILPSLKEMFQPVQLGFGSKGGCEAAVHSLRSFLLNGGGDVTLKVDIKNAFNSVDRSTLLHEIKTIVPEIFPYLFQCYGAPTHLLYKDNLIESAVGCQQGDPLGPAIFSLAIHPIISKLNSRLNMWYLDDGTLGGDETSVFNDFTYLLDALKKIGLELNFSKCELFINELLPESVRRLILQKFYCLSPDIQIVGKKTLRLLGSPVLEESIEPFFDELLSKFDVISERLGKIKIHMAYHIIRFCIFVPKFTYFLRCCPAWKFLNLLSVLDSHILRTLSNILNCNLNERSWSQASLPIRFGGLGIRKATSVALPAFLSSVHGASSLFQKITDSSLGHTEISYCEEAKNAWRIACPGVSLPVDLNVQRLWDEPLCRITHTSLVNSSVSSAERARLLAVSVKESGFWLHTTPSNNLGTVLDNSSFTIAIGLRLGLPIIHPHCCPCGVQVDHLGHHGLSCRRSAGRQSRHAALNDVIRRALATVNVPAQLEPNGVVRDDGKRPDGLTLIPWKNGRCLVWDATCVDTMAPSHLHLSSRAAGVVATDAEIRKLQKYASLSRDYIFLPFGVETMGPWGSDARSFFKHLSRRLIECTNDQRAGAYLGQRISLAIQRGNVASVLGTLPRDSILDEAYYI

SEQ ID NO: 9507 - protein, 978 aa, Cecropterus phalaecus
MSMSQVPGTSNIPAISNHSGDTSFDFVQCPYCSQPKFLKGRKGLNIHIGKSHKDSQSSNTVLISSSINHSIPSHSDNISSKEPFWKYLYRLKTSVPVLKRIPKGARISVATKLSQVLKNILKENSRYYWEQYFSFSYNILHAASNPSTKQISITQKIKNNCSNPISNFNVSEVRKQFPPSSIFRSVESKISDGDVKGASSLLFSNDVVAPDSTETLSALRLKHPPPTSNSSLIAGLSHITDINTPLTVLPKDVYKAIMSFKNGSAGGLDALSPQHFKDLVCGAAGDSGRTLLNDITNIINFMLSGRVNPDVISLLYGANLVALKKKDGGIRPIAIGNTLRRIASKVCCHHILPSLKHKFQPIQLGFGSKGGCEAAVHSLRSFLLKDGGDVVLKVDVKNAFNSVDRSTLLNEIKTVVPEIFPYLLQCYGAPSNLLYKNNLIESANGCQQGDPLGPAIFSLAIHPIISDLNSKLNMWYLDDGTLGGDATTVFEDFLFLSNTLKNIGLELNFSKCELFISDLLPDHVRKTISQKFHSFSPNIQIVDKKSLRLLGSPVLEDSIPSFLDELLSKFETNSDRLCKIKIHMAYHIIRFCIFVPKFTYFLRCCPAWKFSNLLSELDSHILKILSNVLNCNLDDRSWSQASLPIRFGGLGIRKASSVALPAFLSSVHSTRSLFQKITNASLGPTEISYCAEARNAWSIACPGESLPVDLTAQRLWDEPLCRVLHTTLLNSSASPAERARLLAVSVKESGFWLHAIPSYNLGTLLDDTSFGIAAGLRLGLAVIHPHCCSCGVQVDHLGHHGLSCRRSAGRQSRHATLNDVIRRALATVNVPAQLEPNGIVRDDGKRPDGLTLIPWKNGRCLVWDATCVDTLAPSHLQLSSRVAGVVATDAEIRKLQKYASLSRDYIFLPFGVETMGPWGSDARSFFKHLSKRIIECTNDQRAGAYLGQRISIAIQRGNVASILGTLPKVSNLDEAYYI

SEQ ID NO: 9508 - protein, 972 aa, Anisynta dominula
MSQIPGPSKSSKLNQCSDAAAFDFLQCPYCSHPRYFKGQRGLKIHVGKTHNRSQTNDFPITSPSANPSVQNGHSSIINSGEPFWQYLNKLKTSIPIVKRIPKGARISVALKLSLFINNILKENSKHNWEQFLLFSYKTLHASNVSDRHTSITQKIKSNCSNSVDLSDFQNINQFRPFSLFQSVEKKVSDGDIRGACNLLFSNDVVAPVSPETLTALQSKHPSPTTIISSISDSNIDSPLSISAKDVYGAIMSFRNGSAGGIDGLTPQHFKDLVCGATGEAGRALLNDITKLVNFMLSGLVNPEITNILYGANLCALKKKDGGIRPIAIGSTIRRIASKVCCKHILPKLTEQFQPTQLGFGSKGGCEAAVHSLRSYLLNGDDGIVLKVDVKNAFNSVDRSTLLHEVKTTIPEIYPYIWQCYGNPSNLFYHNNLIESAVGCQQGDPLGPAIFSLAIHPIISALNSKLNMWYLDDGTLGGDVSTVLADFQYLINEFKLIGLDLNFSKCELFIPDTYSITEKSSIIQKFNSISSHLQILDKKSLCLLGCPVLEDSVVPFFDKQISKFDNISDRLGKIKIHMAYHIIRYCIFVPKFTYFLRCCPVWKFQDLLFSLDTYIHSTLSNILNCNIIDRSWCQASLPIKFGGLGIRKASSVALPAFLSSVHSTRLLCQKIMNSSLGLVDVSYCAEARNAWIASCPGLTFPVCQNSQKHWDEPLCKAMHTSLINSSDSSAERARLLAVSVKESSFWLHALPSSNLGTLMDDSSFSIAISLRLGVPIVHPHCCPCGSQVDRLGHHGLSCRRSAGRLSRHAALNDVLRRALATVNVPAQLEPNGIVRDDGKRPDGLTLIPWKNGKCLVWDATCVDTMAPSHINISSRAAGVVATDAEIRKLQKYVGLCKDYIFLPFGVETMGPWGFDATIFFKHLSGRLIESTNDRKAGAYLGQRISLAIQRGNVASILGTLPRDTSMDEAFYIV

SEQ ID NO: 9509 - protein, 970 aa, Polygonus savigny
MSQVPGQNNVSATNSHSSGTSFDLVQCPYCSQLKYFRGRRGLNIHIGKSHRNSQPSLVNLHPSSVIDSSNNASSNADENIFWKYLCKLKTSIPLVKRIPRGARITVATKLSQVIKNVLKENSKKCWEQFFTFSYNVLHASTDFSAKQISITQKIKNNCSQSQNFSNILDSSRQYRPSSLFNLVEKKISDGDIKGASTLLFSNDVVATDSPETLSALRSKHPSSTSTPPIFSTSSVSPLLVSSKDVYGAIMSFKNGSAGGIDGLSPQHLKDLICGTTGAAGRALLIDLTNLVNFMLSGKVNSLIINILYGANLCALKKKDGGIRPIAVGNTIRRIASKVCCRHIRPILEQNFQPIQLGFGSKGGCEAAVHSLRSFLLNDFGEVVLKVDVKNAFNSFDRSILLNEINNVIPEIYPFLFQCYGSPSNLFYKNNLIESAVGCQQGDPLGPALFSLAIHPIISKLNSKLNMWYLDDGTLGGDVTTVFNDLLTILDGFKKIGLELNFSKCELFISDSLPDDLKNYITQKFNTLSPNFKIMDSKSLRLLGSPVLEESIPPFLEEQLLKFDSLSERLGKIKIHMAYHIIRYCIFVPKFTYFLRCCPAWKFLNLLSFLDSHILSTLSSILNCSFDERSWSQASLPVRFGGLGIRKVSSVALPAFLSSVHSTRFLFQKITQSSLGLTEISYCAEARDAWVAACPGVPLPVELSVQRLWDEPLCRITHTSLLNSSVSSEDRARLLAVSVRESGYWLQALPSVALGTLLQNSSFSIAVSLRLGLQINHPHCCPCGVEVDRLGHHGLSCRKSAGRQSRHAALNDVIRRALVTVNVPAQLEPYGIVRDDGKRPDGLTLIPWKNGKCLVWDATCVDTLAPSHLHLSSRAAGVLATDVEISKLQKYAALRREYIFLPFGVETMGPWGSDARAFFKHLSKRLIESTNDPRAGTYLGQRISLAIQRGNVASVLGTHPEVSNLDEAYYI

SEQ ID NO: 9510 - protein, 973 aa, Epargyreus clarus
MSQVPGTSNALVFGNKSGDSSFDFVQCPYCSHPKYLKGQRGLNIHIGKSHKVSQSSNTLLITSPIDPPSQTHSNKNSDKEPFWKYLYKLKTSIPIVKRIPKGARILVANKLSQLINCILKDNSKDHWEQYFTFSYNILHASSDPLSGHTSITQKIKNNCLKPIPFENVLEDKKQFHPTCIFRSIERKISDGDIKGASTLLFSNDVVAPDSPETLSALRNKHPPPGSSLVPGLSPDCNDSHLTVLSKDVYGAIMSFKNGSAGGLDALTPQHFKDLVCGANGDSGRTLLNDITNLINFMLAGKVNQDITNLLYGANLCALKKKDGGIRPIAIGNTLRRIASKVCCRHILPSLKQKFQPIQLGFGSKGGCEAAVHSLRSFLLKGGGDVILKVDVKNAFNSVDRSTLLHEIKTIVPEVYPFLFQCYGTPTHLLYKNNLIESAVGCQQGDPLGPAIFSLAIHPIISKLNSKLNMWYLDDGTLGGDATTVFDDFTFLLDGLKKIGLELNFSKCELFINELLSVPAREMILQKFFSLSSDIKIVGKESLRLLGSPVLEDSIQPFFDELLSKFDVISERLGKIKIHMAYHIIRFCIFVPKFTYFLRCCPAWKFLNSLSVLDSHILRILSNILNCNLDDRSWSQASLPIRFGGLGVRKATSVALPAFLSSVHGTSSLFQKITNSSLGLTEISYCEEARNAWHTACPGVSLPVDLNVQKLWDEPLCRITHTSLVNSSVSSAERARLLAVSVKESGFWLHATPSNNLGSVLDNTSFTIAIGLRLGLPLIHPHCCPCGVQVDHLGHHGLSCRRSAGRQSRHAALNDVIRRALATVNVPAQLEPNGIVRDDGKRPDGLTLIPWKNGRCLVWDATCVDTMAPSHLQLSSRAAGVVATDAEIRKLQKYASLSRDYIFLPFGVETMGPWGSDARSFFKHLSRRLIECTHDQRAGAYLGQRISFAIQRGNVASVLGTLPRDNNLDEAYYI

SEQ ID NO: 9511 - protein, 973 aa, Epargyreus clarus
MSQVPGTSNALVFGNKSGDSSFDFVQCPYCSHPKYLKGQRGLNIHIGKSHKVSQSSNTLLITSPIDPPSQTHPNKNSDKEPFWKYLYKLKTSIPIVKRIPKGARILVANKLSQLINCILKDNSKDHWEQYFTFSYNILHASSDPLSGHTSITQKIKNNCLKPLPFENVLEDKKQFHPTCIFRSIERKISDGDIKGASTLLFSNDVVAPDSPETLSALRNKHPPPGSSLLPGLSLDCNDSHLTVLSKDVYGAIMSFKNGSAGGLDALTPQHFKDLVCGANGDSGRTLLNDMTNLINFMLAGKVNPDITNLLYGANLCALKKKDGGIRPIAIGNTLRRIASKVCCRHILPSLKQKFQPIQLGFGSKGGCEAAVHSLRSFLLKGGGDVILKVDVKNAFNSVDRSTLLHEIKTIVPEVFPFLFQCYGTPTHLLYKNNLIESAVGCQQGDPLGPAIFSLAIHPIISKLNSKLNMWYLDDGTLGGDATTVFDDFTFLLDGLKKIGLELNFSKCELFINELLSVPARDMILQKFFSLSSDIKIVGKESLRLLGFPVLEDSIQPFFDELLSKFDIISERLGKIKIHMAYHIIRFCIFVPKFTYFLRCCPAWKFLNSLSVLDSHILRILSNILNCNLDDRSWSQASLPIRFGGLGIRKATSVALPAFLSSVHGTSSLFQKITNSSLGLTEISYCEEARNAWHTACPGVSLPVDLNVQRLWDEPLCRITHTSLVNSSVSSAERARLLAVSVKESGFWLHATPSNNLGSVLDNTSFTIAIGLRLGLPLIHPHCCPCGVQVDHLGHHGLSCRRSAGRQSRHAALNDVIRRALATVNVPAQLEPNGIVRDDGKRPDGLTLIPWKNGRCLVWDATCVDTMAPSHLQLSSRAAGVVATDAEIRKLQKYASLSRDYIFLPFGVETMGPWGSDARSFFKHLSRRLIECTHDQRAGAYLGQRISFAIQRGNVASVLGTLPRDNNLDEAYYI

SEQ ID NO: 9512 - protein, 963 aa, Salatis canalis
MSQVPGPSNASAVGNHNSDTSFDLVPCPYCSQTKYFRGRRGLNIHISKSHKISQPSSSSQCISFSTDHSSSNSVHSKSLCNDLGEEPFWKYLHKLKTSIPIIKRIPRGARISVANKLSQLIKNILKDNSKHFWEQLFTFSFNILHAATDPLSKQISITQKIKNNCSKPLDSSNLLEPRRPFSPSSLFHAVERKISDGDIKGASTLLFSNDVVAPDSLETLSALQSKHPSPTSPLLPSLASPITDLPLLVTCKDVYRAIMSFKNGSAGGIDGLTPQHFKDLVCGTTGDAGRSLLSEITNLINFMLSGKINPEITNLIYGANLCALIKKDGGIRPIAIGNTLRRIASKVCCKHIQTKLQQKFQPTQLGFGSKGGCEAAVHSLRSFLINNGGEVVLKVDIKNAFNSVDRSALLNEVKTVIPEIYPYLFQCYGTPSHLLYRNNLIESAVGCQQGDPLGPAIFSLAIHPIISQLNSKLNMWYLDDGTLGGDVTTVFNDFIFLLDAFKKIGLELNFSKCELFTSDLVPDTQKNIIAQKFYSLSPDFQIMDKMSLRLLGSPVLEESIPPFLDEQVSKFDSISDRLGKIKIHMAYHIIRYCIFVPKFTYFLRCCPAWKFLNLLSNLDSHISNSLSTILNCSLSERSWCQASLPIRFGGLGIRKTSSVALPAFLSSVHSTRLLFQKITATSLGLTEISYCAEARSAWVAACPGGSIPVNPDIQRLWDEPLCSFTYTTLLNSSVDSAERARLLAVSVKESGFWLQALPSFNLGTLLDNSSFTISVSLRLGISINHPHCCPCGVQVDRFGHHGLSCRRSAGRHSRHAALNDVIRRALATVNVPAQLEPNGVVRDDGKRPDGLTLIPWMNGRCLVWDATCVDTMAPSHLHLSSKAAGVVATDAEIRKLQKYAGLNRDYIFLPFGVETMGPWGSDARTFFKHLSRRLIDSTSDQRAGAYLGQRISLAIQRGNVASV

SEQ ID NO: 9513 - protein, 937 aa, Aethilla lavochrea
MSQVPSSSHVSKYNSQNAFFNFIQCPHCSQTKYFKGSRGLNIHISRAHNATINKTFSAPFDSPSQNHSNNILCHPQLDNNISKEPFWKKLQKLKTSLTLVRRIPRGSRISVATKLSQYLNNITKDNSPSNWEQLLTFSFKILHVANDPKSKQTSITQKIKSNCFKSLDDTFFMPKQQFKSSSVFHIVEKKISDGDIKSASNILFSNDVIAPDCQETLSMLQSKHPSASTPLLPSLCSSDTASPLQVSIKDVYGAIMSFKNGSASGLDGLSPQHLKDLVCGATGDAGRSLLNEITNLINLMLSGNIHSDITSVLYGANLCALKKKDGGIRPIAVGNTLRRIASKVCCKQIIGKLQENFQPTQLGFGSKGGCEAAVHSLRSYLLKNSGGIVLKVDVNNAFNSIDRSTFLQEVKTFVPELYPYLWQCYGTPSNLLYRNNLIKSATGCQQGDPLGPAIFSLAIHPIISTLKSKLNMWYLDDGTLGGDASTVFSDLLFLIDSFKKIGLELNFSKCELFISDLISTKEKQNILKDFHSISPQIQIINKHSLRLLGSPVLEDSIPSFLEEQISKFENISERLDKIKIHMAYHIIRFCVFVPKFTYFLRCCPAWKFKDSLLLLDTYILSTLRKNFNCNFNEKSWCQASLPVRFGGLGIRKPSSVALPAFLSSVHSTKLLYQKIISSSLGLSDVSYCMEAKSAWMEICPGVSLPKYETIQKQWDEPLCKAVQTGLLNSSVSTAERARLLAVSMKESGLWLDALPSNNLGTLLDNHSFSVAVCLRLGLHINHPHCCPCGVQVDRLGHHGLSCRRSAGRQSRHAVLNDVIRRALATVNVPAQLEPNGIVRDDGKRPDGLTLVPWKNGRCLVWDATCVDTMAPSHLHISSKAAGMVATDAEIRKMQKYVSLHQDYIFLPFGVETMGPWGADAKIFFKHLKKKLIETTHD

SEQ ID NO: 9514 - protein, 966 aa, Epargyreus spanna
MSQVPGPSNASTFCNHSGDTSFDFLQCPHCSQIKYFKGRRGLNIHISKCHKASQSINTILSNSLVDPSTQSLSDQNYNEEPFWKYLYKLKTSTPIVKRIPKGARISVATKLSHLINSIIKENSTHYWEQYLTFSFNILHAATDPLTKKTSITQKIKNNCLRSNFNNVLETKQPLRSSSIFHTVERKISDGDIKGASTLLFSNDVVAPDSSETLSALRSKHPSPTSPLLLGCSSLLNVPSLTVSHKDVYGAIMSFKNGSAGGLDALTPQHFKDLVCGATGDSGRVLLNDITNLINFMLSGKVNPEVTNLLYGANLCALKKKDGSIRPIAVGNTLRRIASKVCCRHVLPTLEKKFQPLQLGFGSKGGCEAAVHSLRSFLTNGGGDVVLKVDVKNAFNSVDRSILLEEIKTVIPEVYPYLFQCYGAPSHLLYRNNLIESAVGCQQGDPLGPAIFSLAIHPIISKLNSKLNMWYLDDGTLGGDATGVFLDFNYLLNALKSIGLELNFSKCELFISELLPATEREIVLNKFYSLSPDLKIVDKKSLRLLGSPVLEDSIPPFFDELLSIFDIVSERLGKIKIHMAYQIIRFCIFVPKFTYFLRCCPAWKFLNLLSFLDSQILGTLSNILNCNLDDRSWSQASLPIRFGGLGIRKASSVALPAFLSSVHSTSSLFRKITDASLGRTEISYCAEARDAWSEACPDVSPPLDLTVQRLWDEPLCRKTHTSLLDSSTCSAERARLLAVSVKESGFWLHAIPSSNLGTVLDNTSFSIAVSLRLGLTLNHPHCCPCGVQVDHLGHHGLSCRRSAGRLSRHASLNDVIRRALATVNVPAQLEPNGVVRDDGRRPDGLTLIPWKNGRCLVWDATCVDTLAPSHLTLSSRAAGVVATDAEIRKLQKYASLSRDYIFLPFGVETMGPWGSDARSFYKHLSKRLIECTNDQRAGAYLGQRISLAIQRGNVASVLGTLPKDYNL

SEQ ID NO: 9515 - protein, 972 aa, Astraptes brevicauda
MSQLPGPSNVSAFGNHHGDTSFDFVQCPYCSQPKYFKGRRGLNIHISKSHKASQSSNTVLSTSPINPLTQSNYIKDSSEEPFWKYLYKLKTSLPIVKRIPKGARITVANKLSHLINSILKENSTYYWEQYLTFSFNILHAASDPSAKQISITQKIKNNCSKTIFCNVLDAKKPFRPSSIFHIVERKIGDGDIKGASTLLFSNDVVAPDSPETLSALRHKHPSPPSPVPLQSSPPSNDLSLIVSSKDVYGAIMSFKNGSAGGLDGLTPQHFKDLVCGATGDSGRTLLNDITNLINFIISGKVNPKITSLLFGANLCALKKKDGGIRPIAVGNTLRRIASKVCCKHILPSLKEKFQPIQLGFGSKGGCEAAVHSLRSFLLNHGGEVVLKVDVKNAFNSVDRSTLLNEIKTYIPEIYPYLFQCYGSPSHLLYQNNLIESAVGCQQGDPLGPAIFSLAIHPIISKLNSKLNMWYLDDGTLGGDAASVFDDLKFLLDALKKIGLELNFSKCELFISESLPDSVREIILQKFFSLSSDIKILDKKSLRLLGSPVLEDSIPPFFDELFSKFDFVSERLSKIKIHMAYHIIRFCIFVPKFTYFLRCCPAWKFLNLLSHLDFHILTTLSNILNCNFDDRSWSQASLPIRFGGLGIRKATSVALPAFLSSVHSTSSLFQKITESFLGRTEISYCAEARNVWSTACPGVSLPVDLNVQRLWDEPLCRIVHTNLLNSSTCPAERARLLAVSVKESGLWLHAIPSYNLGTVLEDTSFTIAASLRLGLPVNHPHCCPCGVQVDHLGHHGLSCRRSAGRQSRHAALNDVIRRALATVNVPAQLEPNGIVRDDGKRPDGMTLIPWKNGRCLVWDATCVDTLAPSHLHLSSRAAGVIATDAEIRKLQKYASLSRDSIFLPFGVETMGPWGSDARSFFQHLSKRLIECTNDQRAGAYLGQRISLAIQRGNVVSVLGTLPRVNNLDEAYYI

SEQ ID NO: 9516 - protein, 974 aa, Salatis canalis
MSQVPGPSSVPTNVIQNGNASFDFVQCPHCSHPKYFRGNRGLNIHISKSHKISQSNSTVLCTSSSIGNFSQSHPCNVSNEEPFWKYLHKLKTSIPIVKRIPKGARISVATKLSQLINNILKDNSRHYWEQFLTFSFNILHAASDPSMKHTSITQKIKQNCSKPLNFSNSLEPRTPFSPTSLFLAVERKISDGDLKGASNLLFSNDVVAPDSSETLSALRSKHPPPTSPVFPIFSTPTTDPPLTVSSKDVYGAVMSFRNGSAGGIDGLTPQHFKDLVCGATGDAGRALLNDITNLVNFMLSGQVNPEITNLLYGANLCALKKKDGGIRPIAIGNTLRRIASKVCCKYILPTLEGKFQPTQLGFGTKGGCEAAVHSLRSFLLNSGGEVVLKVDVKNAFNSVDRSTLLNEVRSVIPRVYPFLLQCYGSPSNLLYKNNLIESAVGCQQGDPLGPAIFSLAINPIISQLNSKLNMWYLDDGTLGGDVATVFNDLTYLLDAFKKIGLELNFQKCELFISDLISDSEKQNITAKFYSLSPDIQILNKQSLRLLGSPVLEDSIPPFLDEQLSKFECISERLGKIKIHMAYHIIRFCMFVPKFTYFLRCCPAWKFPNLLTFLDSHIRSTLSHILNSNFDDKSWCQASLPIRFGGLGIRNASSVALPAFLSSVHSTRLLYQKITNTSLGCTEISYCAEARSAWVATCPGVSFPANPDIQRLWDEPLCSLTFSTLLNSSCDTAERARLLAVSVKESGFWLQALPSVNLGTLLDNSSFSIAVCLRLGIPINHPHCCPCGVQVDRFGHHGLSCRRSAGRQSRHAALNDVIRRALATVNVPAQLEPNGVVRDDGKRPDGLTLIPWKNGRCLVWDATCVDTLAPSHLHLSSKAAGVVATDAEIRKLQKYASLNRDYIFLPFGVETMGPWGSDARSFYKHLSRRLIDSTNDQRAGAYLGQRISLAIQRGNVASVLGTHPKGSNLDEAFYI

SEQ ID NO: 9517 - protein, 973 aa, Epargyreus clarus
MSQVPGTSNALVFGNKSGDSSFDFVQCPYCSHPKYLKGQRGLNIHIGKSHKVSQSSNTLLITSPIDPPSQTHPNKNSDKEPFWKYLYKLKTSIPIVKRIPKGARILVANKLSQLINCILKDNSKDHWEQYFTFSYNILHASSDPLSGHTSITQKIKNNCLKPLPFENVLEDKKQFHPTCIFRSIERKISDGDIKGASTLLFSNDVVAPDSPETLSALRNKHPPPGSSLLPGLSPDCNDSHLTVLSKDVYGAIMSFKNGSAGGLDALTPQHFKDLVCGANGDSGRTLLNDITNLINFMLAGKVNPDITNLLYGANLCALKKKNGGIRPIAIGNTLRRIASKVCCRHILPSLKQKFQPIQLGFGSKGGCEAAVHSLRSFLLKGGGDVILKVDVKNAFNSVDRSTLLHEIKTIVPEVYPFLFQCYGTPTHLLYKNNLIESAVGCQQGDPLGPAIFSLAIHPIISKLNSKLNMWYLDDGTLGGDATTVFDDFTFLLDGLKKIGLELNFSKCELFINELLSVPARDMILQKFFSLSSDIKIVGKESLRLLGSPVLEDSIQPFFDELLSKFDIISERLGKIKIHMAYHIIRFCIFVPKFTYFLRCCPAWKFLNSLSVLDSHILRILSNILNCNLDDRSWSQASLPIRFGGLGIRKATSVALPAFLSSVHGTSSLFQKITNSSLGLTDISYCEEARNAWHTACPGVSLPVDLNVQRLWDEPLCRITHTSLVNSSVSSAERARLLAVSVKESGFWLHATPSNNLGSVLDNTSFTIAIGLRLGLPLIHPHCCPCGVQVDHLGHHGLSCRRSAGRQSRHAALNDVIRRALATVNVPAQLEPNGIVRDDGKRPDGLTLIPWKNGRCLVWDATCVDTMAPSHLQLSSRAAGVVATDAEIRKLQKYASLSRDYIFLPFGVETMGPWGSDARSFFKHLSRRLIECTHDQRAGAYLGQRISFAIQRGNVASVLGTLPRDNNLDEAYYI

SEQ ID NO: 9518 - protein, 973 aa, Astraptes enotrus
MSQAPGTSNTATSGNHSGNTSFDFVQCPYCSLPKYFKGNRGLNIHISKTHKVFQSSNKILSTSSVDPPSQRHPTKISNNEPFWKYLYKLKTSIPIVKRIPKGARISVATKLSQLINNILKENSTHYWEQYFTFSYNILHAASDSLTKPASITQKIKNNCLKTLNSSNILETRKQFHPSSVFQTVERKISDGDIKGASTLLFSNDVVAPDSSETLSALQHKHPPPSSSLHLGVSPNFCNPPLTVVNKDVYGAIMSFKNGSAGGLDALTPQHFKDLVCGVTGVSGRTLLNDITNLVNFMLSGKINPEITNLLYGANLCALKKKDGGIRPIAIGNTLRRIASKVCCKHILPSLKQRFQPIQLGFGSKGGCEAAVHSLRSFLLKGGGDVVLKVDVKNAFNSVDRSTLLDEIKTVIPEVFPYLSQCYGAPSHLLYRNNLIESAVGCQQGDPLGPAIFSLAIHPIISKLNSKLNMWYLDDGTLGGDATCVFDDFIFLLEALKKIGLELNFSKCELFIPELLPDNVRDIILQKFFSLSPDIQIVDKKSLRLLGSPVLEDSIPPFLDDLSSKFDFISERLGKIKIHMAYHIIRFCIFVPKFTYFLRCCPAWKYLNLLSDLDSYILRTLSNILNCNLDDRSWSQASLPIRFGGLGIRKPTSVALPAFLASVHSTSSLFQKITNSSLGHTEISYCAEARNAWCMSCPGVSPPVDLNVQRSWDEPLCRITHTTLLNSSVCSTERARLLAVSVKESGFWLHAIPSNNLGTVLDDTSFSIAVSLRLGLPINHPHCCPCGVQVDHLGHHGLSCRRSAGRQSRHASLNDVIRRALATVNVPAQLEPNGVVRDDGKRPDGMTLIPWKNGRCLVWDATCVDTLAPSHLHLSSRAAGVVATDAEIRKLQKYASLSRDYIFLPFGVETMGPWGSDARSFFHHLSRRLIECTNDQRAGAYLGQRISIAIQRGNVASVLGTLPRDNNLDEAFYI

SEQ ID NO: 9519 - protein, 696 aa, Pyrgus malvae
MTGETGRTLLNDITVLINLMLSGGVNSEISSVLYGANLCALKKKDGGIRPIAVGNTLRRIASKVCCKHIISKLQVKFQPLQLGFGSKGGCEAAVHSLRSFLLRETGGVVLKVDVKNAFNSVDRNSLLQEIKNEIPEIFSYLYQCYGAPTSLIYRSNLIESAVGCQQGDPLGPAIFSLVIHPIISALNSKLNMWYLDDGTLGGDASTVLADLILLKDSFKKVGLQLNFSKCELYISDVLTEKEKSSIIQDFNVVSPQIQILNKETLRLLGSPVLEDSIPHFLEEQQSKFENILDRLDKIKIHMAYHIIRHCVFVPQFTYFLRCCPAWKFKDSLSILDDYIHGTLKNILNSNLNEKSWCQASLPIRFGGLGIRKPSSIALPAFLSSTSKIKILFQKITFLSLGLSDVSYSLEARNAWSLACPGVSPPKNEYIQKLWDEPLCKNLHLSLIESSASPAERARLLAVSAKESGFWLDALPSSNLGTLLDNNTFSIAVSLRLGIKVTHPHCCPCGTQVDCLGYHGLSCRRSAGRQSRHAALNDVIRRALATVNVPAQLEPNGIVRDDGKRPDGLTLVPWKNGRCLVWDATCVDTLAPSHIHLSSRAAGVVATDAEIRKLQKYVALNRDYIFLPFGVETMGPWGPDAKVFYKHLSRRLIECTHDPRAGSYLGQRISLAIQRGNVASVLGTLPKDSNLDAAFYI

SEQ ID NO: 9520 - protein, 976 aa, Viola violella
MAQLPIPVISQDIEISSQTSNTSFDYVQCPYCSQLKLCKGRKGLNIHISKAHNVKNNVSSVTPKTCTPCVDNLDTLSQTQNDLNEPFWEFLQKLKKNLPVLKRIPKGARISVANKLSQNINNVLKDNTVFNWEQLMTFTYKILHTENDVVNNKISLTQKIKTNCLKPLDSFVFKSKNKQSQSLFHIVEKKISDGDIKGASTLLFSNDVIAPDSTETLSALKSKHPSSFSPFPSPVSSFNTPSPLQVKSKHVYKAIMSFKSGSASGLDGLSPQHLKDLVCGATGEAGRTLLNDITRLINLMLSGNVNQNILPILYGANLCALKKKDGGIRPIAVGNTLRRIASKVCCKYINPKLQEKFQPLQLGFGSKGGCEAAVHSLRSYLLKRDGGVVLKVDIKNAFNSVNRSSMLQEIKAVIPEIFPYIWQCYGLPSHLIYSNSLIESAVGCQQGDPLGPAIFSLAIHPVISSLNSKLNMWYLDDGTLGGDPSVVLSDLILLLDSFKNIGLELNFSKCELFICDTLSSIEKKALIENFHLVSPNIQIIEKKSLRLLGSPVLDESIPPFLEEQLLKFESFSDRLGKIKIHMAYHIIRYCIFVPKFMYFLRCCPAWKFKDLLLPLDSCILNTLKNVLNCNLNENSWCQASLPVRFGGLGIRKPSSVALPAFLSSVHSTKPLIQKITFPSLGYSDISYCAEARNVWMSACPSVSFPVHDNVQRQWDEPLCRATFTFLLNSCVSSAERARLLAVSAKESGFWLDALPSPNIGTFMDDSSFVLAVSLRLGVPITHPHCCPCGSQVDRLGHHGLSCIRSAGRQSRHAALNDVIRRALATVNVPAQLEPNGIVRSDGKRPDGLTLIPWKYGKCLVWDATCVDTMASSYLHLSSRAAGVVATDAEIRKMQKYVSIKENYLFLPFGVETMGPWGSDARTFYKHLSRRLIEATNDHRAGTYLGQRISLAIQRGNVASVLGTQPKDCNLDAVFYI

SEQ ID NO: 9521 - protein, 966 aa, Bibasis iluska
MSQIPGTSTNTISASQLSNASLNLVQCQYCSQPRFFKGRKGLNIHIGKTHNVLQSANNNILDQNITLKLNDSEPFWKYLSALKSSVPILKRIPKGARTSVATKLSQTIKTILKENSQVSWQNFFTFSFLILHADTDSSKSKSLTQKIKANCSKHDSTYIFDNFNHKRKYCPTNLFKKVESKISDGDIKGAANLLFSNDVVAPDSLETVTSLKLKHPTPSRSLLLDLPQTIDQPYKSSSKHVLDAIMSFKNGSAGGLDGLTPQHLKDLVCSATGEAGRVLLDDITSLVNLMLSGEVNPDIAEILYGANLCALKKKDGGIRPIAVGNTIRRIASKVCCKHIFPKLKEKFQPIQLGFGTKGGPEAAVHSLRSYLHNGGQEVILKVDVENAFNSLDRDTLLKEVHSVTPDIYPFMFQCYSKPSYLIYRNNLIHSALGCQQGDPLGPAIFSLAIQPTISKLNSKLNMWYLDDGTLGGEATTVFKDLEFLINNFQQLGLKLNFSKCELYISECLSGESKTKIKKMFNCLSPGIKFLNKESLRLLGSPIFDESIPTFFEETISNFEFISDRLKNINVHMAYHIMRYCIFVPKFMYILRCCPVWKHQDLLFSIDDLIRTTLSEILNCNLNDRSWCQASLPIRFGGLGVRKISSVALPAFLSSVHSTKSLFQKITSASLGTIEISCSIEAKNAWTLACPGVSLPHNHDLQRQWDEPLCSLVYTELLNSSSDLAERARLQAVSLKESGFWLQAIPSSNIGTLLDNTSFTIATSLRLGITINHPHCCPCGARVDALGHHGLSCQRSAGRQSRHAALNDVIRRALVTANVPAVLEPNGIVRDDGKRPDGLTLIPWKNGRCLVWDATCVDTLAPSHINLSSRAAGLVATDAEIRKLQKYAVLSKDYIFLPFGVETLGPWGSDARLFFNHLSARLIESTKDSRAGAYLGQRLSLAIQRGNVASILGTLPKDNGLDGVFYI

SEQ ID NO: 9522 - protein, 972 aa, Epargyreus clarus
MSQVPGPSNASAFCNHSGDTSFDFLQCPHCSQIKYFKGRRGLNIHISKCHKASQSINTILSNSLVDPPTQSLSDQNYNEEPFWKYLYKLKTSTPIVKRIPKGARISVATKLSHLINSIIKENSTYYWEQYLTFSFNILHAATDPLTKKTSITQKIKNNCLRSNFNNVLEKKQPLRSSSIFHTVERKISDGDIKGASTLLFSNDVVAPDSSETLSALRSKHPSPTSPLLLGCSSPLNVPSLTVSHKDVYGAIMSFKNGSAGGLDALTPQHFKDLVCGATGDSGRVLLNDITNLINFMLSGKVNPEVTNLLYGANLCALKKKDGSIRPIAVGNTLRRIASKVCCRHVLPTLEKKFQPLQLGFGSKGGCEAAVHSLRSFLTNGGGDVVLKVDVKNAFNSVDRSILLEETKTVIPEVYPYLFQCYGAPSHLLYRNNLIESAVGCQQGDPLGPAIFSLAIHPIISKLNSKLNMWYLDDGTLGDDATGVFEDFNYLLNALKSIGLELNFSKCELFISELLPATEREIVLNKFYSLSPDLKIVDKTSLRLLGSPVLEDSIPPFFDELLSKFDIVSERLGKIKIHMAYQIIRFCIFVPKFTYFLRCCPAWKFLNLLSFLDSQILGTLSNILNCNLDDRSWSQASLPIRFGGLGIRKASSVALPAFLSSVHSTSSLFQKITDASLGRTEISYCAEARDAWSQACPGISPPLDLTVQRLWDEPLCRKTHTSLLDSSTCSAERARLLAVSVKESGFWLHAIPSSNLGTVLDNTSFSIAVSLRLGLTLNHPHCCPCGVQVDHLGHHGLSCRRSAGRQSRHASLNDVIRRALATVNVPAQLEPNGVVRDDGRRPDGLTLIPWKNGRCLVWDATCVDTLAPSHLTLSSRAAGVVATDAEIRKLQKYASLSRDYIFLPFGVETMGPWGSDARSFYKHLSKRLIECTNDQRAGAYLGQRISLAIQRGNVASVLGTLPKDNNLDEAYYI

SEQ ID NO: 9523 - protein, 945 aa, Aguna metophis
MSQVPGPSNISASGNHSGDTSFDFLQCPYCSHPKYFKGRRGLNIHISKSHKLSQTTNTGLVLNGTPPDDPPAQSPSNFNTSEEPFWKYLYKLKTCIPVVKRIPKGARISVATKLSQLIKGILTDNSKHSWEQYFTFSYNTLHAASNPLSKQPSFTQIIKNNCFKPLNLTNILEEKKQFQPSSLFRSVERKISDGDIKGASTLLFSNDVVAPDSPETLSALRLKHPPPSSSLHSTLSSSFSNKPLTVSAKDIYGAIMSFKNGSAGGLDALTPQHFKDLVCGATGNSGKILLDDITNLINFMLSGKVNQEISNLLYGANLVALRKKDGGIRPIAIGNTLRRIASKVCCKHILPTLKQKFQPLQLGFGSKGGCEAAVHSLRSFLLKGGGEVVLKVDVKNAFNSVDRSILLDTIKTVIPEVFPYLFQCYGSPSHLLYSNDLIESAVGCQQGDPLGPAIFSLAIHPIISKLNSKLNMWYLDDGTLGGDASSVLDDLIFLCDAFKKIGLELNFSKCELFISDSLPNSVQQIILQKFHSFSSDIKIVDKKSLRLLGSPVLDDSIQPFFDELLSKFDIISERLCKIKIHMAYHIIRFCIFVPKFTYFLRCCPAWKYLNLLSFLDTHILKILSNILNCNLDDRSWSQASLPIRFGGLGIRKASSVALPAFLSSVHSTSSLFQKIIHKSLGHSEISYCAEARNAWSTACPGVSLPVDLKVQRLWDEPLCRVIHTNLLNSSTCPTERARLLAVSVKESGLWLHAIPSNNLGTVLDDTSFTIAASLRLGIAINHPHCCPCGVQVNHLGHHGLSCRRSAGRQSRHASLNDVIHRALATVNVPAQLEPNGVVRDDGRRPDGLTLIPWKNGRCLVWDATCVDTLAPSHLHISSRAAGVLATDAEIRKLQKYASLSRDYIFLPFGVETMGPWGSDARSFVKHLSKRLIECTNDQRAGAYLG

SEQ ID NO: 9524 - protein, 721 aa, Cecropterus takuta
MSFKNGSAGGLDALTPQHFKDLVCGAAGDSGRTLLNDITNIINFMLSGRVNPDSLPLLYGANLVALKKKDGGIRPIAIGNTIRRIASKVCCHHILPSLKQKFQPIQLGFGSKGGCEAAVHSLRSFLLKDGGDVILKVDVKNAFNSVDRSTLLNEIKTVVPEIFPYLLQCYGAPSNLLYKNSLIESANGCQQGDPLGPAIFSLAIHPIISNLNSKLNMWYLDDGTLGGDASTVFEDFIFLTNTLKNIGLELNFSKCELFISDLLPDHVRTIISQKFHSFSPNIQIVDKKSLRLLGSPVLEDSIPSFFDELLANFETISDRLCKIKIHMAYHIIRFCIFVPKFTYFLRCCPAWKFLNSLSVLDSHILKILSNILNCNLDDRSWSQASLPIRFGGLGIRKASSVALPAFLSSVHSTSSLFQKITNASLGPTEISYCAEARNAWSTACPGESPPVDLTAQRLWDEPLCRILHTTLLNSSVNPAERARLLAVSVKESGFWLHAIPSYNLGTLLDDTSFGIAASLRLGLAVIHPHCCPCGVQVDHLGHHGLSCRRSAGRQSRHATLNDVIRRALATVNVPAQLEPNGIVRDDGKRPDGLTLIPWKNGRCLVWDATCVDTLAPSHLQLSSRVAGVVATDAEIRKLQKYASLSRDYIFLPFGVETMGPWGSDARSFFKHLSKRIIECTNDQRAGAYLGQRISIAIQRGNVASILGTLPKVSNLDEAYYI

SEQ ID NO: 9525 - protein, 955 aa, Nascus phocus
MSISQVPGPSNVSAFDNQSGDASFDFVQCPYCSQPKYFRGRRGLNIHISKTHKIPQSNSTVPSTSSSINKSTHTHSPNLPSEEPFWKYLHKLRTSIPVVKRIPRGARITIATKLSQLINHILKDNSKLYWEHFFTFSFNILHAATELSSKKTSITQKLKDNCAKPFDASIFLETKRQFSPNSLFNIVERKISDGDIKGASTLLFSNDVVAPDSSETLSALQSKHPSPTSSLLSISSTPHTHPPLIVSNKDVFSAIMSFKNGSAGGIDGLTPQHFKDLVCGATGDAGKVLLNDITRLINFMLSGKVNPDITNLLYGANLCALKKKDGGVRPIAVGNTIRRIASKVCCKHILPDLKEKFQPTQLGFGSKGGCEAAVHSLRSYLVNNGGEVVFKVDVKNAFNSVDRSTLLNEIKNVIPGVYPFLLQCYGSPSHLLYRNNLIESAVGCQQGDPLGPAIFSLAIHPIISKLNSKLNMWYLDDGTLGGDVTTVFNDFVFLLDAFRKIGLDLNFSKCELYISNLIPNSERTNVIQKFFSLSPDIKILDNKSLRLLGSPVLEDSIPPFLDEQMSNFDSISDRLGKIKIHMAYHIIRFCIFVPKFTYFMRCCPAWKFQNLLFFLDSHIHNTLSSILNCNLLERSWCQASLPIRFGGLGIRKTSSVALPAFLSSAHSTRFLFQKITNSCLGSTEISYCGEATSAWIAACPGVSLPANPNVQRSWDEPLCRITHTTLLNTSVDTAERARLLAVSVKESGLWLNAVPSTNLGTLLDNTSFSIAVSLRLGIVINHPHCCPCGVPVDRLGHHGLSCRRSAGRQSRHAALNDVIRRALATVNVPAQLEPNGIVRDDGKRPDGLTLIPWKNGRCLVWDATCVDTLAPSHLHLTSRAAGVLATDAEIRKLQKYVALKQDYIFLPFGVETMGPWGSDARTFYRHLSERLIGSTNDQRAGAYLGQRISLAIQRG

SEQ ID NO: 9526 - protein, 974 aa, Cephise aelius
MSQVTGSSIVTTVNNQSGGTSLEFVQCPYCSHPKYFRGRRGLNIHIGKSHKISQTDATVLRPPSLSGPSQSHPCKNVIPEPFWKYLQNLKTSVPVVKRIPKGARISVASKLSQLINNILRENSVNYWEQLLTFSYHILHAPSDSSLKQISITQKIKNNCTRPLDSDNFLESSRKPFCPSSLIRIVERKICDGDIKGASTLLFSNDVVAPDSAETLSALRSKHPSSTSPLLPIFFSSTTDPLLTVSSKDVYGAIMSFKNGSAGGVDGLTPQHFKDLICGANGDAGRTLLNDLTNLINFMLSGRVNHDITNILYGANLCALKKKDGGIRPIAVGNTLRRIASKVCCKHILPKLEQKFQPTQLGFGSKGGCEAAVHSLRSFLLNSGGDVVLKVDVKNAFNSVDRNALLNEIKTVIPEAFPFLLQCYGAPSHLLYRNNLIESAVGCQQGDPLGPAIFSLAIHPIISKLNSKLNMWYLDDGTLGGDVTTVFDDLVYLLDAFQKIGLELNFSKCELYILDSLSDTVKRNITHKFYSLSSNIKILNNKSLRLLGSPVLEDSIQPFFEEQLSKFDSVSERLGKIKIHMAYHIFRYCIFVPKFMYYLRCCPAWKFSNILSILDSHILKTVSNILNCSLDEASWCQASLPISFGGLGIRTTSSVALPAFLSSVHSTSLLFGKITNSSLGPTEISYCAEAKNAWIAACPSISLPVDLKVQRLWDEPLCRITHTNLVNSSVSSADRARLLAVSVKESGCWLHALPSTNLGTLLDNNSFSIAVSLRLGLKINHPHCCSCGVQVDRLGHHGLSCRRSAGRQSRHAALNDVIRRALATVNVPAQLEPNGVVRDDGKRPDGLTLIPWKNGRCLVWDATCVDTLAPSHLHLSSRAAGVVATDAEIRKLQKYAALSKDYIFLPFGVETMGPWGSDARTFFKHLSRRLIDSTSDPKAGAYLAQRISLAIQRGNVASVLGTYPRDSNLDEAFYI

SEQ ID NO: 9527 - protein, 977 aa, Zopyrion sandace
MSQVPSTSKILKISSQNASFDYFQCPHCSQLKYFKGQRGLNIHIGKCHNTNNVNSLLSLSINLLQSHLDKPLCQSQQTNSQIICKQPFWKKLQKLKSSVPIVKRIPKGARISVANKLSQIINNVIKDNSFSNWEQLLTFSYNVLHAENDVAQHRTSLTQKIKLNCSKVSESKIHGLKKKSLPSLYHYIETKISDGDIKGASNLLFSNDVIAPDSLKTLSELQSKHPSPSSPVQPPMSSFDTTSSLHVLSKDVHGAIMSFRNGSASGLDGLSPQHLKDLVCGSTGEAGRSLLNDITSLINLMLSGGVNTQITSILYGANLCALKKKDGGIRPIAVGNTLRRIASKVCCKHIVSKLQGKFQPIQLGFGSKGGCEAAVHSLRSYLLNKPDAVVLKVDVKNAFNSVDRNYLLQEVRNEIPEIYSYLWQCYGEPSNLIFQNNLIESAVGCQQGDPLGPAIFSLAIHPIISTLNSKLNMWYLDDGTLGGDPSTVLSDFILLIDFFKTIGLELNFAKCELFISDSLSSEEKKSIIQNFNCVSLNIQLLDKKSLRLLGSPVLEESIQPFLEEQLTKFENISDRLSKIKIHMAYHVIRHCIFVPKFTYFLRCCPAWKFKDSLLSLDNYIYGTLRNIFNCNFNEVSWCQASLPVRYGGIGIRKPSSVALPAFLSSVSSTKLLFEKITFSSLGSTDVSYCLEARDAWMTACPCESFPTHENVQRHWDEPLCRSVHLSLLNSSISSAERARLLAVSVKESGFWLDALPSANLGTLLDNSSFTIAVSLRLGVPINHPHCCPCGAQVDRLGHHGLSCRRSVGRQSRHAALNDVIRRALATVNVPAQLEPNGIVRDDGKRPDGMTLIPWKNGRCLVWDATCVDTMAPSHLHLSSRAAGVVATDAEIRKLQKYVALHRDYIFLPFGVETMGPWGSDARIFFKHLSRRLIECTRDQRAGSYLGQRISLAIQRGNVASILGTHPRDSNLDAAFYI

SEQ ID NO: 9528 - protein, 975 aa, Autochton pseudocellus
MSQVPGPSNASAFGNHSGDTSFDFVQCPYCSQPKFLKGRRGLNIHIGKSHKVSQTNNTVLITSPINQPIPCQSSNISSEEPFWKYLYKLKTSVPIVKRIPKGARISVATKLSQLLKNILKENSRYYWEQYFTFSYNILHAASDPSTKQISITQKIKNNCSNPINNNNVLEVRKQFYPSSIFRSVERKISDGDIKGASSLLFSNDVVAPDSPETLSALRLKHPPPTSNSSLVTGLSPTNNINSPLIVKPKDVYRAIMSFKNGSAGGLDALTPQHFKDLVCGATGDAGRSLLNDITNIINLMLSGKVNPELLPVLYGANLVALKKKDGGIRPIAIGNTIRRIASKICCQHILPSLKQKFQPIQLGFGSKGGCEAAVHSLRSFLLKDGGDVILKVDVKNAFNSVDRSTLLNEIKTVVPEIFPYLLQCYGSPSHLLYKNNLIESAVGCQQGDPLGPAIFSLAIHPIISNLNSKLNMWYLDDGTLGGDATTVFNDLIFLSDALKKIGLELNFSKCELFISDLPVHVRKTILQKFHSLSPDIRIVDKKSLRLLGSPVLEDSIPPFFDELLSKFETISDRLCKIKIHMAYHIIQFCIFVPKFTYFLRCCPAWNFFNLLSFIDSHIMNILSNILNCNLDDRSWSQASLPIRFGGLGIRKATSVALPAFLSSVHSTSSLFEKITNASLGPSEMSFCAEARNAWSTACPSESLPVDLTVQRLWDEPLCRTLHTTLLNSSACPAERARLLAVSVKESGFWLHAIPSQNLGTLLDDTSFAIAASLRLGLAVNHPHCCPCGVQVDHLGHHGLSCRRSAGRQSRHASLNDVIRRALATVNVPAQLEPNGIVRDDGKRPDGLTLIPWKNGRCLVWDATCVDTLAPSHLHLSSRVAGVLATDAEIRKLQKYASLSRDYIFLPFGVETMGPWGSDARSFFKHLSKRLIECTNDQRAGAYLGQRISIAIQRGNVASVLGTLPKASNLDEAYYI

SEQ ID NO: 9529 - protein, 957 aa, Chioides vintra
MSQVPGPSNASGFCNYSGDTSLNFLQCPHCSQIRYFKGRRGLNIHISKSHKVAHSSHTVLSNSLADPPSISNTDSSEEPFWKYLHRLKTSIPIVKRIPKGARISVASKLSHLINNILKENSKHYWEQYFTFSFNILHAASDPLTKETSITQKIKNNCSKAYFSNVLETQKTFRSSSLFHTVERKISDGDVKGASTLLFSSDVVAPDSPETLSALQSKHPSPTSPLPLGVSSPFNIPSLSVSCKDVYGAIMSFKNGSAGGLDALTPQHFKDLVCGATGDSGRALLNDITNLINFMISGKVNPEVTNLLYGANLCALKKKDGSIRPIAVGNTLRRIASKVCCRHVLPTLKQKFQPIQLGFGSKGGCEAAVHSLRSFLTNGGGDVVLKVDVKNAFNSVDRSTLLEEIRTVIPEIYPYLFQCYGAPTHLLYRNNLIESAVGCQQGDPLGPAIFSLAIHPIISKLNSKLNTSVFEDFIYLLKTLKTIGLELNFSKCELFISELLSVAERESILKKFYSLSPNLKIVDNKSLRLLGSPVLEDSIPPFFDELLEKFDIVSERLGKIKIHMAYHIIRFCIFVPKFTYFLRCCPAWKFTNLLSFLDSHILGILSNILNCNLDEKSWSQASLPIRFGGLGIRKASSVALPAFLSSVHSTSCLFQKITDSSLGRTEISYCAEARNAWSEACPGVSLPVNLKVQRLWDEPLCRNTYTTLLNTSVCSAERARLLAVSVKESGFWLHAIPSSNLGTLLDDTSFSIAVCLRLGLPTNHPHYCPCGVQVDHLGHHGLSCRRSAGRQSRHASLNDVIRRALATVNVPAQLEPNGVVRDDGKRPDGLTLIPWKNGRCLVWDATCVDTLAPSHLHLSSRAAGVVATDAEIRKLQKYASLSRDYIFLPFGVETMGPWGSDARSFVKHLAKRLIECTNDQRAGAYLGQRISLAIQRGNVASVLGTLPKDNNMDEAYYI

SEQ ID NO: 9530 - protein, 968 aa, Pyrgus malvae
MSQVPGPSSVCTVSGQNSDTLFDFIQCPHCSQSKYFKGQRGLKIHISKVHNLNSIANVSLDSDLQSQNNKNSNVSEPFWKKLQKLKSTIALVKRIPKGARICVAQKLSQVITNIVKNNSIENWEQLLTFSFKILHAADDTSGKQNSLTQKIKSNCSQLLEFHNFDKGKSFRPSTLYRAIENKISDGDLKGASNLLFSNDVIAPDSTETLIALQSKHPPSTSHINLQALPFNATPPLHVSSKDVYGAIMSFKNGSASGLDGLSPQHLKDLVCGMTGETGRTLLNDITVLINLMLSGGVNSEISSVLYGANLCALKKKDGGIRPISVGNTLRRIASKVCCKHIISKLQVKFQPLQLGFGSKGGCEAAVHSLRSFLLKETGGVVLKVDVKNAFNSVDRNSLLQEIKNEIPEIFSYLYQCYGTPTSLIYRSNLIESAVGCQQGDPLGPAIFSLVIHPIISALNSKLNMWYLDDGTLGGDASTVLADLILLKDSFKKVGLQLNFSKCELYISDVLTEKEKSSIIQDFNVVSPQIQILNKETLRLLGSPVLEDSIPHFLEEQLSKFENISDRLDKIKIHMAYHIIRHCVFVPQFTYFLRCCPAWKFKDSLSILDDYIHGTLKNILNSNLNEKSWCQASLPIRFGGLGIRKPSSIALPAFLSSTSKIKILFQKITFLSLGLSDVSYSLEARNAWSLACPGVSPPKNEYIQKLWDEPLCKNLHLSLIESSASPAERARLLAVSAKESGFWLDALPSSNLGTLLDNNTFTIGVSLRLGIKVTHPHCCPCGTQVDCLGYHHGLSCRRSAGRQSRHAALNDVIRRALATVNVPAQLEPNGIVRDDGKRPDGLTLVPWKNGRCLVWDATCVDTLAPSHIHLSSRAAGVVATDAEIRKLQKYVALNRDYIFLPFGVETMGPWGPDAKVFYKHLSRRLIECTHDPRAGSYLGQRIGLAIQRGNVASVLGTLPKDSNLNFEFD

SEQ ID NO: 9531 - protein, 968 aa, Cycloglypha thrasibulus
MSQVPGTSKQPETISQTSNQSCDFITCPHCSNNKYYKGRRGLNIHIKKTHHQSILSTNDSEFIISPSLPQENTENSNIPFWQYLYKLKSSLPIIKRIPKGARLSVAKTLSQTIKRIINENSEHNWEQLLTFSFKILHAKNDLKDKKNSITQKIKLNCNENSKQCLASAKQFRPSSLYQVVERKVSDGDIKGASSLLFSNDVLAPNSSETLAALRTKHPSTKTHLLSIAPSYDATPVLTVSNKDVYGAIMSFKNGSASGLDGLSPQHLKDLVCGANGDVGRTLLSDITCLINFMLSGSVNSGVIKTLYGANLCALKKKDGGIRPIAVGCTLRRLASKVCCKHLHSSLQPKLQPKQLGFGSRGGCEAAVHSLRSFLLSSRDGIVLKVDVKNAFNSVDRSSLLQEVKKVIPEVYPYLHQCYGAPSHLVYQNNLIESAVGCQQGDPLGPAIFSLTIHPIISALKSKLNMWYLDDGTLGGESSTVYSDLTFLVDSFNKIGLELNFSKCELFLSNAISASEKSLIIDKFQSLFPGIQILDNKSLRLLGAPVLDESIEPFLEEQLLKFESISERLSKIKVHMAYHIIRHCIFIPKFTYFLRCCPAWKFENLLSSIDIYIHSTLRNILNSSLDEKTWCQASLPVRFGGLGIRKTSSVALPAFLSSVHSTKLLFQKITESLAISEISYYTEAKDAWMAACPGESFPSNLNIQKQWDEPLCRITHSSLLNSSVSPAERARILAVSVKESGLWLDALPSTNLGTLLDNTSFSVAVCLRLGVPVNHPHCCPCGAQVDRLGHHGLSCRRSAGRQSRHAALNDIIRRALTTVNVPAQLEPNGIVRDDGKRPDGLTLIPWKNGKCLVWDATCVDTMAPSHINLSSKVAGVVATDAEIRKMQKYVALNQDYIFLPFGVETMGPWGSDARVFFKHLSRRLIESTSDPRAGAYLGQRISLAIQRGNVASVLGTHPRDNNLDAAFYI

SEQ ID NO: 9532 - protein, 969 aa, Camptopleura auxo
MSQVPGTSKQPQSIISQTTNQSSDFITCPHCSNNKYYNGRKGLNIHIKKTHNHSISSLNDSKSITLSSQPQDNTGNRNEPFWQYLYKLKSSLPIIKRIPKGARISVATTLSQVIKRLLNENSQHNWEELLTFSFKILHTKNDLTDKKTSITQKIKLNCNKNSVQCLDFTKQFRSSSLYQVVERKVNDGDIKGASTLLFSNDVLAPNSLETLSALRSKHPSPKTPSSSIAPSSNDAPPIKVLKKDVYGTIMSFKNGSASGLDGLSPQHIKDLVCGSNGDIGRTLLNDITSLINFMLTGNVNSEIIKTLYGANLCAFKKKDGGIRPIAVGCTFRRLASKVCCKHLYSSLQTKFQPTQLGFASKGGCEAAVHSLRSYLLNSVNGIVLKVDVKNAFNSVDRSSLLQEVKTVIPEVYPYLYQCYGAPSHLVYQNNLLESAVGCQQGDPLGPAIFSLAIHPIISALHSKLNMWYLDDGTLGGEASTVFSDLTFLVNSFNKIGLELNFSKCELFLSNTISSTGKRSIINKFHCLFPEIQILDNKSLRLLGAPVLDESIEPFLEEQLSKFENISERLGKIKVHMAYHIIRYCIFVPKFTYFLRCCPAWKFKDSLSSIDTHIHNTLKNILNCSLDEKSWCQASLPVRFGGLGIRKTSSVALPAFLSSVQSTKLLFQKVTNALGIMDISCYAEARDAWMAACPGESLPSNVTIQKQWDEPLCRRTHSVLLNSSISPAERARILAVSVKESGLWLDALPSTNLGTLLDNTSFSVAVCLRLGVPVNHPHCCPCGAQVDRLGHHGLSCRRSAGRQSRHATLNDVIRRALTTVNVPAQLEPNGIVRDDGKRPDGLTLIPWKNGKCLVWDATCVDTMAPSHIHLSSKVAGVVATDAEIRKVQKYVALQQDYIFLPFGVETMGPWGSDARVFFKHLSRRLIESTNDPRAGAYLGQRISLAIQRGNVASVLGTHPRDNNLDAAFYI

SEQ ID NO: 9533 - protein, 973 aa, Zopyrion sandace
MSQVAGPSNVCKVSNQNSDASLEFIQCPHCSQVKYFKGNRGLKIHISKAHNTTDNLSSCHPQSHNSNSQNISAHYSNEPLWKKLQKLKSSLPVIKRIPKGARICVAQKLSQTITNIIKNNTFQNWEQLLTFSFSIFHAAVDLSGKKISLTQKIKTNCSRSSGSQNFNTNKQRNFSANSLFRVIEGKISDGDIKGASNLLFSSDVIAPDSPETISNLQSKHPSSSSQPHLLISSFDTIQSLQVSTKDVYGAIMSFKNGSASGLDGLSPQHIKDLVCGATGETGRALLNDLTSLINLMLSGQVNSEITNILYGANLCALKKKDGGIRPIAVGNTLRRIASKVCCKHIITKLQAKFQPTQLGFGSKGGCEAAVHSLRSFLLNSDSDCVVLKVDVKNAFNAVDRSIMLQEIKSEIPEIYSYLWQCYGTPSNLTYHNNLIESAVGCQQGDPLGPAIFSLAIHPIISTLNSKLNMWYLDDGTIGGNASTVLSDLILLKDRFEKIGLKLNYSKCELFISDTLNAGEKESIIQDFNLVSPNIQILTKKTLRLLGSPVLEESIQPFLEEQLSKFENISDRLGKIKIHMAYHIIRHCVFVPKFMYFLRCCPAWKFTNSLSLLDDCILSTLKNIFNCNLNERSWCQASLPVRFGGLGIRKPSSVALPAFLSSVSSIKTLFQSITSSALGSSNVSYCLDARNAWNIACPGISFPKLENVQKQWDEPLCRTIQFSLLESSVSPTERARLLAVSVKESGFWLDALPSPNLGTLLDNTSFTIAVCLRLGVPMNHPHCCPCGAQVDRLGYHGLSCRRSAGRHSRHAALNDVIRRALATVNVPAQLEPNGIVRDDGRRPDGMTLIPWKNGRCLVWDATCVDSLAPSHIHLSSKAAGVVATDAEIRKLRKYVALNQDYIFLPFGVETMGPWGSDARIFFKHLSGRLIECAQDQRAGAYLGQRISLAIQRGNVASILGTLPMDSNLDAAFYI

SEQ ID NO: 9534 - protein, 975 aa, Zera sp.
MSQVPGPNNIFKINSQASDTSFDYIQCPHCSNSRYFKGRRGLNIHIGKAHNQNFNVSLNVCGSHTVHSSDNHSQSAQHHNDSSNEHFWKYLQKLKSSLPLVKRIPKGARIIVASKLSQIINNVLKENSQHNWEQLLTFSFKTFHVANDSLIKKSITQKIKSNCFNIEDGIISHKQTRFRSSSIFHIIERKINDGDIKGASNLLFSNDVIAPDSPETLSALQSKHPSAYSPPLPPVSSSDAPPPLIVTSKDVYGAIMSFKSGSASGLDGLSPQHLKDLICGATGEAGRVLLNDITKLINLMLSGGVNPQISKNLYGANLCALKKKDGGIRPIAVGTILRRIASKVCCKHIITKLRDYFQPMQLGFGSKGGCEAAVHSLRSYLLSEAGGVVLKVDVKNAFNTVDRSSMLNEIKKIAPDILPYLLQCYGVPSNLIYRNNLIESAVGCQQGDPLGPAIFSLAIHPIISALNSKLNVWYLDDGTLGGEASTVLSDLNSLCLGFKKIGLELNFSKCELFLSDSLSISEKKSIQQAFHSVSPNIQIVEKRSLRLLGSPVLEEAIPPFFEEQISKFENISERLGKIKIHMAYHIIRHCIFVPKFTYFLRCSPAWKFKNSLLSIDNYISTIVSDILNCNFNESSWCQASLPVRFGGLGIRKPSDIALPAFLSSVYSTKSLFKKITSSFGLSDISYCTEARNAWLEACSGEPLPFHENIQKQWDEPLCRVTYKSLLNSSVSPAERARLLAVSVRESGFWLDALPSPNLGTFLDNSSFTVSVCLRLGVPVNHPHCCPCGAQVDRLGYHGLSCRRSAGRLSRHAALNDVIRRALATVNVPAQIEPNGIVRDDGKRPDGLTLIPWKNGRCLVWDATCVDTMAPSHLHLSSRAAGVVATDAEIRKMQKYVTLNQDYIFLPFAVETMGPWGSDARSFYKHLSRRLIESTNDPRAGAYLGQRISLAIQRGNVASILGTHPEDSNLDAAFYI

SEQ ID NO: 9535 - protein, 1586 aa, Loxosceles reclusa
MKNHVKWHAKTDVVSGPSPSSAQDAEATMNYPLGQDEGRAEGMHTEAATETTHLFPLPPLPLKVPPRLGDTAEQTQTRNTDESAFIRRRHLSQLDPQRTRPPAAIDETPRFPLRLPTAPRTSGNNTVPPQDLPAAKTDPPRSPDPGTTPPEKDMSDATCTQLVKGAEETSTSSHTNTAAATTVDRSRSSPGPEAVRHYDTAYVQSPPPPMAPPELPPGTTATDSIPSLSPLSNLTEEVDEPQSATAQNLPPGSLLTSQNPSEEDEGDFQPVRRKKGKRRLRRDQEQPADLTALPHPVPGQLINNPPLTSPGQPAPVSNNPFTSRDARISIQGHTLHLQFPVPAVFKCPMVKCWKEFRSSKSWSAAKQSLSRHIETFHEWKIKKEILWCGRCLDEIRTRPSDHQCLAGLQLQDALPTNLRYVCRRCRERFPSKKGLYNHVKIHDRQDAAANQTPLPAPDTGRSNGRTGGTRQQEQMQRDTATSIPQGTSETRGDSLPPHRDEANRDPDTASGHTNNQNVHVTTSPSQQSPTGLFQASTFNPQASSPSIRSPTLDQLQQDSQDVEQTEDAAPDLRAPIELTAWPDEGEDEEIPEREIDGNEPALDPANEDISLPSLAAFTEPLDTLLGRRPSDEAWCEFENLLQRINEEVHTQCKIPPPRPPGGRPPPINVEDARALQRLYRRNRRRAVRAILNGNNQACTIPASEIQDHFANIWSEKPFEDDIFDTLHDRTPVCMEPFSEEEVARALLRSENTAPGQDRISYHVWKEIDPEAKALSKIFNICLMHKNIPDSWRVSRTVLIPKKDDPTDLSDWRPISLSPTCYKLFMKCLTARVASWISEHEALSPAQKGFTPFDGVFEHNFVLQTKIQRARTEKKPLYIAWLDCSNAFGSLPHGAVTKALESAGAGDHIVELVKNIYKDTATVVATSNGDTAPIPIKAGIRQGCPLSGLLFNLAIDPVLRAIQPDSSSQFSALAYADDIVVIASSPDELQATISTVQDGLGKLAITLNPRKSAVLAYSPEKPAGPRDIDITIDQQKVRCLKMGETYRFLGKPTGIAALPHTDDMRDHIDQALLILRSKLAPWQRIDALKAFFFPALQHAMRTNQFRKGDWGHLDRVVRAEVKKTLYLPQEAANDYLYGPSKKGCMAIPIAAEESDIAYINGAFKLLTSRDPRIRKLAFEELEWTVRKRLKRAIDDADISRYLSGEDTEEYHVSSNAISSAWTAARMASHRLGVKWSIQGQAVCTTYKETAIYESQRGKLCKLIRDKRRLERAETLLGYRSQGKALECVALDSASSHFIGSGDYIRFADWRFVHRARLNLLPLNGSKKWKSTAERMCRRCGNRLETLPHAIEHCMRYSARIQQRHKSVLERLKKAASYRFKIISCEQEVGGTRRWKPDLVIKKGRDVTIIDVTVPFENRSEAFKEARRRKIEKYSELADVLRNEYQSVSVQALVVGALGTWDPENDKVMRPLTTKKYLKKFKQLCVADVIRHSRDLYYEFLTGHPPPNSQSFSSTQGHASQLPATQQDPSIRRSNDASDLNQHSCPTNPGLTPIPPATSPPSRTRSLSPANQRHTAKVAPHTRRLSLQ

SEQ ID NO: 9536 - protein, 968 aa, Girardia tigrina
MKFVLRSNKVKKSAHPSTTTRCVAARKVLALTFNREHANDGLDQLYSAFSGYIYSIRPTKPRSPYLGCSEVSANRVDHDRIQKTYVVNPKAAMTLIRPWVNSSAKPTPADFTDFVNKNNSPFNFVPDSFDFPIKTGPAFSFRPPTRDEILSCLQQKDKSSPDQSGISYQDILYSDPEGVICEKIFSIILESNTVPSDWKTFDTLMIPKSGKEGEYHIPSSWRGIALQECLYKLLTTLLCWQLKAWIRTNNLLHPLQKSLGPSDGCAEHTFLLRAVIDLYANEKEEELHIAFMDIAAAFDTISMEYILFVLDEMGLLPASVGLIRELYRDCHTRVICEGEATDRLPVTVGVRQGCPLSMLLFNIGIDPILNKLDSIECEDPITIGTSTISCMAYADDLVLFGASNFELYNLVNCASEYVRAIGMAFRLSKCAYMDFPYSDRHFLLFDGGFIPHLKADEDYVYLGNFISRLLRHTPEQVIADVVADLALLKDSALSPSQKLHAYQTFVHPKMVFYFRNTYIPFHDITAWKTGWEIVVRKKHKEFLNLPLRASNSFIYTSKDQGGVGLTCVFDEYMVQSITHSFYLLNSPDRFVKDAVWTTLEHASRSQLRNDIFSWINEGFRNCVRDHWWNKVQHAIFVLKNLGITIRLGDDFPSSCITIRLDNADYHISSTIRSSEKDKVSTFLRKCLSLHYLCSWSEQKSASRSASALSLSSYTTSVVYNSHLPPSEWQFIQLGRSYNLQVSCWFGETHLCRSCQSSAETLMHVLCICRPFMTYTNARHNAVVDILASEIREHCNAELDVNLRCRFVHSPLRVDLQVYFPDRKRIVLIDVKCPFDELKNLENANNANLEHYRPLQAAIQAKYSDHRVSLFTFIVGALGTWIPANKDALKALFIPHREKDIAYATIRSTIRWSTRQWIAFDEGRNFTNLSRFNDPAHNPRAPTIEGAIFEPDDEVAVAYSFQHQRSGER

SEQ ID NO: 9537 - protein, 940 aa, Phormia regina
MSSFADLAKTIQSAQLTYQQVNEKNFKKSNWRENIEKKIFKALECIKLLEDSIQLKKLAPKDKKDIKMVMCQHNLKFGNSLDAKEAIVKLTNIMKVYQKKLETHERRKAFTKSNKNFELHRRRFYRSLSGEESKECNVPIEEIKSFWSTMWEENSNVCEPEKLLEYLPKHICESNSDTTFPSFEEFEDIIRYLPNWKAAGPDGVYNFFIKKLTALHSSLYELVRDICMNNKVEEEWFYKGITYLIPKGEPVRGSDFRPITCMSNLYKITTKCVTKTLQHIVEARSLISDNQLGTVRMVQGAKEQALLNKAINSKYENNLKTAWIDVKKAFDSVDHVYLVECLESLEFPKWTLQFLKNIISNWKIAIVSGKEVIIEKRMKRGILQGDSLSPLLFVLCMDPLSRKLSAKYDKISVETESDSYITNHLLFIDDLKLLSESSKELRHMMTEVKEFFNVVGLEMNKEKSATNCKDCTEDAAFIEGRECYKYLGIIENADSSISKKSFEKVTDEILKRTRRLCETNLNARNLFKSINEHAISVINYHIGVLELEPEDYKKLDDKIRKVLMEYKVHLQPSNKERLYLPRVMLGRGLANIEHKSENMLYDLNNAFISTKHSSPRRNAILKVEINNRTHLSLIDKYISKKYKLEPKFTKLDLCEAQTNYLVTEIKSKQCHGRLFKVCDHEMTSVEESSVWLIKGNIKPRDEGAFCFLQDRNVFFGERVKCPHCKAVMKTVDHLATKCDRMLGHDYTRRHNEVVRCIHLSLCNKYGLKSTNKLKSHSVQEVIANEKAEIRVDTRIKTDIRIKHDRPDLFILDKIRNEITLIEIGITNLDLLTQVENEKTRKYDLIANELSLIYKCKVNIIPYVMTWEGLVTKYHKKHSKEIGLQPKVEAYIQCTVLKKTLESVSFERRRGVEDDELHEEIERILSRMKDNEEAALAETSI

SEQ ID NO: 9538 - protein, 1252 aa, Hemaris fuciformis
MSTRDIRIGPLPGDRQGTSGAGAGRRSMRTTSGSQLPRRAAAKQNATADTIAQDLTSNNNLAANALQEMLPTTTAAGRSRQRMKWTDNINQQLLRCYYEVTSLETNLTGYRSQLHKKFIEHFPELNFITEQRLSDQIRVIHKNNRISPQKRQQIKDETERLMNVPHNPTSVGEAIREISVASNEVTRDNILNNTFLTENIHQINTPHTLCTLPEERTHIQHTANLDNVRPAEISETELGSDTVQPNYIITDRILHLDNTFQEILIKYKDIDPSCRPGIPKIQQACSTKITIDEINVVIDKYLRENHITTLEEIHAIIYSAALTVTKMLKVKPIKEKYCLNAGTKQSVKPPWERRLETKIMKLRSTVGQITQYLKGKLSLRKRRKLNLIDRNQTSVEEELDSKKQKLQALAKRLKRYRKSNQRRTENNIFNTNAKRFYRNLNNNNNEPIIPAPPNMTDTTDFWKKIWSEPVNHSSHRPWIDLEKEETINIDFMPELSIDKNDVTEAVKKLHNWKAPGPDKIQNYWLKYLTATHGTLATIFKLIIQDPTGIPSFFTQGITYLKPKDCNTTNPAKYRPITCLPTLYKLLTSIITNKISLHLHKYNIISEEQKGCCKGSMGCKEQLVIDTEIHNQVKQKHRNLFYAYIDYQKAFDSVPHSWLIQVLHIYKINENLINFLTCLMNSWNTVLNIKTENGYQKSEPIKIARGIFQGDSLSPLWFCLAINPLSNILNRSGYGYTIDRTNKIKVSHLLYMDDIKIYASTRQQIDHLLSMTEAFSHDIKMKFGIDKCKINSIIKGKSNETHSYKLSLDENKIDGMQLRDTYKYLGFSQSAGINHHKVKEELRKNYISRVSRIFKTQLSGRNKVKGVNTYAVPILTYSFGIIQWTDTDLDSLNMITRSLANKHNIHHIHSAVERFTLKRNIGGRGFIDLKNLNYSQIYNLRNYFLIKANTSLLHKAITNVLTSGTPLNFNRQDYDPKTKIVSDEEKITKWKQKALHGKHIYHLNQDHVDKTASNKWLTTGNIYAETEGFMLAIQDHIIKTRNYAKYIIKDSSIDNDTCRICHQNRETIEHITGGCHILAGKEYVNRHDNVAKQIHQQIAIKYKLINEYTPYYKYKPKSVIENDKVKLYWDRDIITDKTISCIRPDITLTLKEQKTTYLIDITVPNSENLKKKHNEKIQKYIPLADEIKDMWHQNKVNIVPIIISSTGIVPKSLHNSLKQLNLNKNIYIQLQKSIILDTCSIVRRFLNAPTDFQ

SEQ ID NO: 9539 - protein, 1230 aa, Deilephila porcellus
MSINDVRIGPLPGDRQGTSGAGAGRRSMRTTSGSQLLRRADAEQNATADTTNNNPAANALQEMLPATTAAGRSRQRMKWTDNINHQLLRCYYEVTALETNLTGYRSQLHQKFIEYFPELNFISEQRLSDQIRVIHKNNRISLQKRQQIKEEIERSMNITRIPTSEVNETINEVILNNNRNCPNTDNITDDTRSTPPEQCTYTEHRSQPENVTHLREDENTIISEPMNYNITESILHAENTFLEILIKYKDLDPSCRPGIPKIQQTYLTKTTIDDINVVIDRYIKENNITTIEEIHAIIYSAAMTATIILKVKPVKPTEGTTIISAQKKKPPWERRLETKITKLRSEIGKITQYLKGNLSVRKQRKLRLSNRDKTSIEEELDTKKQKLQALAKRLKRYTKSNQRRKENNIFNTNPKRFYRNFNSEKIITDPPNITEVTQFWKNIWSKPTNHSPHAPWVELEEEESRNIEYMPEFSIEKADITETARKLQNWKAPGPDKIQNYWLKYLTATHETLATIFNQLMQDPTTIPSFFTQGVTYLKPKDTDTTNPSKYRPITCLPTLYKLLTSIITHKITIHLGNFNIIPEEQKGCCKGSMGCKEQLVIDTEIHNQVKQKHRNLFYAYIDYQKAFDSVPHSWLLRILNLYKINKTIINLLTTLMNTWSTVLNIKTQIGYQKSEPIKIARGIFQGDSLSPLWFCLAINPLSNILNRTGFGYTIDRTNKTKICHLLYMDDIKLYAATREQIDHLLNATEAFSHDIKMNFGIEKCKINSIVKGKHKETHPYKLTLADNNIDGMQLRDTYKYLGFAQSTGLNHQEIKKELRKKYIDRVNKIFKTQLSARNKVKAVNSYAVPLLTYSFGIIQWTDTDLDALNITTRSLAHKHNIHHIHSAIERFTLKRNTGGRGFIDLRNLSYSQVSNLRKYFEMKSNTSSLHRAITGMTTSGTPLYFNKSDYNPAQKNISDEEKITKWKQKALHGKHIHQLNQDHVDKIASNKWLTTGNIFAETEGFMLAIQDHVIKTRNYAKYIIKDSTVENDKCRLCHQTKETIEHITGGCHILANKEYINRHNNVAKQIHQQIALKYKLINEYIPYYKYNPKSVIENSQVKLYWDRDIITDKTIACNRPDITLTLKESKITYLIDITVPNTENLRKKHNEKIQKYIPLTDEIKDMWHQDKVITIPIVISSTGIVPKSLHDALKKLNLNKNLYIPLQKSIILDTCSIVRRFLNSPTDFQ

SEQ ID NO: 9540 - protein, 1252 aa, Hemaris fuciformis
MSTRDIRIGPLPGDRQGTSGAGAGRRSMRTTSGSQLPRRAAAKQNATADTIAQDLTSNINLAANALQEMLPTTTAAGRSRQRMKWTDNINQQLLRCYYEVTSLETNLTGYRSQLHKKFIEHFPELNFISEQRLSDQIRVIHKNNRISPQKRQQIKDETERLMNVPHNPTSVGEAIREISVASSEVTRDNILNNTFLTENIHQINTPHTLCTLPEERTHIQHTANLDNVRPAEISETELGSDTVQPNYIITDRILHLDNTFQEILIKYKDIDPSCRPGIPKIQQACSTKITIDEINVVIDKYLRENHITTLEEIHAIIYSAALTVTKMLKVKPIKEKYCLNAGTKQSVKPPWERRLETKIMKLRSTVGQITQYLKGKLSLRKRRKLNLIDRNQTSVEEELDSKKQKLQALAKRLKRYRKSNQRRTENNIFNTNPKRFYRNLNNNNNEPIIPAPPNMTDTTDFWKKIWSEPVNHSFHRPWIDLEKEETINIDFMPELSIDKNDVTEAVKKLHNWKAPGPDKIQNYWLKYLTATHGTLATIFKLIIQDPTGIPSFFTQGITYLKPKDCNTTNPAKYRPITCLPTLYKLLTSIITNKISLHLHKYNIISEEQKGCCKGSMGYKEQLVIDTEIHNQVKQKHRNLFYAYIDYQKAFDSVPHSWLIQVLHIYKINENLINFLTCLMNSWNTVLNIKTENGYQKSEPIKIARGIFQGDSLSPLWFCLAINPLSNILNRSGYGYTIDRTNKIKVSHLLYMDDIKIYASTRQQIDHLLSMTEAFSHDIKMKFGIDKCKINSIIKGKSNETHSYKLSLDENKIDGMQLRDTYKYLGFSQSAGINHHKVKEELRKNYISRVSRIFKTQLSGRNKVKGVNTYAVPILTYSFGIIQWTDTDLDSLNMITRSLANKHNIHHIHSAVERFTLKRNIGGRGFIDLKNLNYSQIYNLRNYFLIKANTSLLHKAITNVLTSGTPLNFNRQDYDPKKKIVSDEEKITKWKQKALHGKHIFHLNQDHVDKTASNKWLTTGNIFAETEGFMLAIQDHIIKTRNYAKYIIKDSSIDNDTCRICHQNRETIEHITGGCHILAGKEYVNRHDNVAKQIHQQIAIKYKLINEYTPYYKYKPKSVIENDKVKLYWDRDIITDKTISCIRPDITLTLKEQKTTYLIDITVPNSENLKKKHNEKIQKYIPLADEIKDMWHQNKVNIVPIIISSTGIVPKSLHNSLKQLNVNKNIYIQLQKSIILDTCSIVRRFLNAPTDFQ

SEQ ID NO: 9541 - protein, 1252 aa, Hemaris fuciformis
MSTRDIRIGPLPGDRQGTSGAGAGRRSMRTTSGSQLPRRAAAKQNATADTIAQDLTSNNNLAANALQEMLPTTTAAGRSRQRMKWTDNINQQLLRCYYEVTSLETNLTGYRSQLHKKFIEHFPELNFITEQRLSDQIRVIHKNNRISPQKRQQIKDETERLMNVPHNPTSVGEAIREISVASNEVTRDNILNNTFLTENIHQINTPHTLCTLPEERTHIQHTANLDNVRPAEISETELGSDTVQPNYIITDRILHLDNTFQEILIKYKDIDPSCRPGIPKIQQACSTKITIDEINVVIDKYLRENHITTLEEIHAIIYSAALTVTKMLKVKPIKEKYCLNAGTKQSVKPPWERRLETKIMKLRSTVGQITQYLKGKLSLRKRRKLNLIDRNQTSVEEELDSKKQKLQALAKRLKRYRKSNQRRTENNIFNTNPKRFYRNLNNNNNEPIIPAPPNMTDTTDFWKKIWSEPVNHSSHRPWIDLEKEETINIDFMPELSIDKNDVTEAVKKLHNWKAPGPDKIQNYWLKYLTATHGTLATIFKLIIQDPTGIPSFFTQGITYLKPKDCNTTNPAKYRPITCLPTLYKLLTSIITNKISLHLHKYNIISEEQKGCCKGSMGCKEQLVIDTEIHNQVKQKHRNLFYAYIDYQKAFDSVPHSWLIQVLHIYKINENLINFLTCLMNSWNTVLNIKTENGYQKSEPIKIARGIFQGDSLSPLWFCLAINPLSNILNRSGYGYTIDRTNKIKVSHLLYMDDIKIYASTRQQIDHLLSMTEAFSHDIKMKFGIDKCKINSIIKGKSNETHSYKLSLDENKIDGMQLRDTYKYLGFSQSAGINHHKVKEELRKNYISRVSRIFKTQLSGRNKVKGVNTYAVPILTYSFGIIQWTDTDLDSLNMITRSLANKHNIHHIHSAVERFTLKRNIGGRGFIDLKNLNYSQIYNLRNYFLIKANTSLLHKAITNVLTSGTPLNFNRQDYDPKTKIVSDEEKITKWKQKALHGKHIYHLNQDHVDKTASNKWLTTGNIFAETEGFMLAIQDHIIKTRNYAKYIIKDSSIDNDTCRICHQNRETIEHITGGCHILAGKEYVNRHDNVAKQIHQQIAIKYKLINEYTPYYKYKPKSVIENDKVKLYWDRDIITDKTISCIRPDITLTLKEQKTTYLIDITVPNSENLKKKHNEKIQKYIPLADEIKDMWHQNKVNIVPIIISSTGIVPKSLHNSLKQLNLNKNIYIQLQKSIILDTCSIVRRFLNAPTDFQ

SEQ ID NO: 9542 - protein, 1252 aa, Hemaris fuciformis
MSTRDIRIGPLPGDRQGTSGAGAGRRSMRTTSGSQLPRRAAAKQNATADTIAQDLTSNINLAANALQEMLPTTTAAGRSRQRMKWTDNINQQLLRCYYEVTSLETNLTGYRSQLHKKFIEHFPELNFITEQRLSDQIRVIHKNNRISPQKRQQIKDETERLMNVPHNPTSVGEAIREISVASSEVTRDNILNNTFLTENIHQINTPHTLCTLPEERTHIQHTANLDNVRPAEISETELGSDTVQPNYIITDRILHLDNTFQEILIKYKDIDPSCRPGIPKIQQACSTKITIDEINVVIDKYLRENHITTLEEIHAIIYSAALTVTKMLKVKPIKEKYCLNAGTKQSVKPPWERRLETKIMKLRSTVGQITQYLKGKLSLRKRRKLNLIDRNQTSVEEELDSKKQKLQALAKRLKRYRKSNQRRTENNIFNTNPKRFYRNLNNNNNEPIIPAPPNMTDTTDFWKKIWSEPVNHSFHRPWIDLEKEETINIDFMPELSIDKNDVTEAVKKLHNWKAPGPDKIQNYWLKYLTATHGTLATIFKLIIQDPTGIPSFFTQGITYLKPKDCNTTNPAKYRPITCLPTLYKLLTSIITNKISLHLHKYNIISEEQKGCCKGSMGCKEQLVIDTEIHNQVKQKHRNLFYAYIDYQKAFDSVPHSWLIQVLHIYKINENLINFLTCLMNSWNTVLNIKTENGYQKSEPIKIARGIFQGDSLSPLWFCLAINPLSNILNRSGYGYTIDRTNKIKVSHLLYMDDIKIYASTRQQIDHLLSMTEAFSHDIKMKFGIDKCKINSIIKGKSNETHSYKLSLDENKIDGMQLRDTYKYLGFSQSAGINHHKVKEELRKNYISRVSRIFKTQLSGRNKVKGVNTYAVPILTYSFGIIQWTDTDLDSLNMITRSLANKHNIHHIHSAVERFTLKRNIGGRGFIDLKNLNYSQIYNLRNYFLIKANTSLLHKVITNVLTSGTPLNFNRQDYDPKKKIVSDEEKITKWKQKALHGKHIFHLNQDHVDKTASNKWLTTGNIFAETEGFMLAIQDHIIKTRNYAKYIIKDSSIDNDTCRICHQNRETIEHITGGCHILAGKEYVNRHDNVAKQIHQQIAIKYKLINEYTPYYKYKPKSVIENDKVKLYWDRDIITDKTISCIRPDITLTLKEQKTTYLIDITVPNSENLKKKHNEKIQKYIPLADEIKDMWHQNKVNIVPIIISSTGIVPKSLHNSLKQLNLNKNIYIQLQKSIILDTCSIVRRFLNAPTDFQ

SEQ ID NO: 9543 - protein, 1252 aa, Hemaris fuciformis
MSTRDIRIGPLPGDRQGTSGAGAGRRSMRTTSGSQLPRRAAAKQNATADTIAQDLTSNINLAANALQEMLPTTTAAGRSRQRMKWTDNINQQLLRCYYEVTSLETNLTGYRSQLHKKFLEHFPELNFITEQRLSDQIRVIHKNNRISPQKRQQIKDETERLMNVPHNPTSVGEAIREISVASSEVTRDNILNNTFLTENIHQINTPHTLCTLPEERTHIQHTANLDNVRPAEISETELGSDTVQPNYIITDRILHLDNTFQEILIKYKDIDPSCRPGIPKIQQACSTKITIDEINVVIDKYLRENHITTLEEIHAIIYSAALTVTKMLKVKPIKEKYCLNAGTKQSVKPPWERRLETKIMKLRSTVGQITQYLKGKLSLRKRRKLNLIDRNQTSVEEELDSKKQKLQALAKRLKRYRKSNQRRTENNIFNTNPKRFYRNLNNNNNEPIIPAPPNMTDTTDFWKKIWSEPVNHSFHRPWIDLEKEETINIDFMPELSIDKNDVTEAVKKLHNWKAPGPDKIQNYWLKYLTATHGTLATIFKLIIQDPTGIPSFFTQGITYLKPKDCNTTNPAKYRPITCLPTLYKLLTSIITNKISLHLHKYNIISEEQKGCCKGSMGCKEQLVIDTEIHNQVKQKHRNLFYAYIDYQKAFDSVPHSWLIQVLHIYKINENLINFLTCLMNSWNTVLNIKTENGYQKSEPIKIARGIFQGDSLSPLWFCLAINPLSNILNRSGYGYTIDRTNKIKVSHLLYMDDIKIYASTRQQIDHLLSMTEAFSHDIKMKFGIDKCKINSIIKGKSNETHSYKLSLDENKIDGMQLRDTYKYLGFSQSAGINHHKVKEELRKNYISRVSRIFKTQLSGRNKVKGVNTYAVPILTYSFGIIQWTDTDLDSLNMITRSLANKHNIHHIHSAVERFTLKRNIGGRGFIDLKNLNYSQIYNLRNYFLIKANTSLLHKAITNVLTSGTPLNFNRQDYDLKKKIVSDEEKITKWKQKALHGKHIFHLNQDHVDKTASNKWLTTGNIFAETEGFMLAIQDHIIKTRNYAKYIIKDSSIDNDTCRICHQNRETIEHITGGCHILAGKEYVNRHDNVAKQIHQQIAIKYKLINEYTPYYKYKPKSVIENDKVKLYWDRDIITDKTISCIRPDITLTLKEQKTTYLIDITVPNSENLKKKHNEKIQKYIPLADEIKDMWHQNKVNIVPIIISSTGIVPKSLHNSLKQLNLNKNIYIQLQKSIILDTCSIVRRFLNAPTDFQ

SEQ ID NO: 9544 - protein, 1252 aa, Hemaris fuciformis
MSTRDIRIGPLPGDRQGTSGAGAGRRSMRTTSGSQLPRRAAAKQNATADTIAQDLTSNINLAANALQEMLPTTTAAGRSRQRMKWTDNINQQLLRCYYEVTSLETNLSGYRSQLHKKFIEHFPELNFITEQRLSDQIRVIHKNNRISPQKRQQIKDETERLMNVPHNPTSVGEAIREISVASSEVTQDNILNNTFLTENIHQINTPHTLCTLPEERTHIQHTANLDNVRPAEISETELGSDTVQPNYIITDRILHLDNTFQEILIKYKDIDPSCRPGIPKIQQACSTKITIDEINVVIDKYLRENHITTLEEIHAIIYSAALTVTKMLKVKPIKEKYCLNAGTKQSVKPPWERRLETKIMKLRSTVGQITQYLKGKLSLRKRRKLNLIDRNQTSVEEELDSKKQKLQALAKRLKRYRKSNQRRTENNIFNTNPKRFYRNLNNNNNEPIIPAPPNMTDTTDFWKKIWSEPVNHSFHRPWIDLEKEETINIDFMPELSIDKNDVTEAVKKLHNWKAPGPDKIQNYWLKYLTATHGTLATIFKLIIQDPTGIPSFFTQGITYLKPKDCNTTNPAKYRPITCLPTLYKLLTSIITNKISLHLHKYNIISEEQKGCCKGSMGCKEQLVIDTEIHNQVKQKHRNLFYAYIDYQKAFDSVPHSWLIQVLHIYKINENLINFLTCLMNSWNTVLNIKTENGYQKSEPIKIARGIFQGDSLSPLWFCLAINPLSNILNRSGYGYTIDRTNKIKVSHLLYMDDIKIYASTRQQIDHLLSMTEAFSHDIKMKFGIDKCKINSIIKGKSNETHSYKLSLDENKIDGMQLRDTYKYLGFSQSAGINHHKVKEELRKNYISRVSRIFKTQLSGRNKVKGVNTYAVPILTYSFGIIQWTDTDLDSLNMITRSLANKHNIHHIHSAVERFTLKRNIGGRGFIDLKNLNYSQIYNLRNYFLIKANTSLLHKAITNVLTSGTPLNFNRQDYDPKKKIVSDEEKITKWKQKALHGKHIFHLNQDHVDKTASNKWLTTGNIFAETEGFMLAIQDHIIKTRNYAKYIIKDSSIDNDTCRICHQNRETIEHITGGCHIPAGKEYVNRHDNVAKQIHQQIAIKYKLINEYTPYYKYKPKSVIENDKVKLYWDRDIITDKTISCIRPDITLTLKEQKTTYLIDITVPNSENLKKKHNEKIQKYIPLADEIKDMWHQNKVNIVPIIISSTGIVPKSLHNSLKQLNLNKNIYIQLQKSIILDTCSIVRRFLNAPTDFQ

SEQ ID NO: 9545 - protein, 1157 aa, Blastobasis adustella
MKWTTDINKQLLRCYYIVTHNETNLTGYRPLLHQKFIEVYPDLHFITEQRLSDQIRVIHRNNRITEADRAAIKTELQQTPNTDIAETQNMLINNILHINTQITEPQLENQYADNTQHCAEHNHHDENLQINIDNNPQQEERSANSHKVNNIQNDINDLLLLDTFNEILIYTNRIDITCRKPIRKLQRISKKTYLIIDKLNSLINDKLKNIPEPSLTQIHDLLYAAAVTATKLLNPKKTDKDTPEQTHRRSKTNKPGWERRIENQIKVLRKEIAQLTQYTLGKVSQKKGQKLNPSNKSITEIKQDIDKKKQTLQAKAKRLRRFKKSNQRVKDNAMFQCNEKYFYRALHSQETIVTDTPTIEQVKDFWANIWSNPVCHNRQANWIETEKVRVADNDQMTETTITIEEFTEAVRKTHNWKTPGPDKIHNFWIKKLIVVHIPLTNIFNKMIQDPTTVPEYLTHGITYLKPKNQDTTNPANYRPITCLSTTYKILTSIITNKIYIHLSQNKIIAEEQKGCYKGGRGCKEQLVIDSEIHTQCRQKHRNMQYAYIDYQKAFDSVPHSWLIDILKIYKIDNNIIQLLEYIMKNWSTKLSIKTKTDIIQSTAVPILRGIFQGDSLSPLWFCMALNPLSQILNSSKYGYKINNNTLITHLLYMDDIKLFASSREQLNELLKITEQFTSDIKMEFGIAKCKINSIKKGKHETEEAYTTQIHDSIIDALNFNETYKYLGFQQSHRINHATIKTELQTKYKHRLNKILKTHLSARNKIKAITYAIPLLTYSFGIIKWSDTELDALNRLTRTTCYKYNIHHIHSAVERFTIKRQAGGRGVVDIKNLCYKQIHNLRDYFKSRCHDSVLHNAIYSIKTNGTPLNLQDTNFNPQNQIASEATKIETWKQKALHGKYPSQVAQDHVDIIASNIWLKKGNIFAETEGFMVAIQDKIIKTRNYQKYIIKDPSITTDKCRLCNRQQETIEHITGGCSFLASKQYTDRHNNVAKQVHALLAKKYNLIEKIEPYYKYKPSNVLTNNKAKLYWDRDIITDRTTNNNRPDITLTIHSTKTTYLIDVSVPNTENLKQKHIDKIQKYIPLAEEIQQMWHQNKVRIIPIIISSTGVIPKTLHACIAELEIYIHWLAKINNIRYVFNSPPIPHTFRYILYTAIRNT

SEQ ID NO: 9546 - protein, 1365 aa, Blastobasis lacticolella
MSASHKRNNIPQAGTDANNGGESCPEAMASGSPTHSGGGNVTQRLEPRYNLRRRPSVNLVQNRRNTANLRNLTSSSPSSETESLFSSIPSTNPSYRSSPVSSMGSSTNSPVNTVSLDHEIDTGLKFSTEPVTRTRRAQKTKSSTVRRRPTQVSDERNTSSLTIVRELPENTSNVISTPARSVLQDIRPATTLAGKSRQRMKWTTDINKQLLRCYYIVTHNETNLTGYRPQLHQKFIDVYPELHFITEQRLADQIRVIHRNNRITVADRAAIKSSLQQSQDTDIAETQNILISNISHINTQIMIPELQLENQYADNTQHCAENNQQDENSQLDLHNNPQQEERLANSHQVNNIQNNINDSLLFDTFNEILTQTDRIDITCREPIRKLQRISKKTHLVIDKLNSLINDKLKNIPEPSLIQIHDLIYAAAVTATKLLNPKKNDKDTPRQTHRRSKSNKPGWERRIENQIKVLRKEIAQLTQYTLGKVSQKKGKKLNPSNKSITEIEQEIDKKKQTLQAKAKRLRRFKKSNQRKKDNAMFQCNEKNFYRALDSQETIATDTPTIDEVKEFWANIWSNPVCHNRQANWIEAEKIRVNDKDQMTETIITIEEFTEAVKKTHNWKTPGPDKIHNFWIKKLTVVHIPLTNIFNKMIQDPNTVPEYLTHGITYLKPKNQDTTNPANYRPITCLSTTYKILTSIITNKIYVYLSQNDIIAEEQKGCYKGGRGCKEQLVIDSEIHTQCRQRHRNMQYAYIDYQKAFDSVPHSWLIDILKIYKIDNNIIQLLEHVMKNWSTKLSIKTKTDIIQSTTLPILRGIFQGDSLSPLWFCMALNPLSQNLNNSKYGYKINSDVLITHLLYMDDIKLFASSRPQLNELLKITEQFTSDINMEFGIAKCKVNSIKKGKHETEEPYTTQMHNSIIDALNLDETYKYLGFKQSHLINHATIKTELQTKYKYRLNKILKTHLSARNKIKAINTYAIPLLTYSFGIIKWSDTELDALNRLTRTTCYKYNIHHIHSAVERFTVKRQAGGRGVVDIKNLCYKQIHNLRSYFNSRYHDSVLHNAICTIKTNGTPLNLQDTNFNPQNQIASEANKIQTWKEKALHGKYPTQVAQDHVDMIASNMWLKKGNIFAETEGFMVAIQDKIIKTRNYQKYIIKDPSIITDKCRLCNRQQETIEHITGGCSFLASKQYTDRHNNVAKQVHALLAKKFNLIEKIEPYYKYKPSNVLTNNKAKLYWDRDIITDRTTNNNRPDITLTIHNTKTTYLIDVSVPNTENLKQKHVDKIQKYIPLAEEIQQMWHQNKVRIIPIIISSTGVIPKSLHACIAELELPKTTYISLQKSIILDTCSIVRRFLTHSDVSSTSPTAISNTD

SEQ ID NO: 9547 - protein, 831 aa, Blastobasis lacticolella
MFQCNEKNFYRALDSQETIATDTPTIDEVKEFWANIWSNPVCHNRQANWIEAEKIRVNDKDQMTETIITIEEFAEAVKKTHNWKTPGPDKIHNFWIKKLTVVHIPLTNIFNKMIQDPNTVPEYLTHGITYLKPKNQDTPNPANYRPITCLSTTYKILTSIITNKIYVYLSQNDIIAEEQKGCYKGGRGCKEQLVIDSEIHTQCRQRHRNMQYAYIDYQKAFDSVPHSWLIDILKIYKIDNNIIQLLEHVMKNWSTKLSIKTKTDIIQSTTLPILRGIFQGDSLSPLWFCMALNPLSQNLNNSKYGYKINSDVLITHLLYMDDIKLFASSRPQLNELLKITEQFTSDINMEFGIAKCKVNSIKKGKHETEEPYTTQMHNSIIDALNLDETYKYLGFKQSHLINHATIKTELQTKYKYRLNKILKTHLSARNKIKAINTYAIPLLTYSFGIIKWSDTELDALNRLTRTTCYKYNIHHIHSAVERFTVKRQAGGRGVVDIKNLCYKQIHNLRSYFNSRYHDSVLHNAICTIKTNGTPLNLQDTNFNPQNQIASEANKIQTWKEKALHGKYPTQVAQDHVDMIASNMWLKKGNIFAETEGFMVAIQDKIIKTRNYQKYIIKDPSIITDKCRLCNRQQETIEHITGGCSFLASKQYTDRHNNVAKQVHALLAKKINLIEKIEPYYKYKPSNVLTNNKAKLYWDRDIITDRTTNNNRPDITLTIHNTKTTYLIDVSVPNTENLKQKHVDKIQKYIPLAEEIQQMWHQNKVRIIPIIISSTGVIPKSLHACIAELELPKTTYISLQKSIILDTCSIVRRFLTHSDISSTSPTAISNTD

SEQ ID NO: 9548 - protein, 1246 aa, Coccinella septempunctata
MSTWKEDEVNIVKQRLRLKNGTLTKEDFDSIQQQIPTRSVAAIKKKYLELKNNGETRTVSSRWSQEETDRLIRAYVSRTETQVTKRVQAILNDFPGRTLKGIATKLRDQYPDIYYMRNSTPEPPTEQHSDNTQYTLDSRPDTPDNTQEQTDHTEIQTNHEENIKGDETRTINPPEPTTTTSYDSHYQRSSRTCNQNSEVNQSPGGEVQNINSVPPDAFASESDEFSVNLRQKFDRMIKSIGNRKEKIRKFHLRPTNSSITEKVNNILEGKITQIEDNTQNEVEKRKRIKNAIYIAGILLRKTVLGKNEHRRPKYLITEKKIKKLNNHIKNARELVEKKGEKLSRRLMAEVKMMKKLKLTPRQYIKSTEERAKILEAKLEEQKKRGEINDLRARFQSRPSIETLRSSNRRTSELTTKDTEHFFQDLYRQEKGNTPTPIFNKFLRELKSHARKSKYENQLERRKIEQEVDGILKNVAPWKAPGEDRIPAYIYKVLPAARNYLKRQVTRLLNNETKLHEADVRANVILVHKSGDETNPANYRPISLLNVDYKITTAVIASMIKRSLPDFAIPAEQLARDQVWGTVHGLLLDKSITAQSKLNRTKNYSAWYDAKKAYDSVHHRCLKRLIDCLPLHRHIRNLLKRTVKLWSLRVQLEKIKTRPIKVQRGLLQGDSMSPILFVLMIASAILHIRSNPQICKETRGKHQLIAFMDDFKCHSPTESGIKLITEQLIIALKEIGLELNTAKCGIYSRDATHGPHEEINTPFLPLVKEGYKYLGLEQLERDTAGNFEKAQEKLEESIDTILQSDLTTTQKVYLINSTAVPAVVYVTANAYPDEKRSTTLKRCRDLDTLIRKRLIQHKMKGTTASNSSVYLPIKKGGLGIRSVEHQTEISFVKKGIYLTKNQEMAKCCKTYEQLKEAGWRNPLSDMEFVLEKYGVTVQNEENIKKCCKDTTTRIIEVIHRRLQEDWSRNMHYGKLVNQEGNNISFPAYSSPFLDTWRRGVLMSATEEQLHGLGSLPMRRNCRRGCNHAETAYHVSASCICNEYTTRHDNVVYWTLKTLLTSLRAPNNYIRNLQFGQSTCRVDFEANNRKVSIQAGQKLLTERRLYHNKPDILVKLTNPSEIFIIEVAVSHIQNWRNQERLKRTRYAVNSVKHITEFNLSNTTRDLNIVTELGATYRCPVKLAIFVVGCYGELIATDEHKQFCEMMKKKLQVSNRSMRNLLNHATYSVAVSTSNLLMKRLNEPTTCDR

SEQ ID NO: 9549 - protein, 1246 aa, Coccinella septempunctata
MSTWKEDEVNIVKQRLRLKNGTLTKEDFDSIQQQIPTRSVAAIKKKYLELKNNGETRTVSSRWSQEETDRLIRAYVSRTETQVTKRVQAILNDFPGRTLKGIATKLRDQYPDIYYMRNSTPEPPTEQHSDNTQYTLDSRPDTPDNTQEQTDHTEIQTNHEENIKGDETRTINPPEPTTTTSYDSHYQRSSRTCNQNSEVNQSPGGEVQNINSVPPDAFASESDEFSVNLRQKFDRMIKSIGNRKEKIRKFHLRPTNSSITEKVNNILEGKITQIEDNTQNEVEKRKRIKNAIYIAGILLRKTVLGKNEHRRPKYLITEKKIKKLNNHIKNARELVKKKGEKLSRRLMAEVKMMKKLKLTPRQYIKSTEERAKILEAKLEEQKKRGEINDLRARFQSRPSIETLRSSNRRTSELTTKDTEHFFQDLYRQEKGNTPTPIFNKFLRELKSHARKSKYENQLERRKIEQEVDGILKNVAPWKAPGEDRIPAYIYKVLPAARNYLKRQVTRLLNNETKLHEADVRANVILVHKSGDETNPANYRPISLLNVDYKITTAVMASMIKRSLPDFAIPAEQLARDQVWGTAHGLLLDKSITAQSKLNRTKNYSAWYDAKKAYDSVHHRCLKRLIDCLPLHRHIRNLLKRTVKLWSLRVQLEKIKTRPIKVQRGLLQGDSMSPILFVLMIASAILHIRSNPQICKETRGKHQLIAFMDDFKCHSPTESGIKLITEQLIIALKEIGLELNTAKCGIYSRDATHGPHEEINTPFLPLVKEGYKYLGLEQLERDTAGNFEKAQEKLEESIDTILQSDLTTTQKVYLINSTAVPAVVYVTANAYPDEKRSTTLKRCRDLDTLICKRLIQHKMKGTTASNSSVYLPIKKGGLGIRSVEHQTEISFVKKGIYLTKNQEMAKCCKTYEQLKKAGWRNPLSDMEFVLEKYGVTVQNEENIKKCCKDTTTRIIEVIHRRLQEDWSRNMHYGKLVNQEGNNISFPAYSSPFLDTWRRGVLMSATEEQLHGLGSLPMRRNCRRGCNHAETAYHVSASCICNEYTTRHDNVVYWTLKTLLTSLRAPNNYIRNLQFGQSTCRVDFEANNRKVSIQAGQKLLTERRLYHNKPDILVKLTNPSEIFIIEVAVSHIQNWRNQERLKRTRYAVNSVKHITEFNLSNTTRDLNIVTELGATYRCPVKLAIFVVGCYGELIATDEHKQFCEMMKKKLQVSNRSMRNLLNHATYSVAVSTSNLLMKRLNEPTTCDR

SEQ ID NO: 9550 - protein, 1246 aa, Coccinella septempunctata
MSTWKEDEVNIVKQRLRLKNGTLTKEDFDSIQQQIPTRSVAAIKKKYLELKNNGETRTVSSRWSQEETDRLIRAYVSRTETQVTKRVQAILNDFPGRTLKGIATKLRDQYPDIYYMRNSTPEPPTEQHSDNTQYTLDSRPDTPDNTQEQTDHTEIQTNHEENIKGDETRTINPPEPTTTTSYDSHYQRSSRTCNQNSEVNQSPGGEVQNINSVPPDAFASESDEFSVNLRQKFDRMIKSIGNRKEKIRKFHLRPTNSSITEKVNNILEGKITQIEDNTQNEVEKRKRIKNAIYIAGILLRKTVLGKNEHRRPKYLITEKKIKKLNNHIKNARELVEKKGEKLSRRLMAEVKMMKKLKLTPRQYIKSTEERAKILEAKLEEQKKRGEINDLRARFQSRPSIETLRSSNRRTSELTTKDTEHFFQDLYRQEKGNTPTPIFNKFLRELKSHARKSKYENQLERRKIEQEVDGILKNVAPWKAPGEDRIPAYIYKVLPAARNYLKRQVTRLLNNETKLHEADVRANVILVHKSGDETNPANYRPISLLNVDYKITTAVIASMIKRSLPDFAIPAEQLARDQVWGTVHGLLLDKSITAQSKLNRTKNYSAWYDAKKAYDSVHHRCLKRLIDCLPLHRHIRNLLKRTVKLWSLRVQLEKIKTRPIKVQRGLLQGDSMSPILFVLMIASAILHIRSNPQICKETRGKHQLIAFMDDFKCHSPTESGIKLITEQLIIALKEIGLELNTAKCGIYSRDATHGPHEEINTPFLPLVKEGYKYLGLEQLERDTAGNFEKAQEKLEESIDTILQSDLTTTQKVYLINSTAVPAVVYVTANAYPDEKRSTTLKRCRDLDTLIRKRLIQHKMKGTTASNSSVYLPIKKGGLGIRSVEHQTEISFVKKGIYLTKNQEMAKCCKTYEQLKEAGWRNPLSDMEFVLEKYGVTVQNEENIKKCCKDTTTRIIEVIHRRLQEDWSRNMHYGKLVNQEGNNISFPAYSSPFLDTWRRGVLMSATEEQLHGLGSLPMRRNCRRGCNHAETAYHVSASCICNEYTTRHDNVVYWTLKTLLTSLRAPNNYIRNLQFGQSTCRVDFEANNRKVSIQAGQKLLTERRLYHNKPDILVKLTNPSEIFIIEVAVSHIQNWRNQERLKRTRYAVNSVKHITEFNLSNTTRDLNIVTELGATYRCPVKLAIFVVGCYGELIATDEHKQFCEMIKKKLQVSNRSMRNLLNHATYSVAVSTSNLLMKRLNEPTTCDR

SEQ ID NO: 9551 - protein, 1246 aa, Adalia bipunctata
MSTWKEDEINLVKQRLRLKNGTLTKEDFDSIQQQIPTRSVAAIKKKYLELKNNGETRTVSSRWSQEETERLIRAYASRTETQVTKRVQAILNDFPGRTLKGIATKLREQYPDVYYMRNNSLEPPTEQHSGNTQYTPNARLAASTNTQEQTEQTEIQNNQQETITGDETRTINSPEPTTSTSYDSHYQLRSRTTNQNSEVNQPPGDEVQNINSAPPDAVASENDEYSVNLRQKFDRMIKSIGNRKEKIKKFHLRPTNSSKTEKINNILEEEITQIENKIHNEVEKRKRIKNAIYIAGILLRKTVLGKNEHRRPKYLTTEKKIRKLNNHIKNAREIVGKKGEKLSRRLMTEVRVMKKLKLTPKQYIKSTEERAKILETKLEEQRKRGEINELRARFQSRPSIETLKSNNKPTSKLTIKNTEHFFQDLYRQERGNTSTPIFNQFLRELKSHSRRSKHESQLERSKIEQEVDGILKNVAPWKAPGEDRIPAYIYKVLPAARNYLKRQVTRLLNNETKLHEPDVRANVILVHKSGDETNPANYRPISLLNVDYKITTAVITSMIKHSLPDFAIPAEQLARDQIWGTVHGLLLDKSMTAQSKLNRTKNYSAWYDAKKAYDSVHHRCLKRLIDCLPLHRNIRNLLKRTVKLWSLRVQLDKIKTKPIKVQRGLLQGDSMSPILFILMIASAILHIRSNPQICKETKGKHQLIAFMDDFKCHSPTESGIKLITEQLIIALKEIGLELNAAKCGIYSRDATHGPHEETNTPFLPLVKEGYKYLGLEQLERDTTRNFEKAQEKLEENIDTILKSDLTTTQKVNLINSTAVPAVVYVTANAYPDEKRSTTLKRCRDLDTLIRKRLIQHKMKGKTSSNSSVYLPIKKGGLGIRSVEHQTEISFVKKGIYLTKNLEMTKCCKAYEQLKKAGWRNPLSDMEFVLEKYGVTVQNEQNIKKCCKDTSTKIIEVIHRRLQEEWSRNMHYGKLVNQEGNNISFPAYSSPYLDTWRRGVLMSATEEQLHGLGSLPTRRKCRRGCNHDETAYHVSASCISNEYTTRHDNVVYWTLKTLLTSLRAPNNFIRNLQFGQSTCRVDFEANNRKVSIQAGQKFLTERRLYHNRPDILVKLTNPSEIFIIEVAVSHIQNWRNQERLKRTRYAVNSVNHITEFNLSNTARDLNIVTELGAIYRCPVKLSIFIVGCYGELIATDEHKQFCEMMKKKLQVSSRSMRNLLNHATYSVAVSTSNLLMKRLNEPTNCDR

SEQ ID NO: 9552 - protein, 1215 aa, Propylea japonica
MSNWKENEINLVKQRLRLKNGMLTKEDFDSIQQQIPTRSVAAIKKKYLELKNNGETRTVSSRWSQEETDRLIRAYASRTETQVTKRVQAILNDFPGRTLKGIATKLRDQYPDIYYMRNSSLEPLTEQHSDNTQYTLESRSPSPNNTQEQTEHTEIQTNQEENITGDETRTINSPEPTTSTAYDSHYQLRSRTPNQNSEVNQPPGGEVQNINSAPPDAFASENDELLINLRQKFDRMIKSIGNRKEKIKKFHLRPTNASKTEKINNILQEKMIQIENNTHNEVDKRKRIKNAIYIAGILLRKTVLGKNEHRRPKYLITEKKIKKLNNHIKNARELVEKKGEKLSRRLMTEVKTMKKLKLTPRQYIKSTEERAKILEAKLEEQKKRGEVNELRARFQSRPSIETLRNNNKLTSELTIKNTEHFFQDLYRQERGNTSTPIFNKFLRELKNHSRKSKYENQLEKRKIEQEVDGILKNVAPWKAPGEDRIPAYIYKVLPAARNYLKRQVVKLLNNETKLHETDVRANVILVHKSGDETNPANYRPISLLNVDYKITTAVIANMIKRSLPDFAIPAEQLARDQVWGTVHGLLLDKSITAQSKLNRTKNYSAWYDAKKAYDSVHHRCLKRLIDCLPLHEHIKNLLKRTVKLWSLRVQLEKIKTRPIKVQRGLLQGDSMSPILFMLMIASAILYIRSNPQICKETKGKHQLIAFMDDFKCHSPTESGIKLITEQLIIALKEIGLELNAAKCGIYSRDATHGPHEEINTPFLPLVKEGYKYLGLEQLERDTPGNFEKAQRKLEENIDTILQSDLTTNQKVYLINSTAVPAVVYVTANAYPDEKRSTTLKRCRDLDTLIRKRLIQHKMKGKTSSNSSVYLPIKKGGLGIRSVEHQTEINFVKKGIYLTKHQEMAKCCKAYEQLKKAGWRNPLSDMEFVLEKYGVTVQDEGNIKKCCKDTTIRIIEAIQKRLQEEWSRNMHYGKLVNQEGNNISFPAYSSPFLDTWRRGVLMSAAEEQLHGLGSLPMRRKCRRGCNHAETAYHVSASCISNEYTTRHDNVVYWTIKTLLTSLRAPNSHTRNLQFGQSTCNVEFEKGNRKVSIQAGQKLLTERRLYHNKPDILVKLTNPNEIFIIEVAVSHIQNWRNQERLKRTRYAVNSVNHITEFNLLNTTRDLNIVTELGAIYRCPVKLAIFVVGCYGELIATDEHKQFCEMMKKNLQVSSGSI

SEQ ID NO: 9553 - protein, 951 aa, Zygaena filipendulae
MSTLPGSICPYCPNSSRIFTPRGLKIHVTRMHRDRIAPSLAPQAADPVTRARTLPSSGRPLGDLDFKRLAEYRGSVRVLRHIPKGARNLAAGKLCDIITKCISTNERNDWGALLFFAYTCLRIPDAAGAGTLTAKVKENINSYSCFLDDAGDLVTARGSPPMARLIESKVYDGDLKGAVRLLMSDDSIAPSTPETLATLQSKHPPPSRSLSFPPKPDFSGEPTQTVRVEEVARALDSFYNGSAAGLDGIRPAHLKELTSGSAGENGHRLMECLTGLCNFLLGGQLNSEVCPFMYGATLCALAKKDGGVRPIAVGSTFRRLAAKLGCGSVREEMSKYLQPHQLGFGTRLGCEAAIHAARAFVMRAGSMGSVIVKLDIKNAFNTLERDVLLCKAREKIPSLYPFLYQIYSSPSNLFFRETLILSQVGAQQGDPLGPLIFSLAIHDAISNLRSPLNVWYLDDGTIGGTPDEVAQDLKILIPRLKDLGLEVNTRKCEFFSCDEQSRSSFSIFGSLLPGLKELAADSLTLLGAPIFPSAVPKAIKLQQQRVVIAQERLNKISSHVALCLFRMCFAVPKVMYLLRTSPTWLFPGEMSAFDGTLRKAVENILNVSLNDDQWCQASLPIRSGGLGVRCMEQVSLPAFLSSAHGVVSLVTNILSPNGDMVSIPFATDAISAWLAVTPGTQVPENPQVQRSWDDLGCKRISDRLMSEASGADLARLKAASQPESGAWLHALPSPHLGTLLDSDSLRVAVALRLGCNVCEPHRCVCGSIVEANGHHALSCRRCLGRFPRHHALNDVIRRALVSANVPCMLEPPGLSRTDGKRPDGLTLVPWRRGRCLLWDATCVCTFAASHLGRTTKTAGAAAEMAALKKRDKYAALEQSHIFVPLAVETMGCLGSDAKEFIGEVGRRIRERGGDPRSRSFLAQRLSIAIQRGNAASIVGTFARGATGDGLL

SEQ ID NO: 9554 - protein, 1084 aa, Desoria tigrina
MNVPNNIVSGTTVPRLCGPGRRCGKSCVHDVHCPVINCDRSFKSVKGLNSHYGKAHGPMAGKASDEDLRATSLNGSKAAEATNGNQQGSNVARRFLKWSSEELNILAEIEYTLRVHGVKGLGISRPCHQCLTNYGFVRTLIAVESQMRSEKYKNARAALYPDWDLLVNKGPVPLEFVVESPLVQRVQSEDDTESLLSGGSSQEDLASVPEDDPPTHDEDRVRSREAFLVVLDEMKAKPKESSWKGEDEVDAVIQLYRNGFDISDGLNSIVKALGKEPKQGGRNDPQPRKPFTKREQKQWDYVCFRRKWRENRSKTARGILNGCLNSNVKPENVDGFAKHWKGTYVDDSKVPTNSESTMTHTGNSYEVGYPISQEELKASLGAMSNATASGPDGISVKFLKEVPSRVLVKICNLILIAGRVPSCLKSSKTVFIPKKDVCTLPKEFRPISLSSVLLRLFHKIVASRIVKYAGFDYRQKAFLPIDGIAENVVLLEAMLKDSRKNLKSLFIGTTDMANAFGSVKHSAVVEAVRCNGATSWFVDYISDLYSEYQTMLDMGRISEKITIERGVLQGCPLSPIIFNMVIDQLLMKLPKSVGYPLSDSLRVNGMAFADDLNTAAETREGLNILLKCIVDTGRPWGLEFNKSKCTYLAMVANGRKVVVKTDLEVLVDGEKIPATGVDEPWRYLGAYFSSRGIVNPPDTLDVWLARLKEAKLKPQEKLYVIRVHVVPKLIHRLCFAKVNAKTLNAMDYKIRKFLKGSHGILHLSSSTPSSYFYASVKDGGLGLMRFRHSIPAMVIRRFGRLEDCDDVIAYAASMNANKKRLATAYGLLTNFEDVLGDNSARIAKVNAGLLYERVDGGGLKHAGEVPYVHQWVAAGSIKYLNGREFCNAMKLRINALPSRARTTRGVLEDRSCRAGCLESETNSHCIQRCPRSHESRLNRHDKVVSILANSLRKGGFAVTLEPKVKTREGWRKPDIVAIKDEVIHVIDPTICGDVNPDDAHDRKVVKYGDNPCITEQLLKDYPGHQVNFGSLAITYRGIMSQKSEAYVRSLGVRKGVLKECTLAAIRGSLKCFSAFSRSLVMTHR

SEQ ID NO: 9555 - protein, 1117 aa, Alaus oculatus
MVKSQGFADPSDMAGSSGCPGRRKCRLFDADAESCERSGTGDLSWRLRRWHADSTCAGIRTSMPPAIDGEGFFMPAPGHVARFPGRPGAGCFKADPPRPMSQSERCLPPIAAGETPCEYPCQFPDCGKAFKTLRGLGVHRNRAHPDFHDQINLEKKPAVRIRWTAEEKALLARAEAQLLVKAQTSGERVTATMNLRLRQVLNDSRTIESIKGIRRRPSHVSRVQQCLAELQSEKTLAHSVSPSPNEGHAHEDSTPSAFDVLRSYLKGLKIRSLVAFNGEELQKICSSVDTVSKDSIFTALSLYMKSIFPRCTPTRRAFPPRPQSTKRQMRRLEYSKVQNLWRKDRGRCWRQIEADQLHESMSVPREIMVPFWNEILTRPTEASPVEVRDIEQPFSLWEPISKKEIQTSFPGLSTAAGPDGVSARLLRSVPLSILEGVLNLFLFLGKVPEDLLEARTIFIPKKKEAALPGDYRPITVTSVILRLFHKVLASRLRVVPIDPRQRAFGSTDGCSENVFLLDLIFRVQRAEHRPLYVASIDVAKAFDSVSTSALLMAMRRKGLSPELVDYVEYVYKNSKTRLEGRGWMSEWIHPTRGVRQGDPLSPLLFNLVMDTLLTKIPVDIGVKMSGESHNALAFADDLVLIASTKVGLQLLLQISIDHLSDCGMVLNTDKCFTVSVKTVPKEKRVAIDPHCTFTINGTTFPALRRSDQWKYLGIPFTPEGRLIPNLKILLTEKLEKLSKAPFKPQQRIWILRTCIVPSLIYLATSGVVSIGLLRSLDRIARKTIRKWLRLPHDCPVAFFHASIKDGGLGVPSLRWEIPILRRNKLVGLTKNSFITGREAEVMIQKELTRNKLRLTDGSSIVDTPKAIERRWADALYKSVDGVALKAARDVPQQNSWVGDGTSFLSGRDYAESIRLRINAIPVRSRTSRGRLGERRCRAGCDAIETMNHVLQHCHRTHGVRVKRHDAVVSYVERSLKERGFDVQREGKFQTNEGIRKPDLVAVQGEKTLVVDAQVIGEQRDLDRSNKWKVCKYRDNSSLLDAIGAKTGRNNVEVFAITLSSRGLWSKRSARDAIKAGIIGRKDLKVLSSRVIIGGLISMRYFNSCTSVRNVRERTGVG

SEQ ID NO: 9556 - protein, 892 aa, Campodea augens
MVYRKQVRLLKRIPKSARHMAALKLSQVIETCVQKNDIQSWENLFTFAYAAFRVPTKSNKSLSTLVKKNIEALTICANKPLSSGISNTSLSRRVVSKISDGDVRGAVKILSSNDVLALESTETLRKLQSKHPAPSRPLVFPDSPDEDSLNLVTSESVVRLAITSFSNGSSQGLDGIRPQILKDLIAKQNGPVADKLLVSVTKLCNLMLSGKVCSDITPILYGATLCALTKKDGGIRPIAVGSTFRRLAAKIACTLVGNQIGTYLRPKQLGVKTQNGCEAVIHTTRLFIESHQNTNFVLLKIDAKNAFNSVERDSMLSAVKEIVPSIYSFMWQCYRNPSLLVFGDKTISSQVGAQQGDPCGPLLFSISIHPIIQQLSSDLNLWYLDDGSIGGPPETVLQDFNLLIERFKEIGLFINPEKCELFFLSDVDETVCSQFESLSPGIKILHDNLELLGSPILPSSTESMFLAKKKEILNLLNRLSDIPSHIAYYLLKHCLMVPKLTYFLRTTPMLEHRNLLDITDEEFKSALEKILNCQLDSRQWALASLPSQFGGLGIRRLSDISLPAFLSSRHAADNLVNSCFCNAPDKFLSTVFVDSLNAWKELNSQTPQVTNRQKCWDVININRILDNFVPVTPKQKALSLASLVPESNGWLNVLPSRSLGTVLDDNTFRISCALRLGLQICHPHLCICGHNVDGDGTHGLSCSRSAGRPFRHSEINNILQRALRSANIPSLLEPVGLARDDGKRVDGLSLVPWSNGQNLIWDATCSDTLASSYLSSTSKNGSSAAELAAQRKTAKYGHLINSNYFFVPFAVETLGPWCQEAKNFIDQLGNKIAVATGEPKSTRYITQRTSLAIQCGNAASIMGTFPNSSPIEEIFYISLLNVCNLLTCGMFK

SEQ ID NO: 9557 - protein, 1006 aa, Campodea augens
MMEGTTFSSTICPCGNSNLDSESSGIICDSCLRWFHGPCVSLTETDLQHFSHGDQQWLCSTCHSDTASQVATNDSPRIPCPICSIPFKRRGLKRHWNSAHKELDFDAYNNIDVESSSFSDSGHLIDRLMVYRKQVRLLKRIPKSARHMAALKLSQVIETCVQKNDIQSWENLFTFAYAAFRVPTKSNKSLSTLVKKNIEALTICANKPLSSGISNTSLSRRVVSKISDGDVRGAVKILSSNDVLALESTETLRKLQSKHPAPSRPLVFPDSPDEDSLNLVTSESVVRLAITSFSNGSSQGLDGIRPQILKDLIAKQNGPVADKLLVSVTKLCNLMLSGKVCSDITPILYGATLCALTKKDGGIRPIAVGSTFRRLAAKIACTLVGNQIGTYLRPKQLGVKTQNGCEAVIHTTRLFIESHQNTNFVLLKIDAKNAFNSVERDSMLSAVKEIVPSIYSFMWQCYRNPSLLVFGDKTISSQVGAQQGDPCGPLLFSISIHPIIQQLSSDLNLWYLDDGSIGGPPETVLQDFNLLIERFKEIGLFINPEKCELFFLSDVDETVCSQFESLSPGIKILHDNLELLGSPILPSSTESMFLAKKKEILNLLNRLSDIPSHIAYYLLKHCLMVPKLTYFLRTTPMLEHRNLLDITDEEFKSALEKILNCQLDSRQWALASLPSQFGGLGIRRLSDISLPAFLSSRHAADNLVNSCFCNAPDKFLSTVFVDSLNAWKELNSQTPQVTNRQKCWDVININRILDNFVPVTPKQKALSLASLVPESNGWLNVLPSRSLGTVLDDNTFRISCALRLGLQICHPHLCICGHNVDGDGTHGLSCSRSAGRPFRHSEINNILQRALRSANIPSLLEPVGLARDDGKRVDGLSLVPWSNGQNLIWDATCSDTLASSYLSSTSKNGSSAAELAAQRKTAKYGNLINSNYFFVPFAVETLGPWCQEAKNFIDQLGNKIAVATREPKSTRYITQRISLAIQRGNAASIMGTFPNSSPMEDIFYIT

SEQ ID NO: 9558 - protein, 1006 aa, Campodea augens
MMEGTTFSSTICPCGNSNLDSESSGIICDSCLRWFHGPCVSLTETELQHFSHGDQQWLCSTCHSDTASQVTTNDSSRIPCPICSVPFKRRGLKRHWNSVHKELDFDAYNNPGVESSSFSESGHMIDRLMVYRKQVRLLKIIPKSARHMAALKLSQVIETCVQKNDIQSWENLFTFAYAAFRVPTKSNKSLSTLVKKNIESLTICANKTSPSGFSNTSLSRRVVSKISDGDVRGAVKILSSNDVLALESTETLSKLQSKHPAPSRPLVFPDPPEEDSLNLVTSESAVRLAISSFSNGSSQGLDGIRPQILKDLVAKQNGGVADRLLVSVTKLCNLMLSGKVCSDITPILYGATLCALTKKDGGIRPIAVGTTFRRLAAKIACTLIGNQIGTYLRPKQLGVKTQNGCETVIHTTRLFIESHQNTNFVLLKIDAKNAFNSVERDSMLSAVKEIAPSIYSFMWQCYRNPSLLVFGDKTISSQVGAQQGDPCGPLLFSISIHPIIQQLSSDLNLWYLDDGSIAGPPETVLQDFNLLIERFKELGLFINTGKCELFFLSGVDEAVCSKFESLSPGIKILHDDLELLGSPILPSSTESLFLAKKKEILNLLNRLSDIPSHIAYYLLKHCLMVPKLTYFLRTTPMWEHRNLLDIADEDFKSALEKILNCQLDSRQWALASLPSQFGGLGIRRLNDITLPAFLSSRHAVDNLVNSCFCNAPDKFLSTVFVDSLNAWKELNLQTPEATNRQKNWDIININRILDNFEPVTPKQKALSLASLEPESNGWLNVLPSRSLGTILDDNTFRISCALRLGLQMCHPHPCICGHDVDGDGAHGLSCSRSAGRPFRHSEINNILQRALRSANIPSLLEPVGLARNDGKRVDGLSLVPWSNGQNLIWDATCTDTLAPSYLSSTSKSGSSAAELAAQRKTTKYIHLINSNYFFVPFAVETLGPWCQEAKLFIDQLGKKITVATGEQKSTIYIKQRISLAIQRGNAASIMGTFPNSSSMEEIFYIT

SEQ ID NO: 9559 - protein, 1006 aa, Campodea augens
MMEGTTFSPTICPCGNSNLDSESSDIICDSCLRWFHGPCVSLTETDLQHFSHGDQQWLCSTCHSDTASQVATNDSPRIPCPICSIPFKRRGLKRHWNSAHKELDFDAYNNIDVESSSFSDSGHLIDRLMVYRKQVRLLKRIPKSARHMAALKLSQVIETCVQKNDIQSWENLFTFAYAAFRVPTKSNKSLSTLVKKNIESLTICANKPLSSGISNTSLSRRVVSKISDGDVRGAVKILSSNDVLALESTETLRKLQSKHPAPSRPLVFPDSPDEDSLNLVTSESVVRLAITSFSNGSSQGLDGIRPQILKDLIAKQNGPVADKLLVSVTKLCNLMLSGKVCSDITPILYGATLCALTKKDGGIRPIAVGSTFRRLAAKIACTLVGNQIGTYLRPKQLGVKTQNGCEAVIHTTRLFIESHQNTNFVLLKIDAKNAFNSVERDSMLSAVKEIVPSIYSFMWQCYRNPSLLVFGDKTISSQVGAQQGDPCGPLLFSISIHPIIQQLSSDLNLWYLDDGSIGGPPETVLQDFNLLIERFKEIGLFINPEKCELFFLSDVDETVCSQFESLSPGIKILHDNLELLGSPILPSSTESMFLAKKKEILNLLNRLSDIPSHIAYYLLKHCLMVPKLTYFLRTTPMLEHRNLLDITDEEFKSALEKILNCQLDSRQWALASLPSQFGGLGIRRLSDISLPAFLSSRHAADNLVNSCFCNAPDKFLSTVFVDSLNAWKELNSQTPQVTNRQKCWDVININRILDNFVPVTPKQKALSLASLVPESNGWLNVLPSRSLGTVLDDNTFRISCALRLGLQICHPHLCICGHNVDGDGTHGLSCSRSAGRPFRHSEINNILQRALRSANIPSLLEPVGLARDDGKRVDGLSLVPWSNGQNLIWDATCTDTLAPSYLSSTSKNGSSAAELAAQRKTAKYGHLINSNYFFVPFAVETLGPWCQEAKNFIDQLGNKIAVATGEPKSTRYITQRISLAIQRGNAASIMGTFPNSSPMEEIFYIT

SEQ ID NO: 9560 - protein, 1006 aa, Campodea augens
MMEGTTFSSTICPCGNSNLDSESSGIICDSCLRWFHGPCVSLTETDLQHFSHGDQQWLCSTCHSDTASQVATNDSPRIPCPICSIPFKRRGLKRHWNSAHKELDFDAYNNIDVESSSFSDSGHLIDRLMVYRKQVRLLKRIPKSARHMAALKLSQVIETCVQKNDIQSWENLFTFAYAAFRVPTKSNKSLSTLVKKNIEALTICANKPLSSGISNTSLSRRVVSKISDGDVRGAVKILSSNDVLALESTETLRKLQSKHPAPSRPLVFPDSPDEDSLNLVTSESVVRLAITSFSNGSSQGLDGIRPQILKDLIAKQNGPVADKLLVSVTKLCNLMLSGKVCSDITPILYGATLCALTKKDGGIRPIAVGSTFRRLAAKIACTLVGNQIGTYLRPKQLGVKTQNGCEAVIHTTRLFIESHQNTNFVLLKIDAKNAFNSVERDSMLSAVKEIVPSIYSFMWQCYRNPSLLVFGDKTISSQVGAQQGDPCGPLLFSISIHPIIQQLSSDLNLWYLDDGSIGGPPETVLQDFNLLIERFKEIGLFINPEKCELFFLSDVDETVCSQFESLSPGIKILHDNLELLGSPILPSSTESMFLAKKKEILNLLNRLSDIPSHIAYYLLKHCLMVPKLTYFLRTTPMLEHRNLLDITDEEFKSALEKILNCQLDSRQWALASLPSQFGGLGIRRLSDISLPAFLSSRHAADNLVNSCFCNAPDKFLSTVFVDSLNAWKELNSQTPQVTNRQKCWDVININRILDNFVPVTPKQKALSLASLVPESNGWLNVLPSRSLGTVLDDNTFRISCALRLGLQICHPHLCICGHNVDGDGTHGLSCSRSAGRPFRHSEINNILQRALRSANIPSLLEPVGLARDDGKRVDGLSLVPWSNGQNLIWDATCTDTLAPSYLSSTSKNGSSAAELAAQRKTAKYGHLINSNYFFVPFAVETLGPWCQEAKNFIDQLGNKIAVATGEPKSTRYITQRISLAIQRGNAASIMGTFPNSSPMEEIFYIT

SEQ ID NO: 9561 - protein, 926 aa, Harpegnathos saltator
MLARQEATLMVTNQPKFMNQELRRYFPQRSVEAIKGRRRRQDHKDMVATFIAEITNIEHAEPPQPDVVPRNDILLEYLESLPAPRTQEFQAKNLWKIITEARSTGKSGTLQKLGLYLKQVFPSVAEQNRIAPRKPIPPPKNNRDLRRQRYAVTQALWKKDRQRCISNILSGLEGVSQPPRNVMEPFWSQLMNSKCENSPEPSKINIIEDIWLPITNNDLKWGRVSRSSAAGPDGVSPRLYRSIPSSVIIGIYNLLMWCGQLPQGLLESRTIFLPKKANASEPGDFRPITIPSVIVRGFHKILAKRMEIMLNIDTRQRAFRSMDGCADNTFLLDILLRYHRRKFRSVYVASLDVSKAFDSISHPAIMATLESVGVPKQMVEYLASVYNRSTTRLYGDGWISRPIQPQRGVRQGDPLSPVIFNAVTHRLLQGLPQEIGAMVGDVRMSAAAFADDLLLFGSTPAGLQRLIDAASKYLSTCGMKINITKSHTIAIIANPHVKKTAVDNKRVFRCDNQPLPALSRTSKWRYLGVMFTPEGRSLAQPMEILQPCIEALSRAPLKPQQRLYALRSTIIPKLYHQMALGSVTIGLLHKIDKILRTSVRKWLALPHDIPTAYFHATVKDGGLGIPSMRWTAPLLRRGRILAAQKDIDQNNLDDFVNDEISKCTRRLTDHGTTYTTMEQISSRWKSKLYSSVDGGGLKHSSGTPQQHQWIADGNRFLSGKDFINTNKLRISALPTRCRSSRGRTSDRRCRAGCLAQETINHILQQCHRTHAARIKRHDAVLSYMERGIRSCGYQVYKEPHYKTGIGLRKPDVVAVLGRTAVVIDAQVVAEQADLDKSHDRKKKYYSEKSVTSEIKKQHKVENVIVTSATLSWKGVWSPKSAQSLKELGIIKTKDVKIISTRVLIGGLASYRIFNTATSVGWRTGVG

SEQ ID NO: 9562 - protein, 772 aa, Anabarilius grahami
MLLRRLWKLLRRIWTKGIIPASWKRAEGCFVPKEMDSADISQFRTISLLSVECKVFFSVLAKRMTNYMVKNKYVDTSVQKGGIPGFSGCLEHTGILNQLIREAKKSKGNLTVVWLDLANAYGSIPHGLINTAMEHYHIPHHTRDIITSYFGGFRLQFRSAHFTTQWQDLEKGIVTGCTISPILFVMGMNLLITAAGKESRGPLMESGTRQPPIRGFMDDLTITMLTHVQARWILKVLDDVATWARMKFKPRKSRSMVIRRGKVTSEIQLQVQGETIPSIEENPIKCLGKWYDASLTNRCNVSRTEKQADAWLSKIKGSGLPGKFKAWLFQHGLLPRLMWLLTIYEVPMTTVEGVERRVNKHLRKWLGIPPSFTSVGLYTRSGQVQLPLSSVVEEFKVAKCRVVMMYEDSTDEKVRRAGVTTRSGRKWVADTSVAQAERALKLKDIIGNPCVGRQGLGSTHFQQWGKADPRQRRDMIQAEVRHLEEERRRFRAVELGAQGAWTKWDLPKRKITWSEIWRLEPFRISFLLRSVYDTLPSPTYLHRWGMREDPLCRLCGGRGTMAHILAGCKTALSQGRYRWRHDKVLSALADILERERQKKHPTSTRPATSIQFVREGENPPAPKKTKKSLLLAAQSWEMRVDLGRKLVFPQVVQTQLRPDMVLWSEEARKMILIELTVPWEDGCEEAYERKATKYQDLIEQCRAKGWQTWLFPVEVGCRGFPAQSVWKTLTALGLAGRERKVAVRRLGEAAERVSCWLWSRREELSWGPGGGG

SEQ ID NO: 9563 - protein, 1108 aa, Pimephales promelas
MAKENTWITRRLIQTTLTGEVLEVKCHCGKLCKSERGLKIHQSKTQCGQGKKQMQRIVETLSETQEDSSQEAPHSTGDLSAPTPSQSHRRDSPNTTLGTQPTTEKVRWPQAKNNTAWNQLDGDLDRVLEATLAGSAEEKINSMTTIIITMARERFGIEERKGGSGTQVNQPNRRVREILQLRREIKTLNKQFRRASAEERKGIKELTSGLRGKLCRLRRAERSRKQRKEKEAKRAQFIKDPYRFTKTLLGEARSGRLTSPKVVIEEFLKESHSDTLRNQAFSAHPKISRTAETPEEELDTSEPTWREVQDIVQKARSASAPGPSGLPYKVYKRCPMLLRRLWKLLRRIWSKGIIPASWKIAEGCFAPKEMDSSDISQFRAISLLSVECKVFFSVLAKRMTTYMVKNKYVDTSIQKGGIPGFSGCLEHTGILNQLIREAKGNKGNLTVIWLDLANAYGSIPHGLINMAMEHYHIPHHIRGIITSYFGGFKLRFKTGQFTTHWLDLEKGIVTGCTISPILFVMGMNLLISAAEKESRGPTMESGIQQPPIRGFMDDLTITTSTHVQARWILKALDDVVTWARMKFKPRKSRSMVIRSGKVTSKFQLRVQGEMIPSIEENPIKCLGKWYDASLTDRCNVSRTEKQADEWLSKIERSGLQGKFKTWLFQHGLLPRLMWLLTLYEVPMTAVEGVERRVNKHLRKWLGIPPSFTSVGLYTRSGQVQLPLSSVVEEFKVAKCRVAMMYQDSADEKVRKAGVTTRSGRKWAADTSVAQAVSALKLKDIIGNPCIGRQGLGSAHFQQWGKADPRQRRDMIQAEVRHLEEERRMSKAVELGVQGAWTKWDLPKRKITWPEIWRLEPFRISFLLRSVYDTLPSPTNLHRWGMRDDPLCRLCGERGTMAHILAGCKTALSQGRYRWRHDKVLCELADILERERQKKRQSSARPVSAIQFIREGEKPPAPKRREKSLLQVAQSWEMRVDLARKLVFPQVVQTSLRPDMVLWSEEGRKIILIELTVPWEDGCEEAYERKATKYQDLVEQCRPKGWQTWLFPVEVGCRGFPAQSVWKTLTALGIVGRERKAAVRRLGEAAERASCWLWNRREELSWGPGGGGQ

SEQ ID NO: 9564 - protein, 1109 aa, Branchiostoma lanceolatum
MTQTTLTGEVTVPVVKCHCGKTCKNSRGLKIHQAKTRCGKEVAQVQRAGTEIPGETQEDSRREVHHSTGDVQAPATPQGRSSASESQQSSREERAISEETHPARERIKWPKMSDVKEWDQLDQDLDKVLEATLKGAVEHKVNSLATLTYNIARERFGAVGKKEKPGTTKKPNRREREIHRLRKEIKSLNKQYKKSPETEKEGIKQLTSQLRDRLCKLRRAECLRRQRKERMNKRAQFVKDPFRFTKTLLGEAKSGKLTSSKEEVEEFLRNTHNDGRKEEALEANPSIVAAERPAKPLNTSEPSWKEIQEVVKKARAGSAPGPSGIPYKVYKKCPLLLRRLWRLLRRIWLKGSIPACWKKAEGCFVPKEENSSTIDQFRTISLLSVECKIFFSVLARRMVAYVTENKYIDTSVQKGGIPGFSGCLEHTGVLSQMIREAKTSRGDLTVVWLDLANAYGSIPHALIQVALDHYHVPAGVKGMILSYFGGVQLRFRTADFTTRWQSLEKGIVTGCTISPILFIMGMNLLIDAAASKAKGPRMMSGARQNPLRGFMDDLTVTTVSHVEARWMLAELDLMATWARMKFKPKKSRCMVIKKGKITSRFKLEVQGEPIPSIKGNPIKCLGKWYDDTLSDRKNVSSTVKQIEEWLRRIEKSGLPGKFKAWLYQHGLLPRLMWLLTVYEVPLTSVEEMERKVNKHLRKWLGVPPSFTSLGLYSRSGQMQLPFASVTEEYKVAKCRTVMLYRDSQDQQVRQAGVTTRAGRKFQADSLVSKAEGMLILRDIIGITNTGRQGLGSSHFQQWGKASRKERRALIQTEVRHLEEEGRRAKAVELATQGAWTKWNLPSRKITWSELWKLEPFRISFLLRSVYDTLPSPTNLYRWGLREDPACKLCGERGTMAHILSGCKTALAQGRYRWRHDRVLTTIASILEVERKKKRHLETRRGPAVTFVREGEKSRPATARAVNNILQKAKSWDLKVDLGRRLHFPSVVQTNLRPDAVLWSEEGKKIVIIELTVPWEERCEEAYERKKNKYQDLLQDCRDKGWQSWLFPIEIGCRGFPAQSVWKMMTSLGIAGKDRKVAIRRMGEAAERASCWLWNRREEVCWKPGGADGQ

SEQ ID NO: 9565 - protein, 1122 aa, unidentified
MATTRNGERSRKRMTQKTLTGEVSVTIAQCHCGKVCKNSKGLKIHQAKTKCGKEVAQMQRTGAETLGEMQEDSRQEVHHSTGDVQAPASPLSRSSTPVSQPSRGSERVDATEIQPAKERIKWPKLSDTNSWSQLDQDLDRVLEATLAGTVERKVDSLTTITYNMAKERFGVEEKKRRPCSEKQPNRREREIKRLRKEIKKLNKRYRSCQDGEKEGIKQLPSQLRDQLCKLRRAESIRRKRKERTNKRAQFIRDPFKFTKALLGEAKSGKLISPKEEVEDFLRVTHNDNTKDIPLEVNTSIVAAERPESPLNISEPSWKEVQEVVRKARAGSAPGPSGLPYKIYKKCPLLLRRLWRLLRRIWVKGSIPVSWKKAEGCFVPKEENSSTINQFRTISLLSVECKIFFSVLAKRMVTYVTENNYINTSVQKGGIPGFSGCLEHTGVLSQMIREAKVNGSDLTVVWLDLANAYGSIPHALIQVALDHYHIPARVKGMISSYFGGIQMRFKTAQFTTQWQKLEKGIVTGCTISPILFIMGMNLIIDAAASKAKGPRMQSGVRLTPLRGFMDDITLTTTSHIEARWMLSELDYMATWARMKFKPKKSRCMIIKKGKVTSRFKLEVQGEPIPSIVGNPVKCLGKWFDDSLTDRKNASSTVAQTEEWLRRIEKSGLPGKLKAWLYQHGLLPRLMWLLTVYEIPLTSVEEMERKVNKHLRKWLGVPPSFTALGFYSTTGQLQLPLSSVVEEYKVAKCRVVMQLRDSQDKQINQAGVTTRAGRKFKPDSMVSQAEGMLVLRDIVGITNIGRQGLGCAHFKQWGKANRKERRALVQEQVRNLEEERRRAKAVELAAQGAWTKWNLPSRKITWAELWKLEPFRVSFMLRSVYDTLPSPANLYRWKLREDPACKLCGERGTMAHILSSCKVALAQGRYRWRHDKVLSTIASILEVERRKKRHVEAKRAPVMAFVREGEKSRRPATERAASSILQKARAWELKVDLGRRLHFPSVVQTNLRPDAVLWSEEGKKIILIELTVPWEERCEEAHERKASKYHDLLQCCREKGWQSWLFPVEVGCRAFPAQSTWKLLTALGITGRARKNAVRSIGETAEAASCWVWRKREEVSWKPGGADG

SEQ ID NO: 9566 - protein, 1109 aa, Branchiostoma lanceolatum
MTQTTLTGEVTVPVVKCHCGKTCKNSRGLKIHQAKTKCGKEVAQVQRAGTEIPGETQEDSRQEVHHSTGDVQAPATPHNRRSASESQQSSREERAVSEETHPARERIKWPKMSDVKEWDQLDQDLDKVLEATLKGAVEHKVNSLATLTYNIARERFGVIKKKERPGTAKKPNRREREIHRLRKEIKSLNKQYKRSPDTEKEGIKQLTSQLRDRLCKLRRAESLRRQRKERMNKRAQFVKDPFRFTKTLLGEAKSGKLTCSKEEVEEFLRNTHNDGRKEEALEANPSLVTAEKPEKPLNTSEPSWKEVQEVVKKARAGSAPGPSGIPYKVYKKCPLLLRRLWRLLRRIWLKGSIPACWKKAEGCFVPKEENSSTIDQFRTISLLSVECKIFFSVLARRMVAYVTENKYIDTSVQKGGIPGFSGCLEHTGVLSQMIREAKTSRGDLTVVWLDLANAYGSIPHALIQVALDHYHVPAGVKGMISSYFGGVQLRFRTADFTTQWQSLEKGIVTGCTISPILFIMGMNLLIEAAASKAKGPRMMSGARQNPLRGFMDDLTVTTVSHIEARWMLAELDLMATWARMKFKPKKSRCMVIKKGKITSRFKLEVQGEPIPSIEGNPIKCLGKWYDDTLSDRTNVSSTMKQIEEWLRRIEKSGLPGKFKAWLYQHGMLPRLMWLLTVYEVPLTRVEEMERKVNKHLRKWLGVPPSFTSLGLYSKSSQMQLPLASVVEEYKVAKCRTVMMYRDSQDQQVRQAGVTTRAGRKFVADSLVSKAEGMLILRDIVGITNTGRQGLGSSHFQQWGKASRKERRALIQTEVRQLEEEGRRAKAAQLAAQGAWTKWNLPSRKITWSELWKLEPFRISFLLRSVYDTLPSPTNLCRWGLREDPACKLCGKRGTMAHILSGCSTALTQGRYRWRHDKVLTTIASILEVERKKKRHLESRRGPAIAFVREGEKSRPAKARASNNILQKAKSWDLIVDLGRRLHFPPVVQTKLRPDAVLWSEEGKKIVLIELTVPWEERCEEAYERKKNKYQDLLQECRDKGWQSWLFPIEIGCRGFPAQSVWKMMTALGIAGKDRKVAIRRMGEAAERASCWLWNRREEVCWKPGGADGQ

SEQ ID NO: 9567 - protein, 1106 aa, unidentified
MTQKTLTGEVSVTIAQCHCGKVCKNSKGLKIHQAKTKCGKEVAQMQRTGAETLGETQEDSRQEVHHSTGDVQAPASPRSRSSTPVSQPSRGSERVDATEIQPAKERIKWPKLSDTNSWSQLDQDLDMVLEATLAGTVERKVDSLTTITYNMAKERFGVEEKKRRPCSEKQPNRREREIKRLRKEIKKLNKRYRSCQDGEKEGIKQLTSQLRDQLCKLRRAESIRRKRKERTNKRVQFIRDPFKFTKALLGEAKSGKLISPKEEVEDFLRVTHNDNTKDIPLEVNTSIVAAERPESPLNISEPSWKEVQEVVRKARAGSAPGPSGLPYKIYKKCPLLLRRLWRLLRRIWVKGSIPVSWKKAEGCFVPKLENSSTINQFRTISLLSVECKIFFSVLAKRMVTYVTENNYINTSVQKGGIPGFSGCLEHTGVLSQMIREAKVNGSDLTVVWLDLANAYGSIPHALIQVALDHCHIPARVKGMISSYFGGIQMRFKTAQFTTQWQKLDKGIVTGCTISPILFIMGMNLIIDAAASKAKGPRMQSGVRLTPLRGFMDDITLTTTSHIEARWMLSELDYMATWARMKFKPKKSRCMIIKKGKVTSRFKLEVQGEPIPSIVGNPVKCLGKWFDDSLTDRKNASSTVAQTEEWLRRIEKSGLPGKFKAWLYQHGLLPRLMWLLTVYEIPLTSVEEMERKVNKHLRKWLGVPPSFTALGFYSSTGQLQLPLSSVVEEYKVAKCRVVMQLRDSQDKQINQAGVTTRAGRKFKPDSMVSQAEGMLVLRDIVGITNIGRQGLGCAHFKQWGKANRKERRALVQEQVRNLEEERRRAKAVELAAQGAWTKWNLPSRKITWAELWKLEPFRVSFMLRSVYDTLPSPANLYRWKLREDPACKLCGERGTMAHILSSCKVALAQGRYRWRHDKVLSTIASILEVERRKKRHVEAKRAPVMAFVREGEKSRRPAAERAASSILQKARAWELKVDLGRRLHFPSVVQTNLRPDAVLWSEEGKKIILIELTVPWEERCEEAHERKASKYHDLLQCCREKGWQSWLFPVEVGCRGFPAQSTWKLLTALGRARKNAVRSIGESAEAASCWVWRKREEVSWKPGGADG

SEQ ID NO: 9568 - protein, 1109 aa, Branchiostoma lanceolatum
MTQTTLTGEVTVPVVKCHCGKTCKNSRGLKIHQAKTKCGKEVAQVQRAGTEIPGETQEDSRQEVHHSTGDVQAPATPHNRRSASESQQSSREERAVSEETHPARERIKWPKMSDVKEWDQLDQDLDKVLEATLKGAVEHKVNSLATLTYNIARERFGVIKKKERPGTEKKPNRREREIHRLRKEIKSLNKQYKRSPDTEKEGIKQLTSQLRDRLCKLRRAESLRRQRKERMNKRAQFVKDPFRFTKTLLGEAKSGKLTSSKEEVEEFLRNTHNDGRKEEALEANPSLVTAEKPEKPLNTSEPSWKEVQEVVKKARAGSAPGPSGIPYKVYKKCPLLLRRLWRLLRRIWLKGSIPACWKKAEGCFVPKEENSSTIDQFRTISLLSVECKIFFSVLARRMVAYVTENKYIDTSVQKGGIPGFSGCLEHTGVLSQMIREAKTSRGDLTVVWLDLANAYGSIPHALIQVALDHYHVPAGVKGMISSYFGGVQLRFRTADFTTQWQSLEKGIVTGCTISPILFIMGMNLLIEAAASKAKGPRMMSGARQNPLRGFMDDLTVTTVSHIEARWMLAELDLMATWARMKFKPKKSRCMVIKKGKITSRFKLEVQGEPIPSIEGNPIKCLGKWYDDTLSDRTNVSSTMKQIEEWLRRIEKSGLPGKFKAWLYQHGMLPRLMWLLTVYEVPLTRVEEMERKVNKHLRKWLGVPPSFTSLGLYSKSSQMQLPLASVVEEYKVAKCRTVMMYRDSQDQQVRQAGVTTRAGRKFVADSLVSKAEGMLILRDIVGITNTGRQGLGSSHFQQWGKASRKERRALIQTEVRQLEEEGRRAKAAQLAAQGAWTKWNLPSRKITWSELWKLEPFRISFLLRSVYDTLPSPTNLCRWGLREDPACKLCGKRGTMAHILSGCSTALTQGRYRWRHDKVLTTIASILEVERKKKRHLESRRGPAIAFVREGEKSRPAKARASNNILQKAKSWDLIVDLGRRLHFPPVVQTKLRPDAVLWSEEGKKIVLIELTVPWEERCEEAYERKKNKYQDLLQECRDKGWQSWLFPIEIGCRGFPAQSVWKMMTALGIAGKDRKVAIRRMGEAAERASCWLWNRREEVCWKPGGADGQ

SEQ ID NO: 9569 - protein, 1122 aa, unidentified
MATTRNGERSRKRMTQKTLTGEVSVTIAQCHCGKICKNSKGLKIHQAKTKCGKEVAQTQRTGAETLGETQEDSRQEVHHSTGDVQAPASPLSRSSTPVSQPSRGSERVDATEIQPAKERIKWPKLNDTNSWSQLDQDLDRVLEATLAGTVERKVDSLTTITYNMARERFGVEEKKRRPCSEKQPNRREREIKRLRKEIKKLNKRYRSCQDGEKEGIKQLTSQLRDQLCKLRRAESIRRKRKERTNKRAQFIRDPFKFTKALLGEAKSGKLISPKEEVEDFLRVTHNDNTKDIPLEVNTSIAAAERPESPLSISEPSWKEVQEVVRKARAGSAPGPSGLPYKIYKKCPLLLRRLWRLLRRIWVKGSIPVSWKKAEGCFVPKEENSSTINQFRTISLLSVECKIFFSVLAKRMVTYVTENNYINTSVQKGGIPGFSGCLEHTGVLSQMIREAKVNGSDLTVVWLDLANAYGSIPHALIQVALDHYHIPARVKGMISSYFGGIQMRFKTAQFTTQWQKLEKGIVTGCTISPILFIMGMNLIIDAAASKAKGPRMQSGVRLTPLRGFMDDITLTTTSHIEARWMLSELDYMATWARMKFKPKKSRCMIIKKGKVTSRFKLEVQGEPIPSIVGNPVKCLGKWFDDSLTDRKNASSTVAQTEEWLRRIEKSGLPGKFKAWLYQHGLLPRLMWLLTVYEIPLTSVEEMERKVNKHLRKWLGVPPSFTALGFYSTTGQLQLPLSSVVEEYKVAKCRVVMQLRDSQDKQINQAGVTTRAGRKFKPDSMVSQAEGMLVLRDIVGITNIGRQGLGCAHFKQWGKANRKERRALVQEQVRNLEEERRRAKAVELAAQGAWTKWNLPSRKITWAELWKLEPFRVSFMLRSVYDTLPSPANLYRWKLREDPACKLCGERGTMAHILSSCKVALAQGRYRWRHDKVLSTIASILEVERRKKRQVEAKRAPVMAFVREGEKSRRPATERAASSILQKAGAWELKVDLGRRLHFPSVVQTNLRPDAVLWSEEGKKIILIELTVPWEERCEEAHERKASKYHDLLQCCREKGWQSWLFPVEVGCRGFPAQSTWKLLTALGITGRARKNAVRSIGETAEAASCWVWRKREEVSWKPGGADE

SEQ ID NO: 9570 - protein, 959 aa, unidentified
MAKERFGVEEKKRRPCSEKQPNRREREIKRLRKEIKKLNKRYRSCQDGEKEGIKQLTSQLRDQLCKLRRAESIRRKRKERTNKRAQFIRDPFKFTKALLGEAKSGKLISPKEEVEDFLRVTHNDNTKDIPLEVNTSIVAAERPESPLNISEPSWKEVQEVVRKARAGSAPGPSGLPYKIYKKCPLLLRRLWRLLRRIWVKGSIPVSWKKAEGCFVPKEENSSTINQFRTISLLSVECKIFFSVLAKRMVTYVTENNYINTSVQKGGIPGFSGCLEHTGVLSQMIREAKVNGSDLTVVWLDLANAYGSIPHALIQVALDHYHIPARVKGMISSYFGGIQMRFKTAQFTTQWQKLEKGIVTGCTISPILFIMGMNLIIDAAASKAKGPRMQSGVRLTPLRGFMDDITLTTTSHIEARWMLSELDYMATWARMKFKPKKSRCMIIKKGKVSSRFKLEVQGEPIPSIVGNPVKCLGKWFDDSLTDRKNASSTVAQTEEWLRRIEKSGLPGKFKAWLYQHGLLPRLMWLLTVYEIPLTSVEEMERKVNKHLRKWLGVPPSFTALGFYSTTGQLQLPLSSVVEEYKVAKCRVVMQLRDSQDKQINQAGVTTRAGRKFKPDSMVSQAEGMLVLRDIVGITNIGRQGLGCAHFKQWGKANRKERRALVQEQVRNLEEERRRAKAVELAAQGAWTKWNLPSRKITWAELWKLEPFRVSFMLRSVYDTLPSPANLYRWKLREDPACKLCGERGTMAHILSSCKVALAQGRYRWRHDKVLSTIASILEVERRKKRHVEAKRAPVMAFVREGEKSRRPAAERAASSILQKARAWELKVDLGRRLHFPSVVQTNLRPDAVLWSEEGKKIILIELTVPWEERCEEAHERKASKYHDLLQCCREKGWQSWLFPVEVGCRGFPAQSTWKLLTALGITGRARKNAVRSIGETAEAASCWVWRKREEVSWKPGGADG

SEQ ID NO: 9571 - protein, 1122 aa, Branchiostoma floridae
MATTRNGERSRKRMTQKTLTGEVSVTIAQCHCGKICKNSKGLKIHQAKTKCGKEVAQMQRTGAETLGETQEDSRQEVHHSTGDVQAPASPLSRSSTPASQPSRGSERVDATEIQPAKERIKWPKLSDTNSWSQLDQDLDRVLEATLAGTVERKVDSLTTITYNMAKERFGVEEKKRRPCSEKQPNRREREIKRLRKEIKKLNKRYRSCQDGEKEGIKQLTSQLRDQLCKLRRAESIRRKRKERTNKRAQFIRDPFKFTKALLGEAKSGKLISPKEEVEDFLRVTHNDNTKDIPLEVNTSIVAAERPESPLNISEPSWKEVQEVVRKARAGSAPGPSGLPYKVYKKCPLLLRRLWRLLRRIWVKGSIPVSWKKAEGCFVPKEENSSTINQFRTISLLSVECKIFFSVLAKRMVTYVTENNYINTSVQKGGIPGFSGCLEHTGVLSQMIREAKVNGSDLTVVWLDLANAYGSIPHALIQVALDHYHIPARVKGMISSYFGGIQMRFKTAQFTTQWQKLEKCIVTGCTISPILFIMGMNLIIDAAASKAKGPRMQSGVRLTPLRGFMDDITLTTTSHIEARWMLSELDYMATWARMKFKPKKSRCMIIKKGKVTSRFKLEVQGEPIPSIVGNPVKCLGKWFDDSLTDRKNASSTVAQTEEWLRRIEKSGLPGKFKAWLYQHGLLPRLMWLLTVYEIPLTSVEEMERKVNKHLRKWLGVPPSFTALGFYSTTGQLQLPLSSVVEEYKVAKCRVVMQLRDSQDKQINQAGVTTRAGRKFKPDSMVSQAEGMLVLRDIVGITNIGRQGLGCAHFKQWGKANRKERRALVQEQVRNLEEERRRAKAVELAAQGAWTKWNLPSRKITWAELWKLEPFRVSFMLRSVYDTLPSPANLYRWKLREDPACKLCGERGTMAHILSSCKVALAQGRYRWRHDKVLSTIASILEVERRKKRHVEAKRAPVMAFVREGEKSRRPATERAASSILQKARAWELKVDLGRRLHFPSVVQTNLRPDAVLWSEEGKKIILIELTVPWEERCEEAHERKASKYHDLLQCCREKGWQSWLFPVEVGCRGFPAQSTWKLLTALGITGRARKNAVRSIGETAEAASCWVWRKREEVSWKPGGADG

SEQ ID NO: 9572 - protein, 1122 aa, Branchiostoma floridae
MATTRNGERPRKRMTQKTLTGEVSVTIAQCHCGKICKNSKGLKIHQAKTKCGKEVAQTQRTGAETLGETQEDSRQEVHHSTGDVQAPASPLSRSSTPVSQPSRGSERVDATEIQPAKERIKWPKLNDTNSWSQLDQDLDRVLEATLAGTVERKVDSLTTITYNMARERFGVEEKKRRPCSEKQPNRREREIKRLRKEIKKLNKRYRSCQDGEKEGIKQLTSQLRDQLCKLRRAESIRRKRKERTNKRAQFIRDPFKFTKALLGEAKSGKLISPKEEVEDFLRVTHNDNTKDIPLEVNTSIVAAERPESPLSISEPSWKEVQEVVRKARAGSAPGPSGLPYKIYKKCPLLLRRLWRLLRRIWVKGSIPVSWKKAEGCFVPKEENSSTINQFRTISLLSVECKIFFSVLAKRMVTYVTENNYINTSVQKGGIPGFSGCLEHTGVLSQMIREAKVNGSDLTVVWLDLANAYGSIPHALIQVALDHYHIPARVKGMISSYFGGIQMRFKTAQFTTQWQKLEKGIVTGCTISPILFIMGMNLIIDAAASKAKGPRMQSGVRLTPLRGFMDDITLTTTSHIEARWMLSELDYMATWARMKFKPKKSRCMIIKKGKVTSRFKLEVQGEPIPSIVGNPVKCLGKWFDDSLTDRKNASSTVAQTEEWLRRIEKSGLPGKFKAWLYQHGLLPRLMWLLTVYEIPLTSVEEMERKVNKHLRKWLGVPPSFTALGFYSTTGQLQLPLSSVVEEYKVAKCRVVMQLRDSQDKQINQAGVTTRAGRKFKPDSMVSQAEGMLVLRDIVGITNIGRQGLGCAHFKQWGKANRKERRALVQEQVRNLEEERRRAKAVELAAQGAWTKWNLPSRKITWAELWKLEPFRVSFMLRSVYDTLPSPANLYRWKLREDPACKLCGERGTMAHILSSCKVALAQGRYRWRHDKVLSTIASILEVERRKKRHVEAKRAPVMAFVREGEKSRRPATERATSSILQKARAWELKVDLGRRLHFPSVVQTNLRPDAVLWSEEGKKIILIELTVPWEERCEEAHERKASKYHDLLQCCREKGWQSWLFPVEVGCRGFPAQSTWKLLTALGITGRARKNAVRSIGETAEAASCWVWRKREEVSWKPGGADE

SEQ ID NO: 9573 - protein, 1116 aa, unidentified
MMQTTLTGEVTVSATTCHCGKTCKNSKGLKIHQAKTKCGQGVQQVQRTAVEPGETQEDSRQEEPHRTSDPQAPGSPQAPRRYSPQRSSTIQSQQPSGSEQASRAERQDHPVKDRIKWPKMSDTEAWKHLDTDLDQILEATLAGAAERKVNSLTAITYNVARERFGVEEKRKKPQATKQPNRREREIRQLRKEIKALNKKYKRGPVSEKEGIKQLTSQLRERLCRLRRAESTRRQRKERTNKRAQFVRDPFRFTKSLLGEAKSGRLTSCREEVEEFLKETHNDELRHQALEENSRIESAPTPDKPLNTSEPTWKEVQEVVRKARAGSAPGPSGIPYKVYKKCPLLLRRLWRLLRRIWLKGTIPVSWKKAEGCFVPKEENSSTISQFRTISLLSVECKIYFSVLARRLVTYVTENKYIDTSVQKGGIPGFSGCLEHTGVLTQLIREAKADKGDLTVVWLDLANAFGSIPHALIQVALNHYHVPARVQSMITNYFGGIQLRFRTADFTTQWQNLEKGIVTGCTISPILFIMGMNLLIDVAAAKAKGPRMKSGARQPPLRGFMDDITLTTVSHVEARWMLAELDYMATWARMRFKPRKSRCMIIKKGKVTSRFRLEVQGETIPSIVGNPIKCLGKWFDESLTDRHNVDSTVQQTEEWLRRIEKSGLPGKLKAWLYQHGLLPRLMWLLTVYDLPLSRVAEIERKINKHLRRWLGIPPSFTAVGLYTKSGQLQLPLSSVVEEYKVAKCRTVLLYNNSQDQRVREAGVITRAGRKFKANDLVAQAESMLLIRDIIGATNSGRQGLGSSHFQQWGKASKKERRAMVQTEVRQLEEEGRMAKAVELSAQGAWTRWNLPSRKLSWAEVWKLEPFRISFLLRSVYDTLPSPTNLYRWGLREESACKLCGGRGTMAHILAGCKIALAQGRYRWRHDKVLAVTAEVLEQERRKKRQERASSTMAINFVREGERKPAATRRENSILQGAKAWELRVDLGRRLHFPQVVQTNLRPDAVLWSEDRKKLIMIELTVPWEEGCEEAYERKRAKYEDLLQECRSKGWQAWLFPIEVGCRGFPAQSVWRMLSAIGVKGKDRKAAVRRMGDAAEKASCWLWCKREEERWKQGGADGQ

SEQ ID NO: 9574 - protein, 1116 aa, Branchiostoma belcheri
MMQTTLTGEVTVSVATCHCGKICKNSKGLKIHQAKTKCGQGVLQTQRAGVEPGETQEDSRQEAPHSTGDPQAPESPQAHRRPSPQRRTVTESQQPRSRESVSRAERQAHPVKDRIKWPKMSDTKAWEHLDADLNQVLEASLAGAVERKVESLTAITYNLARERFGVEEKKKKSQQTTKQPNRREREIRQLRREIKALNKKYKAGPASEKEGIKQLTCQLRERLCRLRRAENVRKQRKQRANKRAQFVRDPFRFTKSLLGEAKSGRLASGREEVEEFLREAHNDELRHEALEENSRIKSVPVPTKPLDTSEPTWKEVQDVVRKARAGSAPGPSGIPYKVYKKCPLLLRRLWRLLRRIWGKGVIPTSWKRAEGCFIPKEVDSSVINQFTISLLCVECKIYFSVLARRLVTYITENQYIDTSVQKGGIPGFSGCLEHTGVLTQVIREAKANKSDLTVVWLDLANAYGSIPHGLIQVALDHYHVPASVKGMVTSYFGGIQLRFRTADFTTQWQNLEKGIVTGCTISPILFIMGMNLLIDAAATKAKGPRMNSGSRQPPIRGFMDDITLTTVTHVEARWMLAELDYMATWARMRFKPKKSRCMIIKKGKVTSRFKLEVQGEPIPSIVGNPIKCLGRWFDDSLTDRHNVDCTVQQTEEWLRRIEKSGLPGKFKAWLYQHGLLPRLMWLLTVYELPLSRVAEIERKVNKHLRKWLGIPPSFTAVGLYTKSGQLQLPLSSVVEEYKVAKCRTVLLYSDSQDQKVREAGVTTRAGRKFKANELVAQAKSMLLIRDIIGATNSGRQGLGSSHFQQWGKASKKERRAMVQTEVRQLEEEGRRAKAVALSSQGAWTRWNLPSRKLTWADVWKLEPFRISFLLRSVYDTLPSPANLCRWNLREDPACKLCGERGTMAHILSGCKVALAQGRYRWRHDKVLAVIAELLEQQRRKKRQDRPRPDLAMTFVREGEVKPAAGRRDNSILQRAKSWELRVDLGRRMHFPQVVQTNLRPDAVLSSEDGKKIVMIELTVPWEEGCEEANERKRAKYQDLLQQCRDKGWQAWLFPVEVGCRGFPAQSVWKMLSAVGITGRDKKVAVRKMGEAAERASCWLWCRRETTSWKPGGADEQ

SEQ ID NO: 9575 - protein, 1084 aa, Clupea harengus
MTIIDHTFLCKNARGLKIHQSKTTCGKGEKQMQRMVGTPSETQEDSCQEAPHSTGDLSASAPPLNQRVSPNTTPGTQPTRERVKWPPANNNIAWYQLDQDLGRVLEAALAGAAERKLDSMTAIVYTMAKERFGTEEKKGSSKAPGKRTNRRAREITQLRREIKTLNKQYKQASSKEKESIKDLTTELRGQLCRLRRAERSLRLRKEKEVKRAQFIKDPYRFTTTLLGEARSGRLTSPKEAVEEFLKESHSDTLRGQALDVHPRIGRSETPEEELDTKEPTWREVHDIVQKARSSSAPGPSSIPYKVYKRCPMLLRRLWNLLRRIWTKGIIPTSWKRAEGCFVPKEMDSSEIGQFRTISLLSVECKIFFSVLARRLTMYMVKNKYVDTSIQKGGIPSSPGCLEHTSILSQLIREAKESKGDLTVVWLDLANAYGSIPHDLINTAMEHYHIPQHIRRMITTYFSGFKLRFQTTQFTTQWQDLEKGIVTGCTISPILFIMGMNLLITAAVKESRGPIMESGIRQPPLRGFMDDLTITTATHVQTRWILKALDDVATWARMKFKPKKSRSMVIRNGKVTNRFQLQVQGEVIPPIEENPIKCLGKWYDSSLKDKGSVSRTEKQAEEWLKKIESSGLPGKFKTWLFQHGLLPRLLWLLTIYEIPMTAVEGIERKVNKHLRKWLGIPPSFTSVGLYIRSGQLQLPLSSVVEEFKVAKCRIVMMLRDSTDEMVRGAGVTTRSGRKWAAATQVEQAESLLKLKNIIGNPCTGRQGLGSTHFQQWTKADPRQRRVMVQAEVRQLEEEGRWSRAVELGLQGAWTKWELPKRKITWPELWRLEPFRISFLLRSVYDTLPTPTNLYRWGMREDPQCRLCGERGTMAHILAGCRTALSQGRYRWRHDKVLRALADILEQERPKKHQPQSRPTPSIQFIREGEKPSSSKKTKKGLLQTAPSWEMRVDLGRKLHFPQVVQTSLRPDMVIWSEEAKKIILIELTVPWEEGCGEAYERKATKYQDLVQQCRDKGWQAWLFPVEVGCRGFPAQSVWNTLTALGIKGRERKTAVRRLGEAAERASCWLWNRREERSWGPGEDGQ

SEQ ID NO: 9576 - protein, 1129 aa, Clupea harengus
MSNTPSLPRGGEDERLNRTDSTVTATASTRTTRRLTQTRLTGEVLEVKCHCGKICKNARGLKIHQSKTTCGKGVKQMQRMVETPSERQEDSCQEAPHSTGDLSASAPPLNQRVSPNTTPGTQPTRERVKWPPANNNIAWYQLDQDLDRVLEAALAGAAERKLDSMTAIVYTMAKERFGTEEKKGSSKAPGKRTNRRAREITQLRREIKTLNKQYKQASSKEKEGIKDLTTELRGQLCRLRRAERSLRLRKEKEVKRAKFIKDPYRFTKTLLGEARSGRLTSPKDAVEEFLKESHSDTLRGQALDVHPRIGRSETPEEELDTKEPTWREVHDIVQKARSSSAPGPSSIPYKVYKRCPMLLRRLWNLLRRIWTKGIIPTSWKRAEGCFVPKEMDSSEIGQFRTISLLSVECKIFFSVLARRLTMYMVKNKYVDTSIQKGGIPGSPGCLEHTSILSQLIREAKESKGDLTVVWPDLANAYGSIPHDLINTAMEHYHIPQHIRRMITTYFSGFKLRFQTTQFTTQWQDLEKGIVTGCTISPILFIMGMNLLITAAVKESRGPIMESGIRQPPLRGFMDYLTITTATHVQTRWILKALDDVATWARMKFKPKKSRSMVIRNGKVTNRFQLQVQGEVIPPIEENPIKCLGKWYDSSLKDKGSVSRTEKQAEEWLKKIESSGLPGKFKTWLFQHGLLPRLLWLLTIYEIPMTAVEGIERKVNKHLRKWLGIPPSFTSVGLYIKSGQLQLPLSSVVEEFRVAKCRIVMMLRDSTDEMVRGAGVTTRSGRKWAAATQVEQAESLLKLKDIIGNPCTGRQGLGSTHFQQWTKADPRQRRVMVHAEVRQLEEEGRWSRAVELGLQGAWTKWELPKRKITWPELWRLEPFRISFLLRSVYDTLPTPTNLYRWGMREDPQCRLCGERGTMAHILAGCRTALSQGRYRWRHDKVLRALADILEQERRKKHQPQSRPTPSIQFIREGEKPSSSKKTKKGLLQTAPSWEMRVDLGRRLHFPQVVQTSLRPDMVIWSEEAKKIILIELTVPWEEGCGEAYERKATKYQDLVQQCRDKRWQAWLFPVEVGCRGFPAQSVWNTLTALGIKGRERKTAVRRLGEAAERASCWLWNRREERSWGPGEDGQ

SEQ ID NO: 9577 - protein, 1156 aa, Clupea harengus
MTWVGEASNLTHSTRKRAPTVATKQNNEQYPQSLPRGGEDERLNRTDSTVTATASTRTTRRLTQTTLTGEVLEVKCHCGKICKNARGLKIHQSKTTCGKGEKQMQRMVETPSETQEDSCQEAPHSTGDLSASAPPLNQRVSPNTTPGTLPTRERVKWPPANNNIAWYQLDQDLDRVLEAALAGAAERKLDSMTAIVYTMAKERFGTEEKKGSSKAPGKRTNRRAREITQLRREIKTLNKQYKQASSKEKEGIKDLTTELRGQLCRLRRAERSLRLRKEKEVKRAQFIKDPYRFTKTLLGEARSGRLTSPKEAVEEFLKESHSDTLRGQALDVHPRIGRSETPEEELDTKEPTWREVHDIVQKARSSSAPGPSSIPYKVYKRCPMLLRRLWKLLWRIWTKGIIPTSWKRAEGCFVPKEMDSSEIGQFRTISLLSVECKIFFSVLARRLTMYMVKNKYVDTSIQKGGIPGSPGCLEHTSILSQLIREAKESKGDLTVFWLDLANAYGSISHDLINTAMEHYHIPQHIRRMITTYFSGFKLRFQTTQFTTQWQDLEKGIVTGCTISPILFIMGMNLLITAAIKESRGPIMESGIRQPPLRGFMDDLTITTATHVQTRWILKALDDVATWARMKFKPKKSRSMVIRNGKVTNRFQLQVQGEVIPPIEENPIKCLGKWYDSSLKDKGSVSRTEKQAEEWLKKIESSGLPGKFKTWLFQHGLLPRLLWLLTIYEIPMTAVEGIERKVNKHLRKWLGIPPSFTSVGLYIRSGQLQLPLSSVVEEFKVAKCRIVMMLRDSTDEMVRGAGVTTRSGRKWAAATQVEQAESLLKLKDIIGNPCTGRQGLGSTHFQQWTKADPRQRRVMVQAEVRQLEEEGRWSRAVELGLQGAWTKWELPKRKITWPELWRLEPFRISFLLRSVYDTLPTPTNLYRWGMREDPQCRLCGERGTMAHILAGCRTALSQGRYRWRHDKVLRALADILEQERRKKHQPQSRPTPSIQFIREGEKPSSSKKTKKGLLQTAPSWEMRVDLGRKLHFPQVVQTSLRPDMVIWSEEAKKIILIELTVPWEEGCGEANERKATKYQDLVQQCRDKGWQAWLFPVEVGCRGFPAQSVWNTLTALGIKGRERKTAVRRLGEAAERASCWLWNRREERSWGPGEDGQ

SEQ ID NO: 9578 - protein, 1050 aa, Clupea harengus
MVETPSETQEDSCQEAPHSTGDLSASAPPLNQRVSPHTTPGTQPTRERVKWPPANNNIAWYQLDQDLDRVLEAALAGAAERKLDSMTAIVYTMAKERFGTEEKKGSSKAPGKQTNRRAREITQLRREIKTLNKQYKQASSKEKEGIKDLTTELRGQLCRLRRAERSLRLRKEKEVKRAQFIKDPYRFTKTLLGEARSGRLTSPREAVEEFLKESHSDTLRGQALDVHPRIGRSETPEEELDTKEPTWREVHDIVQKARSSSAPGPSSIPYKVYKRCPMLLRRLWKLLRRIWTKGIIPTSWKRAEGCFVPKEMDSSEIGQFRTISLLSVECKIFFSVLARRLTMYMVKNKYVDTSIQKGGIPGSPGCLEHTSILSQLIREAKESKGDLTVVWLDLANAYGSIPHDLINTAMEHYHIPQHIRRMITTYFSGFKLRFQTTQFTTQWQDLEKGIVTGCTISPILFIMGMNLLITSAVKESRGPIMESGIRQPPLRGFMDDLTITTATHVQTRWILKALDDVATWARMKFKPKKSRSMVIRNGKVTNRFQLQVQGEVIPPIEENPIKCLGKWYDSSLKDKGSVSRTEKQAEEWLKKIESSGLPGKFKTWLFQHGLLPRLLWLLTIYEIPMTAVEGIERKVNKHLRKWLGIPPSFTSVGLYIRSGQLQLPLSSVAEEFKVAKCRIVMMLRDSTDEMVRGAGVTTRSGRKWAAATQVEQAESLLKLKDIIGNPCTGRQGLGSTHFQQWTKADPRQRRVMVQAEVRQLEEEGRWSRAVELGLQGAWTKWELPKRKITWPELWRLEPFRISFLLRSVYDTLPTPTNLYRWGMREDPQCRLCGERGTMAHILAGCRTALSQGRYRWRHDKVLRALADILEQERRKKHQPQSRPTPSIQFIREGEKPSSSKKTKKGLLQTAPSWEMRVDLGRKLHFPQVVQTSLRPDMVIWSEEAKKIILIELTIPWEEGCVEAYERKATKYQDLVQQCRDKGWQAWLFPVEVGCRGFPAQSVWNTLTALGIKGRERKTAVRRLGEAAERASCWLWNRREERSWGPGEDGQ

SEQ ID NO: 9579 - protein, 1134 aa, Cyprinodon tularosa
MNTEQYPQSLPRGGEDEGLNRTDSTVMARNGLWTQKLLTQKTLTGETLEVKCHCGKICKNLRGLKIHQSRTVCGKGGAQVQRTVVTLGETQENSSLDKPHSTGDLLAPELPQDLRRDEPHSNPVSQPHPARERIQWPKMSDNQEWNQLDQDLDKILEATLAGTAEQKVNTLTTLTYNLARERFGVEEKKVGSQSVQQPSRREREIKRMRREIKSLSKQFKNAPTEEREGIKDLTSQIRDRLSRLRRAESLRKKRRDREKKRAQFIKDPFQFTRALLGEAKSGRLTSPREEVEAFLEETHSDSFRNQNLEGNPPISSVEAPKKELNINEPTWKEVQEVVKKARSGSAPGPSGIPYKAYKKCPMLLRRMWRLFRRIWRKGTIPSCWKRAEGFFIPKEENSLTIEQFRTISLLSVEGKIFFSVLAKRMTSYMIENKYINTAIQKGGIPGFSGCLEHTGVLTQMIREAKSRNGNLTVVWLDLANAYGSIPHALIHTALDHYHIPQHIKGMITSYFGGIQVRFKAAHFTTRWQSLEKGIVTGCTISPILFVMGMNLLITAAAKEARGPKMESGIQQPSIRGYMDDLTVTTRTHVEARWVLTALDQMATWARLKFKPKKSRSMVIRNGKVTNKFRLYVQEEVIPSVEENPIKCLGKWFDNSLADRNNMVNTEKQTEEWLRSIEKSGLPGKFKAWLYQHGLLPRLTWLLTVYEAPMTSVEGMERKVNKYLRKWLGIPPSFTSVGLYIRSGQLQLPLTSVVEEFKVAKCRVVMTYRDSPDDQVRQAGIVTRSGRKWGAEATVTQTESMLKIRDIIGAPCTGRQGLGTSHFQQWSKAGTRERKVMIQEEVRSLEEEGRRSKAVALSPQGAWTKWDLPKRKITWAELWRLEPFRISFLLRSVYDTLPTPANLHRWGLSESPLCKLCGEKGTMAHILSGCKIALAQGRYRWRHDKVLMTLANTLEQERKKKRQKHPKATSIQFVREGEKPPTAVTAKSSLLQKAQSWEMKVDLGGRLKFPQFVQTSLRPDVVLWSEEAKKIMLIELTVPWEEGCEQAFERKSAKYQDLLHECREKGWQSWLFPVEVGCRGFPAQSVWRMFTAIGLGGRERKVAARRMGEAAEKASCWLWSRREEVSWKPGGGDGQ

SEQ ID NO: 9580 - protein, 996 aa, Fundulus heteroclitus
MSDNKDWNQLDQDLDKILEATLAGTAEQKVNTLTTLTYNLARERFGVEEKKMGGQSVHQPSRREREIKHMRREIKLLSKRFKYAPTEEREGIKDLTSQIRDRLSRLRRAEGLRKKRRGREKKRAQFIKDPFQFTRALLGEAKSGKMTSPREVVEAFLEETHNDSFRNQRLEGNPTISGVEAPEKELNINEPTWKEVQEVVKRARSGSAPGPSGIPYKVYKKCPMLLRRLWKLFRRIWGKGTIPSCWKRAEGCFVPKEENSSTIEQFRTISLLSVEGKIFFSVLAKRITYYMTENKYINTAIQKGGIPGFSGCLEHTGVLTQMIREAKTRNGNLTVVWLDLANAYGSIPHALIHTALDHYHIPKHIKGMITSYFSGIQMRFKAAHFTTRWQSLEKGTVTGCTISPILFVMGMNLLITAAAKEAKGPKMESGIQQPSIRGYMDDLTVTTRTHVEARWMLTALDQMATWARLKFKPKKSRSMVIRNGKVTNKFRLHVQGEVIPSVEENPIKCLGKWFDSSLADRHNIVNTEKQTEEWLRRIEKSGLPGKFKAWLYQYGLLPRLTWLLTVYEAPMTSVEGMERKVNKYLRKWLGIPPSFTSVGLYIRSGQLQLPLTSMVEEFKIAKCRAVMTYRDSHDDQVRHAGIVTRSGRKWGAEATVTQAESMLKIRDIIGAPCTGRQGLGTSHFQQWSKAGTRDRRVMIQEEIRSMEEEGRRSKAVALSSQGAWTKWDLPKCKITWAELWRLEPFRISFLLRSVYDTLPTPANLHRWGLSESPLCRLCGEKGTMAHILSGCKIALAQGRYRWRHDKVLMTLANTLEQERKKKRQKHPKVTSIQFVREGEKPPTAVTAKPSLLQKAQSWEMKVDLGGRLKFPQFVQTSLRPDVVLWSGEAKKIILIELTVPWEEGCEQAFERKSVKYQDLLNECREKGWQSWLFPVEVGCRGFPAQSVWRMFTAIGLGGRERKVAARRMGEAAEKASCWLWSRREEVSWKPGGGDGQ

SEQ ID NO: 9581 - protein, 961 aa, Percina caprodes
MKVNIKPAYQPSRREREIHCLRGEIKTLTKQFKRGPVDEREGIKDLTSQLRNRLCRLRRAERTLKKRKDRENKRSQFTKDPFQFTRTLLGEAKSGRLTSPRGDVEAFLRKTHNDASRNQALDANPSIKSTKTPEKELNISEPSWKEVQEAVKKARTGSAPGPSGIPYKVYKKCPMLLRKLWKLFRRIYRKGIIPSCWKKAEGCLVSKEENSSTIDQFRTISLLSVEGKIFFSVLAKRMTSYMTENGYINTAIQKGGIPGFSGCLEHTGVLSQMIREAKSSKGNLTVVWLDLANAYGSIPHVLIHAALDHYHIPQHIKGMITSYFRGIQLRFKTAHFTTQWQSLEKGIVTGCTISPILFVMGMNLLITAAEKEARGPRMESGIRQHAIRGYMDDLTVTTTTHVEARWVLTALDHMATWARMKFKPKKSRSMVIRNGKLTNRFKLHVQEEVIPSIEENPIKCLGRWYDNSLSDRNNIASMEKQLEEWLRRIEKSGLPGKFKAWLYQHGLLPRLMWLLTVYEVPMTCVEGMERKINKYLRKWLGIPPSFTAVGLYIRSGQLQLPLSSVVEEFKVAKCRVVMTYRDSQDEQVRHAGVITRSGRKWAADSSVAQAESMLRLRDVIGSPCTGRQGLGTSQFQQWRKTGKSDRRAMIQEEVRKLEEERRRSRAVELACQGAWTRWDLPERKVTWAELWKLEPFRISFLLRSVYDALPTPTNLHKWGMREDPLCRLCGERGTMAHILSGCKKALTQGRYRWRHDKVLMTLANTLEQERKKKCQTFRKTTSIQFIREGEKPPTTAKTRTSLLQKAQSWEMKVDLGGRLQFPQVVQTTLRPDVVLWSEGEKKVILIELTVPWEEGCEQAFERKSSKYQDLLHDCRGKGGRHGCSRSRLVVEDFRSVSVENAHSHWNNREGEKGSSSQDGRGSGKSLLLVMEQEGGVELEARRKMGSDLATTADPPSGGCCG

SEQ ID NO: 9582 - protein, 1154 aa, Echeneis naucrates
MRLATSLHSTRKRAPTQATETNTEQYPQSLPRGGEDEGLNRTDSMVTARNGLRTQRLLTQKTLTGEALEVKCHCGKICKNIRGLNIHRSRTACGKGGAQVQRTVVTPGETQVNSRQDQPHSTGDLSAPELPQDRRRDEPDANPVSQPHPARERIQWPKMSDNQEWNQLDQDLDKILEATRAGTAEQKVSTLTTITYNLARERFGVEEKKVESKSVHQPSRREREIKRMRGEIKALSRQFKKAPMEEREGLKDLTSQIRDRLRRLRRAEWLRKKNRDREKKRAQFIKDPFQFTRTLLGETKSGKLTSPREEVEAFLEETHNDIFRNQRLEGNPTISSVEAPEKELDTNDPTWKEVQEVVRKARTGSAPGPSGIPYKVYKKCPMLLRRMWKLFRRIWRKGAIPSCWKRAEGCFVPKEENSSTIEQFRTISLLSVEGKIFFSVLAKRMTSYMTDNKYINTAIQKGGILGFSGCLEHTGVLTQMIREAKTRNGNLTVVWLDLANAYGSIPHALIHAALDHYHIPQHIKGMITSYFGGIQMRFKAAHFTTRWQSLEKGIVTGCTISPILFVMGMNLLITAAAKEAKGPKMESGIQQPSIRGYMDDLTVTTRTHVEARWVLAALDHVATWARLKFKPKKSRSMVIRNGKLTNKFRLHVQEELIPSLEENPIKCLGKWFDKSLADHNNIVNMEKQTEEWLRRIEKSGLPGKFKAWLYQHGLLPRLTWSLTVYEAPMTSVEGMERKINKYLRKWLGIPPSFTSVGLYIRSGQLQLPLTSVVEEFKIAKCRVVMTYRDSHDDQIKHAGITTRSGRKWGAESAVAQAESMLKIRDIIGAPCIGRQGLGAAHFQQWSKAGTRDRRAMIQEEVRSLEEEGRRSKAVALSSQGAWTKWDVPKRKITWADLWRLEPFRISFLLRSVYDTLPTPANLHRWGLTDSPLCKLCGEKGTMAHILSGCKTALAQGRYRWRHDKVLMTLADTLEQERKKKRQKHLKATAIQFVREGGKPPTTVTAKPSLLQKAQSWEMKVDLGGRLKFPQFVQTSLRPDVVLWSEEAKKIILIELTVPWEEGCEQAFERKSAKYQDLLHQCREKGWQAWLFPVEVGCRGFPAQSVWRMFTAIGLGGRDRKVAARRMGEAAEKASCWLWSRREEVSWKPGGGDGQ

SEQ ID NO: 9583 - protein, 1134 aa, Cyprinodon tularosa
MNTEQYPQSLPRGGEDEGLNRTDSTVMARNGLWTQKLLTQKTLTGETLEVKCHCGKICKNLRGLKIHQSRTVCGKGGAQVQRTVVTLGETQENSSLDKPHSTGDLLAPELPQDLRRDEPHSNPVSQPHPARERIQWPKMSDNQEWNQLDQDLDKILEATLAGTAEQKVNTLTTLTYNLARERFGVEEKKVGSQSVQQPSRREREIKRMRREIKSLSKQFKNAPTEEREGIKDLISQIRDRLSRLRRAESLRKKRRDREKKRAQFIKDPFQFTRALLGEAKSGKLTSPREEVEAFLDETHSDSFRNQNLEGNPPISSVEAPKKELNINEPTWKEVQEVVKKARSGSAPGPSGIPYKAYKKCPMLLRRMWRLFRRIWRKGTIPSCWKRAEGFFIPKEENSLTIEQFRTISLLSVEGKIFFSVLAKRMTSYMIENKYINTAIQKGGIPGFSGCLEHTGVLTQMICEAKSRNGNLTVVWLDLANAYGSIPHALIHTALDHYHIPQHIKGMITSYFGGIQVRFKAAHFTTRWQSLEKGIVTGCTISPILFVMGMNLLITAAAKEAKGPKMESGIQQPSIRGYMDDLTVTTRTHVEARWVLTALDQMATWARLKFKPKKSRSMVIRNGKVTNKFRLYVQEEVIPSVEENPIKCLGKWFDNSLADRNNMVNTEKQTEEWLRSIEKSGLPGKFKAWLYQHGLLPRLTWLLTVYEAPMTSVEGMERKVNKYLRKWLGIPPSFTSVGLYIRSGQLQLPLTSVVEEFKVAKCRVVMTYRDSPDDQVRQAGIVTRSGRKWGAEATVTQTESMLKIRDIIGAPCTGRQGLGTSHFQQWSKAGTRERKVMIQEEVRSLEEEGRRSKAVALSSQGAWTKWDLPKRKITWAELWRLEPFRISFLLRSVYDTLPTPANLHRWGLSESPLCKLCGEKGTMAHILSGCKIALAQGRYRWRHDNLLMTLANTLEQERKKKRQKHPKATSIQFVREGEKPPTAVTAKSSLLQKAQSWEMKVDLGGRLKFPQFVQTSLRPDVVLWSEEAKKIMLIELTVPWEEGCEQAFERKSAKYQDLLHECREKGWQSWLFPVEVGCRGFPAQSVWRMFTAIGLGGRERKVAARRMGEAAEKASCWLWSRREEVSWKPGGGDGQ

SEQ ID NO: 9584 - protein, 1150 aa, Echeneis naucrates
MIILLPVSLFCLARFITCPHPNVLCVPRGGEDEGLNRTDSMVTARNGLRTQRLLTQKTLTGEALEVKCHCGKICKNIRGLNIHRSRTACGKGGAQVQRTVVTPGETQENSRQDQPHSTGDLSAPELPQDRRRDEPDANPVSQPHPARERIQWPKMSDNQEWNQLDQDLDKILEATRAGTAEQKVSTLTTITYNLARERFGVEEKKVESKSVHQPSRREREIKRMRGEIKSLSRQFKKAPMEEREGLKDLTSQIRDRLRRLRRAEWLRKKSRDREKKRAQFIKDPFQFTRTLLGETKSGKLTSPREEVEAFLEETHNDIFRNQRLEGNPTISSVEAPEKELDTNDPTWKEVQEVVRKARTGSAPGPSGIPYKVYKKCPMLLRRMWKLFRRIWRKGAIPSCWKRAEGCFVPKEENSSTIEQFRTISLLSVEGKIFFSVLAKRMTSYMTDNKYINTAIQKGGIPGFSGCLEHTGVLTQMIREAKTRNGNLTVVWLDLANAYGSIPHALIHAALDHYHIPQHIKGMITSYFGGIQMRFKAAHFTTRWQSLEKGIVTGCTISPILFVMGMNLLITAAAKEAKGPKMESGIQQPSIRGYMDDLTVTTRTHVEARWVLAALDHVATWARLKFKPKKSRSMVIRNGKLTNKFRLHVQEELIPSLEENPIKCLGKWFDKSLADHNNIVNMEKQTEEWLRRIEKSGLPGKFKAWLYQHGLLPRLTWSLTVYEAPMTSVEGMERKINKYLRKWLGIPPSFTSVGLYIRSGQLQLPLTSVVEEFKIAKCRVVMTYRDSHDDQIKHAGITTRSGRKWGAESAVAQAESMLKILDIIGAPCIGRQGLGAAHFQQWSKAGTRDRRAMIQEEVRSLEEEGRRSKAVALSSQGAWTKWDLPKRKITWADLWRLEPFHISFLLRSVYDTLPTPANLHRWGLTDSPLCKLCGEKGTMAHILSGCKTALAQGRYRWRHDKVLMTLADTLEQERKKKRQKHLKATAIQFVREGGKPPTTVTAKSSLLQKAQSWEMKVDLGGRLKFPQFVQTSLRPDVVLWSEEAKKIILIELTVPWEEGCEQAFERKSAKYQDLLHQCREKGWQAWLFPVEVGCRGFPAQSVWRMFTAIGLGGRDRKVAARRMGEAAEKASCWLWSRREEVSWKPGGGDGQ

SEQ ID NO: 9585 - protein, 927 aa, Echeneis naucrates
MRGEIKALSRQFKKAPMEEREGLKDLTSQIRDRLRRLRRAEWLRKKNRDREKKRAQFIKDPFQFTRTLLGETKSGKLTSPREEVEAFLEETHNDIFRNQRLEGNPTISSVEAPEKELDTNDPTWKEVQEVVRKARTGSAPGPSGIPYKVYKKCPMLLRRMWKLFRRIWRKGAIPSCWKRAEGCFVPKEENSSTIEQFRTISLLSVEGKIFFSVLAKRMTSYMTDNKYINTAIQKGGIPGFSGCLEHTGVLTQMIREAKTRNGNLTVVWLDLANAYGSIPHALIHAALDHYHIPQHIKGMITSYFGGIQMRFKAAHFTTRWQSLEKGIVTGCTISPILFVMGMNLLITAAAKEAKGPKMESGIQQPSIRGYMDDLTVTTRTHVEARWVLAALDHVATWARLKFKPKKSRSMVIRNGKLTNKFRLHVQEELIPSLEENPIKCLGKWFDKSLADHNNIVNMEKQTEEWLRRIEKSGLPGKFKAWLYQHGLLPRLTWSLTVYEAPMTSVEGMERKINKYLRKWLGIPPSFTSVGLYIRSGQLQLPLTSVVEEFKIAKCRVVMTYRDSHDDQIKHAGITTRSGRKWGAESAVAQAESMLKIRDIIGAPCIGRQGLGAAHFQQWSKAGTRDRRAMIQEEVRSLEEEGRRSKAVALSSQGAWTKWDVPKRKITWADLWRLEPFRISFLLRSVYDTLPTPANLHRWGLTDSPLCKLCGEKGTMAHILSGCKTALAQGRYRWRHDKVLMTLADTLEQERKKKRQKHLKATAIQFVREGGKPPTTVTAKPSLLQKAQSWEMKVDLGGRLKFPQFVQTSLRPDVVLWSEEAKKIILIELTVPWEEGCEQAFERKSAKYQDLLHQCREKGWQAWLFPVEVGCRGFPAQSVWRMFTAIGLGGRDRKVAARRMGEAAEKASCWLWSRREEVSWKPGGGDGQ

SEQ ID NO: 9586 - protein, 1044 aa, Cyprinodon tularosa
MQDSSLDKPHSTGGLLAPELPQDLRRGEPHSNPVSQPHPARERIQWPKMSDNQEWNQLDQDLDKILEATLAGTAEQKVNTLTTLTYNLARERFGVEEKKVGSQSVQQPSRRERKIKRMRREFKSLSKQFKNAPTEEREGIKDLTSQIRDRLSRLRRAESLRKKRRDREKRRAQFIKDPFQFTRALLGEAKSGKLTSPREEVEAFLEETHSDSFRNQNLEGNPPISSVEAPKKELNINEPTWKEVQEVVKKARSGSAPSPSGITYKAYKKCPMLLRRMWRLFRRIWRKGTIPSCWKRAEGFFIPKEENSLTIEQFRTISLLSVEGKIFFSVMAKRMTSYMIENKYINTAIQKGGIPGFSGCLEHTGVLTQMIREAKSRNGNLAVVWLDLANAYGFIPHALIHTALDHYHIPQHIKGMITSYFGGIQVRFKAAHFTTRWQSLEKGIVTGCTISPILFVMGMNLLITAAAKEAKGPKMESGIQQPSIRGYMDDLTVTTRTHVEARWVLTALDQMATWARLKFKPKTSRSMVIRNGKVTNKFRLYVQEEVIPSVEENPIKCLGKWFDNSLADQNNMVNTEKQTEEWLRSTEKSGLPGKFKAWLYQHGLLPRLTWLLTVYEAPMTSVEGMERKVNKYLRKWLGIPPSFTSVGLYIRSGQLQLPLTSVVEEFKVAKCRVVMTYRDSPDDQVRQAGIVTRSGRKWGAEATVTQTESMLKIRDIIGTPCTGRQGLGTSHFQQWSKAGTRERKVMIQEEVRSLEEEGRRSKAVALSSQGAWTKWDLPKRKITWAELWRLEPFHISFLLRSVYDTLPTPANLHRWGLCESPLCKLCGEKGTMAHILSGCKIALAQGRYRWRHDKVLMTLANTLEQERKKKRQKHPKATSIQFIREGEKPPTVVTAKSSLLQKAQSWEMKVELGGRLKFPQFVQTSLRPDVVLWSEEAKKIMLIELTVPWVEGCEQAFERKSGKYQDLLHECREKGWQSWLFPVVVSCRGFPAQSVWRMFTAIGLGGRERKVAARRMGEAAEKASCWLWSRREEVSWKPGGGDGQ

SEQ ID NO: 9587 - protein, 727 aa, Neogobius melanostomus
MIENGYVNTSIQKGGIPGFSGCLEHTGVLSQMIREARMKKGDLTVVWLDLTNAFGTIPHDLIRTALEHYHIPDHIRVMIITYLDGIKLRFKTRDYVTQWQHLGRGIVTGCTVSPILFVMGMNLLIQAGEKVTRGPMMDTGIRQPAIRGYMDDLTITTSSHVQARWILSKLEEMATWARMTFKPKKSRNLIIRKGNISFKYNLSIQDELIPSIKDNPIKYLGKWYDESLKDHNNVRTTEKQVEVWLKKIDKAGLPGKFKAWLYQHGLLPRLMWLLTVYTIPLSVVEGVERKINSHLRKWLGIPPSFTSVGLYIRSGQLQLPLSSLVEEFQVAKCRVALTFRDSKDSKVREAGITTRSGRKWEATASLARAEENLKLRDIIGAPCIGRQGLGMTHFQTWRKANVAERRSMLQAEIRALEEERRKARAVELGCQGAWTKWDLPKRKVTWSDLWRLEPFRISFLLRAVYDTLPSPANLHRWGLRDDPMCKLCGQRGTMAHILTGCKTALAQGRYRWRHDKVLTVLADILEQARTRKCHYKIKPSTCIAFVKEGAKLPGPSKSRASLLETAHPWELRVDLKRRLQFPDVVHTSLRPDAVLFSAAGKKIILVELTVPWEEGCEEAFERKSQRYSDLVQDCRDKGWQTWLYPVEVGCRGFPAQSVWKVLTAVGVRGSERKKAVRRLGEAAERASCWIWNRREELSWQSGGVSSGWPPLLTRQQESVMVQGRNTQ

SEQ ID NO: 9588 - protein, 931 aa, Salarias fasciatus
MSDSKEWVTYDEDLNRILEVTVAGTAERKLNMLTEIAYNLAKERCGAIERKISSKPVRQANRREREIQKLRKEIKSLNKRYKGSCAEEKEGIKEITSNLRDRLRRLRRVERTRKLRRERDQRRAQFIKDHFNFTRSLLEEAKSGILISPKEEVEAYLKETHSDPNSNLPLEENINIGLAQPPNTMLNTIEPTWKEIQEVVKKARAASAPGPSGLPYKVYKKCPKLLRRLWKLLRRIWKKGVVLTFWQKAEGCFVSKEEASVSISQFRTISLLSTECKIFFSVVAKRMSAYMIKNGYVNTSVQNGGIPGFSRCLEHTGVLSQMIREARRKKGDLTVVWMDLTNAFGTIPHFLIRTALTHYNIPDHIRSMFNTYLNGIKLRFKTKDYITQWQHLGRGIVTGCTVSPILFVMGMNLLIQAGEKETRGPLMDSGIRQPPIRGYMDDLTITTASHVQARWVLSKLEEMATWARMTYKPKKSRCLIISKGNISFKYSLSIQGETIPSIKNNPIKYLGKWYDESLTDHNNVRTTEKQVSTWLEKIEKAGLPGKFKAWLYQHGLLPRLMWLLTVYEIPLSVVEGVEHKINSHLRKWLGIPPSFTSVGLYIRSGQLQLPFSSLVEEFQVAKCRVALTFRDSKDSSVREAGVTTRLGRKWAASASLAQAEGSLRLKDIIGSPCIGRQGLGMTLFQTWGSANTTERRGMLQEEVRNLAEEQRKARILELGSQGAWTKWDLPKRKVTWSDLWRLEAYRISFLLRSVYDTLPSPVNLHEWGLKDDPSCKLCGQRGTMAHILTGYTTALAQDRYRWRHDKVLVMLADILEQERTRKRPCKIKPFPGIEFVKEGAKLPGPRKPRAGILQATQAWELRADLKRRLQFPDFVHTTLRPDAVLFSTVGKKIILVELTVPWEEGCEEASERKSDRYSDLVQDCKDKGWQM

SEQ ID NO: 9589 - protein, 1067 aa, Neogobius melanostomus
MLIHQAKTKCGKKEMQVQRTDVESGETQESPNQEAPHSVGDFSAPQSPVPKESTSDPLPQSEPMKERIRWPKMSDSKEWVTFDEDLNRILEVTAVGTAERKLNTLAEITYNLARERFGAIEHRANAKVVRQPNRREREIHNLRKEIKGLNKRYRESCAEEKEGIKEITSSLRDRLRRLRRVERTRKLRREREKRRAQFTKDPFNFTKSLLGEARSGSLSSPKEEVEAFLKETHRDPDSGIPLKENSEVGLAPPPTTEFTTNEPTWKEIQDVVKKARAASAPGPSGLPYKVYKKCPKLLRRLWKLLKRIWKKGAVPTSWQKAEGCFVPKEEDSANIGQFRTISLLSTECKIFFSVVAKRLSAYMIENGYVNTSIQKGGIPGFSGCLEHTGVLSQMIREARMKKGDLTVVWLDLTNAFGTIPHDLIRTALEHYHIPDHIRVMIITYLDGIKLRFKTRDYVTQWQHLGRGIVTGCTVSPILFVMGMNLLIQAGEKVTRGPMMDTGIRQPAIRGYMDDLTITTSSHVQARWILSKLEEMATWARMTFKPKKSRNLIIRKGNISFKYNLSIQDELIPSIKDNPIKYLGKWYDESLKDHNNVRTTEKQVEVWLKKIDKAGLPGKFKAWLYQHGLLPRLMWLLTVYTIPLSVVEGVERKINSHLRKWLGIPPSFTSVGLYIRSGQLQLPLSSLVEEFQVAKCRVALTFRDSKDSKVREAGITTRSGRKWEATASLARAEENLKLRDIIGAPCIGRQGLGMTHFQTWRKANVAERRSMLQAEIRALEEERRKARAVELGCQGAWTKWDLPKRKVTWSDLWRLEPFRISFLLRAVYDTLPSPANLHRWGLRDDPMCKLCGQRGTMAHILTGCKTALAQGRYRWRHDKVLTVLADILEQARTRKCHYKIKPSTCIAFVKEGAKLPGPSKSRASLLETAHPWELRVDLKRRLQFPDVVHTSLRPDAVLFSAAGKKIILVELTVPWEEGCEEAFERKSQRYSDLVQDCRDKGWQTWLYPVEVGCRGFPAQSVWKVLTAVGVRGSERKKAVRRLGEAAERASCWIWNRREELSWQSGGSE

SEQ ID NO: 9590 - protein, 1163 aa, Corydoras sp.
MYSTRKRAPNQATDNHNEQYPQSLPRGGKDERLIRMDTTVQTRTETRLTRRLTQTTLTGMAPEVRCQCGKICKNSRGLKIHQAKTKCGEEATSLQRRVATPRQTQESTSQEAPHSTGDLLATALPLNHTVVNSDASRQPQPAKDRVKWPKMDSNKEWQQLDEDLCKILETALAGAVEQKIATMTAITYNVARERFGVEERKTSTPNARQPNRREKEMQTLSRQFKNATEGEKEGIRDLTSGLRERLRRLRRAEQIRKQRKKKGVKRAQFIKDPYRFAKTLLGEARSGTLSSSKEEVEEALRSTYCDPRRYDHLGSHPKIIRVSPPSEPLVTREPTWKEVEEVVKKARTASAPGPSGLPYKVYKKCPLLLRRLWKLLRTVWAKGKIPTTWRVAEGCFAPKERDSSVIGQFRTISLLSVEAKIFFSVLARRITTYMTANGYLNTSIQKGGIPGFSGCLEHTTILSHLIQEATGSKGNLTVAWLDLANAYGSMPHSLISKAMEQYHIPDKIRQMINSYLGAFKLRFRTAKFTTTWQPLEKGIVTGCTVSPILFIMGMNLLITAAAAEAKGPVTVAGSRQPPLRGFMDDLTITTTTHVQARWVLKTLGALASWARMAFKPRKSRSMVIRRGKLTEAFELYVQGERIPTIRENPIKCLGKWYDDTLSDRNNISDTVNQADEWLRRVDKSGLPGKFKCWIYQHGLLPRLMWLLTVYQIPMTAVEGVERKVNKHLRRWLGIPPSFTAVGLYIRSGQLQLPFSSVVEEFKVAKCRVAMMLRDSEDEQVRNAGVITRTGRKWAADIAVRQAESSLELRDVIGNICTGRQGLGTSHFTQWRKASVRQRREMVQAEVRYQEEETRRTKAVGLVTQGTWTRWDLPHRRVTWTELWRLEPFRVSFLLRSVYDTLPSPANLARWGLREDPLCKLCGKRGTLAHILAGCQIALAQGRYRWRHDQVLRVMADIFEQARRRPQLTKPQVPLLQFVRAGEQVSTVKRARNNILQGAQGWEMSVDLGKKLTFPPIVQTTLRPDIVIWSEQAKKIILVELTVPWEEGCEEAHEKKSLKYQDLIMECKERGWQAWLFPVEVGCRGFPAQSMWQVFTTLGISGKERKTAVRRIGEAAERASCWLWFKREPHAGCGLRGRRGVGGLELMGSDLATTADPPAGGCSG

SEQ ID NO: 9591 - protein, 1117 aa, Cyprinodon tularosa
MVTDIPRTDTSVQTRTDTRLTRRLTQTTLTRTAPEVRCQCGKICKNTRGLKIHQAKTKCGKEAILLQRRVETPRQTQENPSQEAPHSTGDLLATALPLNHTVVNSDASQQPQPAKDRIKWPKMNSNKEWQQLDEDLCKILETALVGAAEQKMATMTAIIYNVAKERFGVEDRKTSTPNVRQPNRREKEMQSLRREIKALSRQFKNATEGEKEGIRDLTSGLREQLRRLRRAEQTRKQRKKKGAKRAQFIKDPYRFTKTLLGEARSGSLSSSKEEVEEALRLTHCDPQRYELLSSHPKIIKVPPPSEPLVTREPTWKEVEEVVKKARTASAPGPSGVPYKVYKKCPLLLRRLWKLFRTIWAKGSIPTTWRVSEGCFVPKEKDSSEIGQFRAISLLSVEAKIFFSVLARRITNYMTTNGYINTSIQKGGIPGFSGCLEHTTILSHLIQEARGSKGNLTVVWLDLANAYGSMPHSLINKAMEQYHIPVKIRQMINSYLGSFKLRFQTAKFTTTWQLLEKGIVTGCTVSPILFIMGMNLLITAAAAEAKGPVTAAGSRQPPLRGFMDDLTITTTTHVQARWILKTLGALASWARMAFKPRKSRSMVIRRGRLTEAFELHVQGEQIPTIRENPIKCLGKWYDDTLSDRNNISDTANQADEWLRRIDKSGLPGKFKSWIYQHGLLPRLMWLLTVYQIPVTAVEGVERRVNKHLRRWLGIPPSFTAVGLYIRSGQLQLPFSSVVEEFKVAKCKVAMMLRDSKDEQVSNAGVTTRTGRKWAADTAVRQAESSLELRDIIGSVCIGRQGLGTSHFTRWRKASVQQKREMVQVEVRHQEEEKRRAKAVELATQGTWTRWDLPNRRVTWTELWRLEPFRVSFLLRSVYDTLPSPANLARWGLREDPLCKLCRKKGTLAHILAGCQIALAQGRYRWRHDQVLRVMADIFEQARRRPQPIKLQIPSMQFIRAGEKPLSNKRARTNILQGAQGWEMKVDLGKKLTFPPIVQTTLRPDIVIWSEQAKKIILVELTVPWEEGCEEAHERKNLKYQDLIMDCKDKGWQAWLFPVEVGCRGFPAQSMWSVLTALGISGKERKTAVRRIGEAAERASCWLWFKREEGGWRPGDDGQ

SEQ ID NO: 9592 - protein, 1145 aa, Cyprinodon tularosa
MYSTRKRAPNQATNDHNEQYPQSLPRGGEDERLARTDTSVQTRTDTRLTRRLTQTTLTRTAPEVRCQCGKICKNTRGLKIHQAKTKCGKEAILLQRRVETPRQTQENPSQEAPHSTGDLLATALPLNHTVVNSDASQQPQPAKDRIKWPKMNSNKEWQQLDEDLCKILETALVGAAEQKMATMTAIIYNVAKERFGVEDRKTSTPNVRQPNRREKEMQSLRREIKALSRQFKNATEGEKEGIRDLTSGLREQLRRLRRAEQTRKQRKKKGAKRAQFIKDPYRFTKTLLGEARSGSLSSSKEEVEEALRLTHCDPQRYELLSSHPKIIKVPPPSEPLVTREPTWKEVEEVVKKARTASAPGPSGVPYKVYKKCPLLLRRLWKLFRTIWAKGSIPTTWRVSEGCFVPKEKDSSEIGQFRAISLLSVEAKIFFSVLARRITNYMTTNGYINTSIQKGGIPGFSGCLEHTTILSHLIQEARGSKGNLTVVWLDLANAYGSMPHSLINKAMEQYHIPVKIRQMINSYLGSFKLRFQTAKFTTTWQLLEKGIVTGCTVSPILFIMGMNLLITAAAAEAKGPVTAAGSRQPPLRGFMDDLTITTTTHVQARWILKTLGALASWARMAFKPRKSRSMVIRRGRLTEAFELHVQGEQIPTIRENPIKCLGKWYDDTLSDRNNISDTANQADEWLRRIDKSGLPGKFKSWIYQHGLLPRLMWLLTVYQIPVTAVEGVERRVNKHLRRWLGIPPSFTAVGLYIRSGQLQLPFSSVVEEFKVAKCKVAMMLRDSKDEQVSNAGVTTRTGRKWAADTAVRQAESSLELRDIIGSVCIGRQGLGTSHFTRWRKASVQQKREMVQVEVRHQEEEKRRAKAVELATQGTWTRWDLPNRRVTWTELWRLEPFRVSFLLRSVYDTLPSPANLARWGLREDPLCKLCRKKGTLAHILAGCQIALAQGRYRWRHDQVLRVMADIFEQARRRPQPIKLQIPSMQFIRAGEKPLSNKRARTNILQGAQGWEMKVDLGKKLTFPPIVQTTLRPDIVIWSEQAKKIILVELTVPWEEGCEEAHERKNLKYQDLIMDCKDKGWQAWLFPVEVGCRGFPAQSMWSVLTALGISGKERKTAVRRIGEAAERASCWLWFKREEGGWRPGDDGQ

SEQ ID NO: 9593 - protein, 1145 aa, Cyprinodon tularosa
MYSTRKRAPNQATNDHNEQYPQSLPRGGEDERLARTDTSVQTRTDTRLTRRLTQTTLTRTAPEVRCQCGKICKNTRGLKIHQAKTKCGKEAILLQRRVETPRQTQENPSQEAPHSTGDLLATALPLNHTVVNSDASQQPQPAKDRIKWPKMNSNKEWQQLDEDLCKILETALVGAAEQKMATMTAIIYNVAKERFGVEDRKTSTPNVRQPNRREKEMQSLRREIKALSRQFKNATEGEKEGIRDLTSGLREQLRRLRRAEQTRKQRKKKGAKRAQFIKDPYRFTKTLLGEARSGSLSSSKEEVEEALRLTHCDPQRYELLSSHPKIIKVPPPSEPLVTREPTWKEVEEVVKKARTASAPGPSGVPYKVYKKCPLLLRRLWKLFRTIWAKGSIPTTWRVSEGCFVPKEKDSSEIGQFRAISLLSVEAKIFFSVLARRITNYMTTNGYINTSIQKGGIPGFSGCLEHTTILSHLIQEARGSKGNLTVVWLDLANAYGSMPHSLINKAMEQYHIPVKIRQMINSYLGSFKLRFQTAKFTTTWQLLEKGIVTGCTVSPILFIMGMNLLITAAAAEAKGPVTAAGSRQPPLRGFMDDLTITTTTHVQARWILKTLGALASWARMAFKPRKSRSMVIRRGRLTEAFELHVQGEQIPTIRENPIKCLGKWYDDTLSDRNNISDTANQADEWLRRIDKSGLPGKFKSWIYRHGLLPRLMWLLTVYQIPVTAVEGVERRVNKHLRRWLGIPPSFTAVGLYIRSGQLQLPFSSVVEEFKVAKCKVAMMLRDSKDEQVSNAGVTTRTGRKWAADTAVRQAESSLELRDIIGSVCIGRQGLGTSHFTRWRKASVQQKREMVQVEVRHQEEEKRRAKAVELATQGTWTRWDLPNRRVTWTELWRLEPFRVSFLLRSVYDTLPSPANLARWGLREDPLCKLCRKKGTLAHILAGCQIALAQGRYRWRHDQVLRVMADIFEQARRRPQPIKLQIPSMQFIRAGEKPLSNKRARTNILQGAQGWEMKVDLGKKLTFPPIVQTTLRPDIVIWSEQAKKIILVELTVPWEEGCEEAHERKNLKYQDLIMDCKDKGWQAWLFPVEVGCRGFPAQSMWSVLTALGISGKERKTAVRRIGEAAERASCWLWFKREEGGWRPGDDGQ

SEQ ID NO: 9594 - protein, 995 aa, Cyprinodon tularosa
MNSNKEWQQLDEDLCKILETALVGAAEQKMATMTAIIYNVAKERFGVEDRKTSTPNVRQPNRREKEMQSLRREIKALSRQFKNATEGEKEGIRDLTSGLREQLRRLRRAEQTRKQRKKKGAKRAQFIKDPYRFTKTLLGEARSGSLSSSKEEVEEALRLTHCDPQRYELLSSHPKIIKVPLPSEPLVTREPTWKEVEEVVKKARTASAPGPSGVPYKVYKKCPLLLRRLWKLFRTIWAKGSIPTTWRVSEGCFVPKEKDSSEIGQFRAISLLSVEAKIFFSVLARRITNYMTTNGYINTSIQKGGIPGFSGCLEHTTILSHLIQEARGSKGNLTVVWLDLANAYGSMPHSLINKAMEQYHIPVKIRQMINSYLGSFKLRFQTAKFTTTWQLLEKGIVTGCTVSPILFIMGMNLLITAAAAEAKGPVTAAGSRQPPLRGFMDDLTITTTTHVQARWILKTLGALASWARMAFKPRKSRSMVIRRGRLTEAFELHVQGEQIPTIRENPIKCLGKWYDDTLSDRNNISDTANQADEWLRRIDKSGLPGKFKSWIYQHGLLPRLMWLLTVYQIPVTAVEGVERRVNKHLRRWLGIPPSFTAVGLYIRSGQLQLPFSSVVEEFKVAKCKVAMMLRDSKDEQVSNAGVTTRTGRKWAADTAVRQAESSLELRDIIGSVCIGRQGLGTSHFTRWRKASVQQKREMVQVEVRHQEEEKRRAKAVELATQGTWTRWDLPNRRVTWTELWRLEPFRVSFLLRSVYDTLPSPANLARWGLREDPLCKLCRKKGTLAHILAGCQIALAQGRYRWRHDQVLRVMADIFEQARRRPQPIKLQIPSMQFIRAGEKPLSNKRARTNILQGAQGWEMKVDLGKKLTFPPIVQTTLRPDIVIWSEQAKKIILVELTVPWEEGCEEAHERKNLKYQDLIMDCKDKGWQAWLFPVEVGCRGFPAQSMWSVLTALGISGKERKTAVRRIGEAAERASCWLWFKREEGGWRPGDDGQ

SEQ ID NO: 9595 - protein, 995 aa, Cyprinodon tularosa
MNSNKEWQQLDEDLCKILETALVGAAEQKMATMTAIIYNVAKERFGVEDRKTSTPNVRQPNRREKEMQSLRREIKALSRQFKNATEGEKEGIRDLTSGLREQLRRLRRAEQTRKQRKKKGAKRAQFIKDPYRFTKTLLGEARSGSLSSSKEEVEEALRLTHCDPQRYELLSSHPKIIKVPPPSEPLVTREPTWKEVEEVVKKARTASAPGPSGVPYKVYKKCPLLLRRLWKLFRTIWAKGSIPTTWRVSEGCFVPKEKDSSEIGQFRAISLLSVEAKIFFSVLARRITNYMTTNGYINTSIQKGGIPGFSGCLEHTTILSHLIQEARGSKGNLTVVWLDLANAYGSMPHSLINKAMEQYHIPVKIRQMINSYLGSFKLRFQTAKFTTTWQLLEKGIVTGCTVSPILFIMGMNLLITAAAAEAKGPVTAAGSRQPPLRGFMDDLTITTTTHVQARWILKTLGALASWARMAFKPRKSRSMVIRRGRLTEAFELHVQGEQIPTIRENPIKCLGKWYDDTLSDRNNISDTANQADEWLRRIDKSGLPGKFKSWIYQHGLLPRLMWLLTVYQIPVTAVEGVERRVNKHLRRWLGIPPSFTAVGLYIRSGQLQLPFSSVVEEFKVAKCKVAMMLRDSKDEQVSNAGVTTRTGRKWAADTAVRQAESSLELRDIIGSVCIGRQGLGTSHFTRWRKASVQQKREMVQVEVRHQEEEKRRAKAVELATQGTWTRWDLPNRRVTWTELWRLEPFRVSFLLRSVYDTLPSPANLARWGLREDPLCKLCRKKGTLAHILAGCQIALAQGRYRWRHDQVLRVMADIFEQARRRPQPIKLQIPSMQFIRAGEKPLSNKRARTNILQGAQGWEMKVDLGKKLTFPPIVQTTLRPDIVIWSEQAKKIILVELTVPWEEGCEEAHERKNLKYQDLIMDCKDKGWQAWLFPVEVGCRGFPAQSMWSVLTALGISGKERKTAVRRIGEAAERASCWLWFKREEGGWRPGDDGQ

SEQ ID NO: 9596 - protein, 1145 aa, Cyprinodon tularosa
MYSTRKRAPKQATNDHNEQYPQSLPRGGEDERLARTDTSVQTRTDTRLTRRLTQTTLTGTAPEVQCQCGKICKNTRGLKIHQAKTKCGKEAILLQRRVETPRQTQENPSQEAPHSTGDLLATALPLNHTVVNSDASQQPQPAKDRIKWPKMNSNKEWQQLDEDLCKILETALVGAAEQKMATMTAIIYNVAKERFGVEDRKTSTPNVRQPNRREKEMQSLRREIKALSRQFKNATEGEKEGIRDLTSGLREQLRRLRRAEQTRKQRKKKGAKRAQFIKDPYRFTKTLLGEARSGSLSSSKEEVEEALRLTHCDPQRYELLSSHPKIIKVPLPSEPLVTREPTWKEVEEVVKKARTASAPGPSGVPYKVYKKCPLLLRRLWKLFRTIWAKGSIPTTWRVSEGCFVPKEKDSSEIGQFRAISLLSVEAKIFFSVLARRITNYMTTNGYINTSIQKGGIPGFSGCLEHTTILSHLIQEARGSKGNLTVVWLDLANAYGSMPHSLINKAMEQYHIPVKIRQMINRYLGSFKLRFQTAKFTTTWQLLEKGIVTGCTVSPILFIMGMNLLITAAAAEAKGPVTAAGSRQPPLRGFMDDLTITTTTHVQARWILKTLGALASWARMAFKPRKSRSMVIRRGRLTEAFELHVQGEQIPTIRENPIKCLGKWYDDTLSDRNNISDTANQADEWLRRIDKSGLPGKFKSWIYQHGLLPRLMWLLTVYQIPVTAVEGVERRVNKHLRRWLGIPPSFTAVGLYIRSGQLQLPFSSVVEEFKVAKCKVAMMLRDSKDEQVSNAGVTTRTGRKWAADTAVRQAESSLELRDIIGSVCIGRQGLGTSHFTRWRKASVQQKREMVQVEVRHQEEEKRRAKAVELATQGTWTRWDLPNRRVTWTELWRLEPFRVSFLLRSVYDTLPSPANLARWGLREDPLCKLCRKKGTLAHILAGCQIALAQGRYRWRHDQVLRVMADIFEQARRRPQPIKLQIPSMQFIRAGEKPLSNKRARTNILQGAQGWEMKVDLGKKLTFPPIVQTTLRPDIVIWSEQAKKIILVELTVPWEEGCEEAHERKNLKYQDLIMDCKDKGWQAWLFPVEVGCRGFPAQSMWSVLTALGISGKERKTAVRRIGEAAERASCWLWFKREEGGWRPGDDGQ

SEQ ID NO: 9597 - protein, 960 aa, Cyprinodon brontotheroides
MTAIIYNVAKERFGVEDRKTSTPNVRQPNRREKEMQSLRREIKALSRQFKNATEGEKEGIRDLTSGLREQLRRLRRAEQTRKQRKKKGAKRAQFIKDPYRFTKTLLGEARSGSLSSSKEEVEEALRLTHCDPQRYELLSSHPKIIKVPPPSEPLVTRKPTWKEVVKKARTASAPGPSGVPYKVYKKCPLLLRRLWKLFRTIWAKGSIPTTWRVSEGCFVPKEKDSSEIGQFRAISLLSVEAKIFFSVLARRITNYMTTNGYINTSIQKGGIPGFSGCLEHTTILSHLIQEARGSKGNLTVVWLDLANAYGSMPHSLINKAMEQYHIPVKMRQMINSYLGSFKLRFQTAKFTTTWQLLEKGIVTGCTVSPILFIMGMNLLITAAAAEAKGPVTAAGSRQPPLRGFMDDLTITTTTHVQARWILKTLGALASWARMAFKPRKSRSMVIRRGRLTEAFELHVQGEQIPTIRENPIKCLGKWYDDTLSDRNNISDTANQADEWLRRIDKSGLPGKFKSWIYQHGLLPRLMWLLTVYQIPVTAVEGVERRVNKHLRRWLGIPPSFTAVGLYIRSGQLQLPFSSVVEEFKVAKCKVAMMLRDSKDEQVSNAGVTTRTGRKWAADTAVRQAESSLELRDIIGSVCIGRQGLGTSHFTRWRKASVQQKREMVQVEVRHQEEEKRRAKAVELATQGTWTRWDLPNRRVTWTELWRLEPFRVSFLLRSVYDTLPSPANLARWGLREDPLCKLCRKKGTLAHILAGCQIALAQGRYRWRHDQVLRVMADIFEQARRRPQPIKLQIPSMQFIRAGEKPLSNKRARTNILQGAQGWEMKVDLGKKLTFPPIVQTTLRPDIVIWSEQAKKIILVELTVPWEEGCEEAHERKNLKYQDLIMDCKDKGWQAWLFPVEVGCRGFPAQSMWSVLTALGISGKERKTAVRRIGEAAERASCWLWFKREEGGWRPGDDGQ

SEQ ID NO: 9598 - protein, 995 aa, Cyprinodon brontotheroides
MNSNKEWQQLDEDLCKILEAALVGAAEQKMATMTAIIYNVAKERFGVEDRKTSTPNVRQPNRREKEMQSLRREIKALSRQFKNATEGEKEGIRDLTSGLREQLRRLRRAEQTRKQRKKKGAKRAQFIKDPYRFTKTLLGEARSGSLSSSKEEVEEALRLTHCDPQRYELLSSHPKIIKVPPPSEPLVTREPTWKEVEEVVKKARTASAPGPSGVPYKVYKKCPLLLRRLWKLFRTIWAKGSIPTTWRVSEGCFVPKEKDSSEIGQFRAISLLSVEAKIFFSVLARRITNYMTTNGYINTSIQKGGIPGFSGCLEHTTILSHLIQEARGSKGNLTVVWLDLANAYGSMPHSLINKAMEQYHIPVKIRQMINSYLGSFKLRFQTAKFTTTWQLLEKGIVTGCTVSPILFIMGMNLLITAAAAEAKGPVTAAGSRQPPLRGFMDDLTITTTTHVQARWILKTLGALASWARMAFKPRKSRSMVIRRGRLTEAFELHVQGEQIPTIRENPIKCLGKWYDDTLSDRNNISDTANQADEWLRRIDKSGLPGKFKSWIYQHGLLPRLMWLLTVYQIPVTAVEGVERRVNKHLRRWLGIPPSFTAVGLYIRSGQLQLPFSSVVEEFKVAKCKVAMMLRDSKDEQVSNAGVTTRTGRKWAADTAVRQAESSLELRDIIGSVCIGRQGLGTSHFTRWRKASVQQKREMVQVEVRHQEEEKRRAKAVELATQGTWTRWDLPNRRVTWTELWRLEPFRVSFLLRSVYDTLPSPANLARWGLREDPLCKLCRKKGTLAHILAGCQIALAQGRYRWRHDQVLRVMADIFEQARRRPQPIKLQIPSMQFIRAGEKPLSNKRARTNILQGAQGWEMKVDLGKKLTFPPIVQTTLRPDIVIWSEQAKKIILVELTVPWEEGCEEAHERKSLKYQDLIMDCKDKGWQAWLFPVEVGCRGFPAQSMWSVLTALGISGKERKTAVCRIGEAAERASCWLWFKREEGGWRPGDDGQ

SEQ ID NO: 9599 - protein, 995 aa, Cyprinodon tularosa
MNSNKEWQQLDEDLCKILETALVGAAEQKMATMTAIIYNVAKERFGVEDRKTSTPNVRQPNRREKEMQSLWREIKALSRQFKNATEGEKEGIREITSGLREQLRRLRRAEQTQKQRKKKGAKRAQFIKDPYRFTKTLLGEARSGSLSSSKEEVEEALRLTHCDPQRYELLSSHPKIIKVPPPSEPLVTREPTWKEVEEVVKKARTASAPGPSGVPYKVYKKCPLLLRRLWKLFRTIWAKGSIPTTWRVSEGCFVPKEKDSSEIGQFRAISLLSVEAKIFFSVLARRITNYMTTNGYINTSIQKGGIPGFSGCLEHTTILSHLIQEARGSKGNLTVVWLDLANAYGSMPHSLINKAMEQYHIPVKIRQMINSYLGSFKLRFQTAKFTTTWQLLEKGIVTGCTVSPILFIMGMNLLITAAAAEAKGPVTAAGSRQPPLRGFMDDLTITTTTHVQARWILKTLGALASWARMAFKPRKSRSIVIRRGRLTEAFELHVQGEQIPTIRENPIKCLGKWYDDTLSDRNNISDTANQADEWLRRIDKSGLPGKFKSWIYQHGLLPRLMWLLTVYQIPVTAVEGVERRVNKHLRRWLGIPPSFTAVGLYIRSGQLQLPFSSVVEEFKVAKCKVAMMLRDSKDEQVSNAGVTTRTGRKWAADTAVRQAESSLELRDIIGSVCIGRQGLGTSHFTRWRKASVQQKREMVQVEVRHQEEEKRRAKAVELATQGTWTRWDLPNRRVTWTELWRLEPFRVSFLLRSVYDTLPSPANLARWGLREDPLCKLCRKKGTLAHILAGCQIALAQGRYRWRHDQVLRVMADIFEQARRRPQPIKLQIPSMQFIRAGEKPLSNKRARTNILQGAQGWEMKVDLGKKLTFPPIVQTTLRPDIVIWSEQAKKIILVELTVPWEEGCEEAHERKNLKYQDLIMDCKDKGWQAWLFPVEVGCRGFPAQSMWSVLTALGISGKERKTAVRRIGEAAERASCWLWFKREEGGWRPGDDGQ

SEQ ID NO: 9600 - protein, 1086 aa, Corydoras sp.
MAPEVRCQCGKICKNSRGLKIHQAKTKCGEEATSLQRRVATPRQTQESTSQEAPHSTGDLLATALPLNHTVVNSDASRQPQPAKDRVKWPKMDSNKEWQQLDEDLCKNLETALAGAVEQKIATMTAITYNVARERFGVEERKTSTPNARQPNRREKEMQSLRREIKTLSRQFKNATEGEKEGIRDLTSGLREQLRRLRRAEQIRKQRKKKGVKRAQFIKDPYRFAKTLLGEARSGTLSSSKEEVEEALRSTYCDPRRYEHLGSHPKIIRVSPPSEPLVTREPTWKEVEEVVKKARTASAPGPSGLPYKVYKKCPLLLRRLWKLLRTVWAKGKIPTTWRVAEGCFAPKERDSSVIGQFRTISLLSVEAKIFFSVLARRITTYMTANGYLNTSIQKGGIPGFSGCLEHTTILSHVIQEATGSKGNLTVARLDLANAYGSMPHSLISKAMEQYHIPDKIRQMINSYLGAFKLRFRTAKFTTTWQPLEKGIATGCTVSPILFIMGMNLLITAAAAEAKGPVTAAGSRQPPLRGFVDDLTITTTTHVQARWVLKTLGALASWARMAFKPRKSRSMVIRRGKLTEAFELYVQGERIPTIRENPIKCLGKWYDDTLSDRNNISDTVNQADEWLRRVDKSGLPGKFKCWIYQHGLLPRLMWLLTVYQIPMTAVEGVERKVNKHLRRWLGIPPSFTAVGLYIRSGQLQLPFSSVVEEFKVAKCRVAMMLRDSEDEQVRNAGVITRTGRKWAADIAVRQAESSLELRDVIGNICTGRQGLGTSHFTQWRKASVQQRREMVQAEVRYQEEETRRTKAVGLVTQGTWTRWDLPHRRVTWTELWRLEPFRVSFLLRSVYDTLPSPANLARWGLREDPLCKLCGKRGTLAHILAGCQIALAQRRYRWWHDQVLRVMADIFEQARRRPQLTKPQVPLLQFVRAGEQVSTVKRARNNILQGAQGWEMSVDLGKKLTFPPIVQTTLRPDIVIWSEQAKKIILVELTVPWEEGCEEAHEKKSLKYQDLIMECKERGWQAWLFPVEVGCRGFPAQSMWQVFTTLGISGKERKTAVRRIGEAAERASCWLWFKREEGGWRPGADGQ

SEQ ID NO: 9601 - protein, 1134 aa, Sphaeramia orbicularis
MKQYPQGRPRGGENERLSGTDTTVMAAITDSRITRRLTQTTLTGKALEALCHCGKLCKNTRGLKIHQGRTKCGKEGSQMQRTAVAPGETKESSRQEEPHSPGDLSAPVSPQDLRKNSSNTSPESQTHPVKERIKWPKMSDTKEWNQLDQDLDKMLEATLAGTVEQKVSTLSTITYNMARERFGLEDKKMNIKAAYQPSRREREIHHLREEIKTLNKQFKRSPADEREGIKNLTIQHRERLCKLRRAESIRKRRKDRENKRAQFIKDPFRFTRTLLGEAKSGRLTSPREDVEAFLRETHNDISRNQALDANPNIDSIDMPGKELNISEPSWKEVQEVVKKARTGSAPGPSGIPYKVYKKCPMLLRRLWKLFQRIWKKGIIPSSWKKAEGCFVPKNEKSSAIDQFRAISLLSVECKIFFLVLAKRMTSYMTENEYIDTTIQKGGVPGVSGCLEHTGVLSQMIREAKANKGDLTVVWLDLANAYGSVPHALIHAALDHYRIPQHIKGMITSYLGGIQLRFKTTHFTTQWQNLEKGIITGCTISPILFIMGMNLLITAAGKEARGPKMQSGIRQPPIRGYMDDLTVTTTTHVEARWVLTVLDRMATWARMKFKPKKSRCMVIRKGKVTNRVTLHVQGEVIPSIRENPIKCLGKWFDDSLTDRKNISSTEKQAEEWLRRIEKSGLPGKFKAWLYQHGLLPRLMWLLTVYEVPMTSVEGVEKKINKYLRRWLGIPPSFAAVGLYIRSGQLQLPLSSVVEEFKVAKCRVIMTYRDSQDEQVRHAGILTRSGRKWAADSSVAQAESMLKLRDIIGTPCTGRQGLGTSHVQHWGKAGPKARRAMIQEEVRNWEEEGRRARAVELASQGVWTKWDLPKRKITWGDLWRLEPFRISFMLRSVYDTLPTPTNLHKWGLKEDPLCRLCGERGTMAHILSGCKTALAQGRYRWRHDKVLMTLANTLEQERRKKRQPHGTAMQPIKFVKEGQKPPATVTTKVNLLQKAQSWEMKVDLGGRLQFPQVVQTALRPDVVLWSEEAEKIILIELTVPWEEGCEEAFERKSGKYQDLLHDCREKGWQVWLFPVEVGCRGFPAQSVWRMLTAIGVTGRERKMAARRMGEAAERASCWLWSRREELSWKPGGVDGQ

SEQ ID NO: 9602 - protein, 997 aa, Danio kyathit
MGDTKEWDQLDKDLDKVLEATLAGTAEQKVNTLTTITYNLARERFRLEDKKANVRIAHQPSRREREIHRLREEIKVLNKLFKRSPIDEREGIKDLTSQLRERLCRLRRAESTRKRRKERENKRSQFTKDPFRFTRTLLGEVKSGRLTSLREDVEAFLKETHNDIFRNQALDANPNIESIGTPVKELNTSEPSWKEIQEVVKKARSGSAPGPSGIPYKVYKKCPMLLRRLWKLFQRIWRKGNIPSCWQRAEGCFVPKEENSSTIDQFRTISLLSVECKIFFSVLAKRMTSYMTEIGYIDTAIQKGGIPGFSGCLEHTGVLSQMIRETKASNGNLTVVWLDLANAYGSIPHTLIHAALDHYLIPQHIKGLIISYFGGIQLQFKTGHFTTQWQNLEKGIVTGCTISPILFIMGMNLIITAAGKEARGPKMQSGIRQPPIKGYMDNLTVTTTTHVEAKWVLTALDHMATWARMRFKPKKSRYMVIRKGKLTNRVMLHVQGEGIPSIKENPIKCLGKWFDDSLTDRNNISSTEKQTEEWLRKIKKSGLPGKFKAWLYQHGLLPRLMWLLTVYKVPMTTVEGVERKINKHLRRWLGIPPSFTSVGLYIRSGQLQLPLSSVVEEFKVAKCRVMMTYRDSQDEQVRQAGILTRSGRKWAAGSSIAQAESMLKLRDIMGTQCTGRQGLGTSHIQQWGKAGSKVRRAMIQEEVRNLEEEGRRAGAVELASQGAWTKWDLPKRKITWGDLWRLEPFRISFMLRSVYDTLPTPTNLHKWGLREDPLCKLCGERGTMAHILSGCKIALAQGRYRWRHDKVLMTLANTLEQERHKKHQPHGSATPSIKFVRAGQKPPTTVTTRTNLLQKAQSWEMKVDLGERLQFPPVIQTTLRPDAVLWSEEAKKIILIELTVPWEEGCELAFERKSVKYQDLLHDCREKGWQAWLFPVEVGCRGFPAQSVWRMLTAIVVMGRERKITIRRMGEAAERASCWLWSRREELSWKPGGVDGQ

SEQ ID NO: 9603 - protein, 1150 aa, Labeo catla
MHSTRKRAPIQATESYTKQYPQSHPRGGEDERLNRTDTTVTARTTDPRITRRLTQTTLTGEVMEVKCHCGKVCKNTKGLKIHQGRTKCGKKGSQMQRTVVAPGETQESSRQEEPHSPGDLSAPVSPQDLRKDSSNTSPESQTHPARERIKWPKMGDTKEWDQLDQDLDKVLEATLAGTAEQKVNTLTTITYNLARERFGLEDKKVNIRAVHQPSRREREIRRLREEIRTLNKQFKRSTVYEREGIKDLTSQLRERLCRLRRAESTRKRRKDRENKRSQFTKDPFRFTRTLLGEAKSGRLISPREVVEAFLRETHNDIFRNQALEANPNIVSIDTPVKELNISEPSWKEIQEVVKKARSGSAPGPSGIPYKVYKKCPMLLRRLWKLFQRIWKKGNIPSCWKKAEGCFVPKEENSSTIDQFRTISLLSVECKIFFSVLAKRMTSYMTENGYIDTAIQKGGIPGFSGCLEHTGVLSQMIRETKASNGNLTVVWLDLANAYGSIPHALIHAALDHYLIPQHIKGMIISYFGGIQLRFKTGHFTTQWQNLEKGIVTGCTISPILFIMGMNLIIAAAGKEARGPKMQSGIRQPPIRGYMDDLTVTTTTHVEARWVLTVLDRMATWARMRFKPKKSRYMVIRKGKLTNRVTLHVQGEVIPSLKENPIKCLGKWFDDSLTDRNNISSTEKQTEEWLRKMEKSGLPGKFKAWLYQHGLLPRLMWLLTVYEIPMTSVERVERKINKYLRRWLGIPPSFTSVGLYIRSGQLQLPLSSVVEEFKVAKCRVIMTYRDSQDEQVRQAGILTRSGRKWAADSSVAQAESMLKLRDIRGTPCTGRQGLGTSHVQQWGKAGSKDRRAMIQEEVRNLEEEGRRVRAVELASQGAWTKWDLPKRKITWGDLWRLEPFRISFLLRSVYDTLPTPTNLHKWGLREDPLCKLCGERGTMAHILSGCRTALAQGRYRWRHDKVLTILANTLEQERRKKHQPHGRAIPSIKFVRAGQKPPTTVTTRTNLLQKAQSWEMKVDLRERLQFPPVVQTTLRPDAVLWSEEAKKIILIELTVPWEEGCEQAFERKSAKYQDLLQDCRGKGWQAWLFPVEVDCRGFPAQSVWRMLTAIGVMGRERKMTVRRMGEAAERASCWLWSRREELSWKPGGVDGQ

SEQ ID NO: 9604 - protein, 923 aa, Sphaeramia orbicularis
MRTLYIKYLKLVKSLCLCSDFSNLALRKGWTGSTQCYVRKRRKDRENKRAQFIKDPFRFTRTLLGEAKSGRLTSPREDVEAFLRETHNDISRNQALDANPNIDSIDMPGKELNISEPSWKEVQEVVKKARTGSAPGPSGIPYKVYKKCPMLLRRLWKLFQRIWKKGIIPSSWKKAEGCFVPKDEKSSAIDQFRAISLLSVECKIFFSVLAKRMTSYMTENEYIDTTIQKGGVPGFSGCLEHTGVLSQMIREAKANKGDLTVVWLDLANAYGSVPHALIHAALDHYRIPQHIKGMITSYLGGIQLRFKTTHFTTQWQNLEKGIITGCTISPILFIMGMNLLITAAGKEARGPKMQSGIRQPPIRGYMDDLTVTTTTHVEARWVLTVLDRMATWARMKFKPKKSRCMVIRKGKVTNRVTLHVQGEVIPSIRENPIKCLGKWFDDSLTDRKNISSTEKQAEEWLRRIEKSGLPGKFKAWLYQHGLLPRLMWLLTVYEVPMTSVEGVEKKINKYLRRWLGIPPSFAAVGLYIRSGQLQLPLSSVVEEFKVAKCRVIMTYRDSQDEQVRHAGILTRSGRKWAADSSVAQAESMLKLRDIIGTPCTGRQGLGTSHVQHWGKAGPKARRAMIQEEVRNWEEEGRRARAVELASQGVWTKWDLPKRKITWGDLWRLEPFRISFMLRSVYDTLPTPTNLHKWGLKEDPLCRLCGERGTMAHILSGCKTALAQGRYRWRHDKVLMTLANTLEQERRKKRQPHGTAMQPIKFVKEGQKPPATVTTKVNLLQKAQSWEMKVDLGGRLQFPKVVQTALRPDVVLWSEEAEKIILIELTVPWEEGCEEAFERKSGKYQDLLHDCREKGWQAWLFPVEVGCRGFPAQSVWRMLTAIGVTGRERKMAARRMGEAAERASCWLWSRREELSWKPGGVDGQ

SEQ ID NO: 9605 - protein, 995 aa, unidentified
MSEDRAWSQLDQDLNGVLEATLVGSVEQKIKTLTTLTYNMARERFGTEEKKNHKPQAKQPNRREREIRRLRKEIKTLNKRFKLSKDSEKPGIKELTSQLRERLSKLRRAENTRKRSRKRQNNRAQFIKNPFKFTRALLGEKKSGSLTSSKEDVEEFLRQSHNDPLRNEPLDPSGKVGKAEEPKKQLNTDEPSWKEVNDVVKKARAGSAPGPSGIPYKVYKKCPLLLRRLWKLFRRIWVKGSIPVCWKEAEGCFVPKEENASTVSQFRTISLLSVECKIFFSVLANRITTYVTDNAYVNTSIQKGGIPGFSGCLEHTGVLSQLIQEAKSSKGDLTVVWLDLANAYGSIPHATIHEALEHYHIPANIKTLITSYFGGLRLRFKTTNFITEWQALEKGIVTGCTISPILFIMATNLIISSAEAKARGPVMASGSRQPPLRGFMDDLTVTTRSHVEARWVLCELSRMVTWARMAFKPKKSRSMIIRKGKITNRFNLQVQGETIPQIDGNPIKCLGKWFDATLSDRSNATSTSSQVEEWLKRTERSDLPGKFKLWIYQHGLLPRLGWLLTVYEIPMTHVEGIERKVNKYIRKWLGIPPSFTSIGLYIRSGQLQLPISSVVEEFKVAKCRLVMTYKDSRDQKVREAGVMTRSGRKWSADTHVERAESMLKLRDIIGIPCVGRQGLGASRYQLWEKANPRERRALIQSEVRREEDEKRLAKAVGLGVQGAWCKWELPQRKVTWSELWRLEPYRISFLLRSVYDTLPSPANLHRWGLVEDPACKLCGGRGTMAHILSGCKVALTQGRYRWRHDKVLAVLASILEKERKKNKQPHRKTAASITFVREGEKRPVTSRPSSNLLQKAKAWEMRVDLGKKLQFPSVVHTTLRPDIVLFADGNIVMIELTVPWEEGCDLAHERKRSKYQELLLECRAKGCNTWLFPVEIGCRGFPAASSWKLLKDLGLTGRERKEATRLLGEAAEKASCWLWLKRDEQNWRPEGRGEQ

SEQ ID NO: 9606 - protein, 995 aa, Branchiostoma floridae
MSEDRAWSQLDQDLNGVLEATLVGSVEQKIKTLTTLTYNMARERFGTEEKKNHKPQAKQPNRREREIRRLRKEIKTLNKRFKLSKDSEKPGIKELTSQLRERLSKLRRAENTRKRSRKRQNNRAQFIKNPFKFTRALLGEKKSGSLTSSKEDVEEFLRQSHNDPLRNEPLDPSGKVGKAEEPKKQLNTDEPSWKEVNDVVKKARAGSAPGPSGIPYKVYKKCPLLLRRLWKLFRRIWVKGSIPVCWKEAEGCFVPKEENASTVSQFRTISLLSVECKIFFSVLANRITMYVTDNAYVNTSIQKGGIPGFSGCLEHTGVLSQLIQEAKSSKGDLTVVWLDLANAYGSIPHATIHEALEHYHIPANIKTLITSYFGGLRLRFKTTNFITEWQALEKGIVTGCTISPILFIMAMNLIISAAEAKARGPVMASGSRQPPLRGFMDDLTVTTRSHVEARWVLCELSRMVTWARMAFKPKKSRSMIIRKGKITNRFNLQVQGETIPQIDGNPIKCLGKWFDATLSDRSNATSTSSQVEEWLKRTERSDLPGKFKLWIYQHGLLPRLGWLLTVYEIPMTHVEGIERKVNKYIRKWLGIPPSFTSIGLYIRSGQLQLPISSVVEEFKVAKCRLVMTYKDSRDQKVREAGVMTRSGRKWSADTHVERAESMLKLRDIIGIPCVGRQGLGASRYQLWEKANPRERRALIQSEVRREEDEKRLAKAVGLGVQGAWCKWELPQRKVTWSELWRLEPYRISFLLRSVYDTLPSPANLHRWGLVEDPACKLCGGRGTMAHILSGCKVALTQGRYRWRHDKVLAVLASILEKERKKNKQPHRKTAASITFVREGEKRPATSRPSSNLLQKAKAWEMRVDLGKKLQFPSVVHTTLRPDIVLFADGNIVMIELTVPWEEGCDLAHERKRSKYQELLLECRAKGCNTWLFPVEIGCRGFPAASSWKLLKDLGLTGRERKEATRLLGEAAEKASCWLWLKRDEQNWRPEGRGEQ

SEQ ID NO: 9607 - protein, 1047 aa, Craspedacusta sowerbii
MLVKHLCQKHEVKVSAIVFECECGFQAPTSRAVGTHKRYCSGEKMTAEQSHVRKQYRERPGDVICGLCHGKFDGQNGLAVHMSRSHKAEYNEQLPTKRVFKWDDNELEHLAECEVRLMAAGRVNKINQLLSELHPTRTASQIATVRKREVYKNMVTNLSRVATEEVERASDVCEQPASIPSSKRMAGENLERWLVKNTHVGHSAIVARYVENVKNGTDTWQETKTLLFPAPERRKRTYRFRRVRYRRFVQRRGGLSRKQQRFKATQRAYESSRSETLKKILDGKFTFDEEPTDGNPLKLPDVEAVFVKRLEDPPGEDKGPHIIGAPCDTAPFQLFSEQEVTKAVKDMFSETAPGVDGVLMRSLKLVAPEALGIIFTSWWVHGIPRGEKENRTILLPKEGDRSKVTNWRPITIGNLLLRVYAKCWDTRLRKVVSISERQKAFCPVDGCFENVKILQQAVRDCKKSRKELNLVMLDLAKAFDTVLHVSVLKAMTRKGIPSDVCSAVLDLYKDATTEVFVNGEKTRKISIKNGVKQGCPLSPFLFNLVLDELLSGLAATGYGITVNEVKVNCLAFADDLVLLTPNEFEMERLLTQCEGFFDSKCLAVNASKSLSLRVLPVKGKKSLKIVTATHRWWKGTAIPSIGFKSLAQYLGVKMNPQGQVILPEREWQDQIARLCKAPLKPYQKVAALKEVMVPRMLHQLRLSDAGKSKLKAVDRILRAAYKTILHLPEDTSTSWIHLSNGGGLPSIAEIVMKSRIQSWARMKDSPDMVSAATARANELVVERLQRSFGMAGVETKAMKRVFQERKALALSQEYNGKARLTMAESAVSKGWLWNGRFASNQLVTALKILSGTLPTNVRNTRGVNDRSSKLCRNGCRTAETDLHVLAMCTLTKDAVSRRHNIIRDKIAKELKRIPGMRVDVERTWYIGQRRFRPDITIEKGKVRKFVEVTVPYEQSPDYLVQRIEEKKAYYRCLTNKDNGTVPVEGTAEVVPIVVGCAGTITDQCSKLMQSIGLNKKAQEQIQMIALAESARIWNIHRQRRRGVYGGL

SEQ ID NO: 9608 - protein, 1039 aa, Polypterus senegalus
MENQDNLSNPKITILIPLKDYCCQICGDMQKSFIRLRKHYRVKHQKFKINFKCESCPKTHDNHRVIVCHRPKCKINQKRRRSRRKHKCCKCEDTFGSQRELCQHIRHKHHVGHSAYLEGIEDKGLSYPSFEGNTNFSTETMQITSEQVNVVLEILKEKVNNPSSEDEVGISVKRAWDELEEEETDNKRKWVENFSRQILEEFASNTQKTCNSNQTPHIQHQKLLPFRHRKKYEYKRAQTLFKRDCSHLVEEIIDGPKRRKCEIPLNEISETYKRIWSTECPRTKIQYVPKTIIDNSVFLSLISTQEVSDNLNKIKIGRAPGPDNIKKKDITSVIQKESKLAVLFNIWLLSGVVPNFMKKTRTVLIPKSMEESQLKKITNWRPLTIKSIILGLFSKILHKRLNEGVNLNLRHNFAESHKCTENVITLQEILNFHKQEKRPLGMVVLDFSKAINTISHQYLFKVLEILRLDTHIIQLLKHSYEEMTTTIENIEGSSEEILIKRGVKQGDALSPLLFNIALNPLLDKLEAVGKGTTLGKSPITAMTFEDDLVIFSRSWHGMKKNIRILNTFCQDSGLTIQPTKCKGFFYIWENGRMKKKKRLWRIRGTEASRISSKHPAKYPGLNISPTQGIIQEDLCLLLGTWIERISRAPLKPTQKICILNLYLLPRLMYPLSNTKTKMMTIRKIDGITRKAIKTWLHLPQGITNGILYSSFKNGGLGILKFEAVILSATFRSLCKIKISKDPILKEVANLIDIESKIETIWKLLGGSKEEFKDINYNSICIKEIESQMPPTLTDWRQIEFNKWKKIPTQGLGINLFENDETSNNWVWNHKGMTEGQYIEAILLKTNTFLTEEAASRGRAEERLCRRCGKEGETTSHILLQCPFLQRERILRHHKVCNIIRDAIEKEEEWTTLKETSVKTAAGGTLRPDLICWNGKTAIIMDITVRYEWSIQEANNAKNEKEQKYKKITCQVKELLNCTSVKTCGIVVGARGKWFNFNNESLEEMGFSKNKTTSIGRLVSKRTLLYTLEMLNKFYVIKKY

SEQ ID NO: 9609 - protein, 978 aa, Pissodes strobi
MLLYKGSNPSYRKRLPKLKYNRNTKNTAQIYNNYINKYIDDVKSVEDLIDITYITAISITDTLGITNKNKPSNRKAKIDPTKKPPWQKRLEHKISQIRSDLTQMNNSLVDPKQKHDKLYKKFNINNNTGTRTAQITEAIDTLKQKLMASSKKLKRYIIPHKRKQDNTNFTSSEKHFYQNLERANAEPTNIEAPKQAEVEQYWKSLWSEPVEHENSEWIKTEQKRTETVEPMMPYEITIDELRIILKKLPNWKAPGPDKIYNYFWKHLTSLHRKMAQIIQHVITHPTEVPPSLTHGITYLKPKNENTHDPKNYRPITCLNTIYKIITKTIAEKVTKHITEQKIEHEEQKGCTKGAKGCKEQLIIDRVITRQAEAKGRNIAVAWIDYQKAYDSVPHTWLLHILEIYKIDQNIIRFLKQTMKNWETKLILTLPHTDLETNNIKIRRGIFQGDTWSPKWFILALNPLSSLLKSINIGYSPTKDYKISPLFYVDDLKLYAPDQNQLSSLLETTTKFSKDIRMNFGLDKCTSLIAKKGKTTETNNIELLINNITFPTLPSNETYKYLGVNETLTHKTKEMKENIENKYKNRLRRIMHTQLNAKNKIKAINTWAIPILTYSFGVIQWTLTDVKALDRLTRKILTDNRALHPNSAVERLYLPRKQGGRGLINIELTHNIQIHSLQRYFNMKATQSPLHASIKQADKKYTPLSTHTQIQQIDKKTFLTNITQTWNSKKLHGKFKNDLDKQHQLSTKWIQLGHLYSETEGFMFSIQDQVVPTNNYQKYITKTNIENDNCRVCKSMPETIQHITSGCSILAQTEYLNRHNLTAKILHKYLLHKHNIKTIEEPYYKYTPDQVNENQNYKIYWDRGIITDKTIINNRPDITVIDKMNKITMLIDIAHPLDHNIQKTITEKIRKYTNLAEEIKSMWKMEEVLILPVVISVTGLIPPELPAGFTKHNLPHQLITDMQKSMILETCRIVRKILK

SEQ ID NO: 9610 - protein, 1061 aa, Ophraella communa
MIKEQIRLEIQGEIQTRNTEAEQGTQNEGELETTHKTELHTHINQTNAHTAGENLQTNTNGTDNQELITEVEQIFNKNMLMYKGSNPSYRKHLPKLKYNRNTKKTVQTYNSYLNKYIDDIKSVEDLTDITYITAISITETLGITNKNEPNGKRGKTNRNKKPPWQKRLEQKISKIRSDLTQMNNSLVSPKQKHNKLYKKFKINNNPGTRTPQITEAIDTLKQKLMASSKKLKRYIISYKRKHDNINFTSNEKHFYKNLEQTIEKEIDIKAPKQAEVEKYWKSLWSEPVEHENSEWIKIEEKKTQTVEPMMPYKITTDELKLILKKLPNWKAPGPDKIYNYFWKHLTSLHEKMAEIIQHVITHPTEVPPSLTHGITYLKPKNENTHDPKNYRPITCLNTLYKIITKTITEKVTKHITEQKIEHEEQKGCTKGAKGCKEQLIIDRVITRQAETNKRNIAIAWIDYQKAYDSIPHSWLLHILEIYKIDLNIIRFLKQAMDNWETKLILTLPHTDLETDNIKTNRGIFQGDTWSPKWFILALNPLSSLLKSTNIGYSPTKDYKISHLLYVDDLKLYAKDQNQLSALLETTAKFSKDIRMNFGLDKCASLIAKKGKTTETNNIELLINKITFPALPNNETYKYLGVNETLTQKTKEMKENIENKYKNRLRKVMHTQLNAKNKIKAINTWAIPILTYSFGVIQWTITDVQALDRLTRKILMDNKALHPNSAVERLYLPRKQGGRGLINIELTHNIQIHSLLRYFNMKATQSPLHASIKQADKKYTPLSTHTQIQQIDKKTFFTNITQTWNSKKLHGRFKNDLDKQHQLSTKWIELGHLYSETEGFMYSIQDQVIPTKNYQKYISKTNTENDNCRVCKSMPETIQHITSGCSSLAQTEYLNRHNLTAKILHKYLLHKHKIKTIEEPYYKYTPDQVNENQNYKIYWDRGIITDKTTINNRPDITVIDKINKITTLIDIAHPLDHNIQKTISEKIRKYSDLAEEIKSMWKMDEVLILPVVISVTGLIPPELPAGFTKHNLPFQLITDMQKSVILETCRIVRKIVKQVNEV

SEQ ID NO: 9611 - protein, 1056 aa, Pissodes strobi
MIKEQVRLETQGESAPETEQATQNEDEPQTTQTTHAIELHIHMNQTHTDIAGENIQTNSNNTDNQRLLTEIEQAFNKNMILYKGSNPSYRKRLPKLKYNRNTKNTVQIYNNYINKYIDDVKSVEDLIDITYITAISITDTLGITNKNKPSNRKAKIDPTKKPPWQKRLEHKISQIRSDLTQMNNSLVDPKQKHDKLYKKFNINNNTGTRTAQITEAIDTLKQKLMASSKKLKRYIISHKRKQDNTNFTSSEKHFYQNLERANAEPTIIKAPKQAEVEQYWKSLWSEPVEHENSEWIKTEQKRTETVEPMMPYEITIDELRIILKKLPNWKAPGPDKIYNYFWKHLTSLHRKMAQIIQHVITHPTEVPPSLTHGITYLKPKNENTHDPKNYRPITCLNTIYKIITKTIAEKVTKHITEQKIEHEEQKGCTKGAKGCKEQLIIDRVITRQAEAKGRNIAVAWIDYQNAYDSVPHTWLLHILEIYKIDQNIIRFLKQTMKNWETKLILTLPHTDLETNNIKIRRGIFQGDTWSPKWFILALNPLSNLLKSINIGYSPTKEYKISLLFYVDDLKLYAPDQNQLSSLLETTTKFSKDIRMNFGLDKCTSLIAKKGKTTETNNIELLINNITFPTLPSNETYKYLGVNETLTHKTKEMKENIENKYKNRLRRIMHTQLNAKNKIKAINTWAIPILTYSFGVIQWTLTDVQALDRLTRKILTDNRALHPNSTVERLYLPRKQGGRGLINIELTHNIQIHSLQRYFNMKATQSPLHASIKQADKKYTPLSTHTQMQQIDKKTFLTNITQTWNSKKLHGKFKNDLDKQHQLSTKWIELGHLYSETEGFMFSIQDQVVPTKNYQKYITKTNIENDNCRVCKSMPETIQHITSGCSILAQTEYLNRHNLTAKILHKYLLHKHNIKTIEEPYYKYTPDQVNENQNYKIYWDRGIITDKTIINNRPDITVIDKINKITMLIDIAHPLDHNIQKTITEKIRKYTDLAEEIKSMWKMEEVLIIPVVISVTGLIPPELPAGFTKHNLPHQLITDMQKSVILETCRIVRKILK

SEQ ID NO: 9612 - protein, 1056 aa, Pissodes strobi
MIKEQVRLETQRESAPETEQATQNEDEPQTTQTTHAIELHIHMNQTHTDIAGENIQTNSNNTDNQRLLTEIEQTFNKNMLLYKGSNPSYRKRLPKLKYNRNTKNTAQIYNNYINKYIDDVKSVEDLIDITYITAISITDTLGITNKNKPSNRKAKIDPTKKPPWQKRLEHKISQIRSDLTQMNNSLVDPKQKHDKLYKKFNINNNTGTRTAQITEAIDTLKQKLMASSKKLKRYIISHKRKQDNTNFTSSEKHFYQNLERANAEPTNIKAPKLAEVEQYWKSLWSEPVEHENSEWIKTEQKRTETVEPMMPYEITIDELRIILKKLPNWKAPGPDKIYNYFWKHLTSLHRKMAQIIQHVITHPTEVPPSLTHGITYLKPKNENTHDPKNYRPITCLNTIYKIITKTIAEKVTKHITEQKIEHEEQKGCTKSAKGCKEQLIIDRVITRQAEAKGRNIAVAWIDYQKAYDSVPHTWLLHILEIYKIDQNIIRFLKHTMKNWETKLILTLPHTDLETNNIKIRRGIFQGDTWSPKWFILALNPLSSLLKSINIGYSPTKDYKISHLFYVDDLKLYAPDQNQLSSLMETTTKFSKDIRMNFGLDKCTSLIAKKGKTTETNNIELLINNITFPTLPSNETYKYLGVNETLTHKTKEMKENIENKYKNRLRRIMHTQLNAKNKIKAINTWAIPILTYSFGVIQWTLTDVQALDRLTRKILTDNRALHPNSAVERLYIPRTQGGRGLINIELTHNIQIHSLQRYFNMKATQSPLHASIKQADKKYTPLSTHTQMQQIDQKTFLTNITQTWNSKKLHGKFKNDLDKQHQLSTKWIELGHLYSETEGFMFSIQDQVVPTKNYQKYITKTNIENDNCRVCKSMPETIQHITSGCSILAQTEYLNRHNLTAKILHKYLLHKHNIKTIEEPYYKYTPDQVNENQNYKIYWDRGIITDKTVINNRPDITVIDKINKITMLIDIAHPLDHNIQKTITEKIRKYTDLAEEIKSMWKMEEVLILPVVISVTGLIPPELPAGFMKHNLPHQLITDMQKSVILETCRIVRKILK

SEQ ID NO: 9613 - protein, 951 aa, Pissodes strobi
MIKEQVRLETQGESAPETEQATQNEDEPQTTQTTHAIELHIHMNQTHTDIAGENIQTNSNNTDKQRLLTEIEQTFNKNMRLYKGSNPSYRKRLPKLKYNRNTKNTAQIYNNYINKYIDDVKSVEDLIDITYITVISITDTLGITNKNKPSNRKAKIDPTKKPAWQKRLEHKISQIRSDLTQMNNSLVDPKQKHDKLYKKFNINNNTGTRTAQITEAIDTLKQKLMASSKKLKRCIISHKRKQDNTNFTSSEKHFYQNLERANAEPTNIKAPKQAEVEQYWKSLWSEPVEHENSEWIKTEQKRTETVEPMMPYEITIDELRIILKKLPNWKAPGPDKIYNYFWKHLTSLHRKMAQIIQHVITHPTEAPPSLTHGITYLKPKNENTHDPKNYRPITCLNTIYKIITKTIAEKATKHITEQKIEHEEQKGCTKGAKCCKEQLIIDRVITRQAEAKGRNIAVAWIDYQKAYDSVPHTWLLHILEIYKIDQNIIRFLKQTMQNWETKLILTLPHTDLETNNIKIRRGIFQGDTWSPKWFILALNPLSSLLKSINIGYSPTKDYKISHLFYVDDLKLYAPDQNQLSSLLETTTKFSKDIRMNFGLDKCTSLIAKKGKTTETNNIELLINNITFPTLPSNETYKYLGVNETLTHKTKEMKENIENKYKNRLRRIMHTQLNAKNKIKAINTWAIPILTYSFGVIQWTLTDVQALDRLTRKILRDNRALHPNSAVERMYLPWKQGGLGLINIELTHNIQIHSLQRYFNMKATQSPLHASIKQADKKYTPLSTHTQMQQIDKKTFLTNITQTWNSKKLHGKFKNDLDKQHQLSAKWIELGHLYSETEGFMFSIQDQVVPTKNYQKYITKTNIENDNCRVCKSMPETIQHITSGCSILAQTEYLNRHNLTAKILHKYLLHKHNIKTIEEPYYKYTPDQVNENQNYNIYWDRGIITDKTNYKQ

SEQ ID NO: 9614 - protein, 875 aa, Pissodes strobi
MNNSLVDPKQKHDKLYKKFNINNNTGTRTAQITEAIDTLKQKLMASSKKLKRYIISHKRKQDNTNFTSSEKHFYQNLERANEEPTNIKAPKQAEVEQYWKSLWSEPVEHENSEWIKTEQKRTETVEPMMPYEITIDELRIILKKLPNWKAPGPDKIYNYFWKHLISLHRKMAQIIQHVITHPTEVPPSLTHGITYLKPKNENTHDPKNYRPITCLNTIYKIITKTIAKKVTKHVTEQKIEHEEQKGCTKGAKGCKEQLIIDRVITRQAEAKGRNIAVAWIDYQKAYDSVPHTWLLHILEIYKIDQNIIRFLKQTMKNWETKLILTLPHTDLETNNIKIRRGIFQGDTWSPKWFILALNPLSSLLKSINIGYSPTKDYKISHLFYVDDLKLYAPDQNQLSSLLETTTKFSKDIRMNFGLDKCTSLIAKKGKTTETNNIELLINNITFPTLPSNETYKYLGVNETLTHKTKEMKENIENKYKNRLRRIMHTKLYAKNKIKAINTWAIPILTYSFGVIQWTLTDVQALDRLTRKILTDNRALHPNSAVERFYLPRKQGGRGLINIELTHNIQIHSLQRYFNMKATQSLLHASIKQADKKYTPLSTHTQMQQIDKKTFLTNITQTWNSKKLHGKFKNDLDKQHQLSTKWIELGHLYSETEGFMFSIQDQVVPTKNYQKYITKTNIENDNCRVCKSMPEMIQHITSGCSILAQTEYLNRHNLTAKILHKYLLHKHTIKTIEEPYYKYTPDQVNENQNYKIYWDRGIITDKTIINNRPDITVIDKINKITMLIDIAHPLDHNIQKTITEKIRKYTDLAEEIKSMWKMEEVLILPVVISVTGLIPPELPAGFTKHNLPHQLITYMQKSVILETCRIVRKILK

SEQ ID NO: 9615 - protein, 1053 aa, Ophraella communa
MIKEQIRLEIQVENAPEAEQGTQNEGELETTHKTELHTHINQTNAHTAGENLQTNTNGTDNQELITEVEQIFNKNMLLYKGSNPSYRKHLPKLKYNRNTKKTVQTYNSYLNKYIDDIKSVEDLTDITYITAISITETLGITNKNEPNGKRAKTNRNKKPPWQKRLEQKISKIRSDLTQMNNSLVSPKQKHNKLYKKFKINNNPGTRTPQITEAIDTLKQKLMASSKKLKRYIISYKRKHDNINFTSNEKHFYKNLEQTIEKEIDIKAPKQAEVEKYWKSLWSEPVEHENSEWIKIEEKKTETVEPMMPYKITTDELRLILKKLPNWKAPGPDKIYNYFWKHLTSLHEKMAEIIQHVITHPTEVPPSLTHGITYLKPKNENTHDPKNYRPITCLNTLYKIITKTITEKVTKHITEQKIEHEEQKGCTKGAKGCKEQLIIDRVITRQAETNKRNIAIAWIDYQKAYDSIPHSWLLHILEIYKIDLNIIRFLKQAMDNWETKLILTLPHTDIETDNIKINRGIFQGDTWSPKWFILALNPLSSLLKSTNIGYSPTKDYKISHLLYVDDLKLYAKDQNQLSALLETTAKFSKDIRMNFGLDKCASLIAKKGKTTETNNIELLINKITFPALPNNETYKYLGVNETLTQKTKEMKENIENKYKNRLRKVMHTQLNAKNKIKAINTWAIPILTYSFGVIQWTITDVQALDRLTRKILMDNRALHPNSAVERLYLPRKQGGRGLINIELTHNIQIHSLLRYFNMKATQSPLHASIKQADKKYTPLSTHTQIQQIDKKTFFTNITQTWNSKKLHGRFKNDLDKQHQLSTKWIELGHLYSETEGFMYSIQDQVIPTKNYQKYISKTNTENDNCRVCKSMPETIQHITSGCSSLAQTEYLNRHNLTAKILHKYLLHKHKIKTIEEPYYKYTPDQVNENQNYKIYWDRGIITDKTTINNRPDITVIDKINKITTLIDIAHPLDHNIQKTISEKIRKYSDLAEEIKSMWKMDEVLILPVVISVTGLIPPELPAGFTKHNLPFQLITDMQKSVILETCRIVRKIVK

SEQ ID NO: 9616 - protein, 978 aa, Pissodes strobi
MLLYKGSNPSYRKRLPKLKYNRNTKNTAQIYNNYINKYIDDVKSVEDLIGITYITAISITDTLGITNKTKPSNRKAKADPTKKPPWQKRLEHKISQIRSDLTQMNNSLVDPKQKHDKLYKKFNINNNTGTRTAQITDAIDTLKQKLMASSKKLKRYIISHKRKQDNTNFTSSEKHFYQNLERANEEPTNIKAPKQAEVEQYWKSLWSEPVEHENSEWIKTEQKRIETVEPMMPYEITIDELRIILKKLPNWKAPGPDKIYNYFWKHLTSLHRKMAQIIQHVITHPTEVPPSLTHGITYLKPKNENTHDPKNYRPITCLNTIYKIIIKTIAEKVTKHITEQKIEHEEQKGCTKGAKGCKEQLIIDRVITRQAEAKGRNIAVAWIDYQKAYDSVPHTWLLHLLEIYKIDQNIIRFLKQTMKNWETKLILTLPHTDLETNNIKIRRGIFQGDTWSPKWFILALNPLSSLLKSINIGYSPTIDYKISHLFYVDDLKLYAPDQNQLSSLLETTTKFSKDIRMNFGLDKCTSLIAKKGKTTETNNIELLINNVTFPTLPSNETYKYLGVNETLTHKTKEMKENIENKYKNRLRRIMYTKLYAKNKIKAINTWAIPILTYSFGVIQWTLTDVQALDRLTRKILTDNRALHPNSAVERLYLPRKQGGRGLINIELTHNIQIHSLQKYFNMKATQSPLHASIKQADKKYTPLSTHTQMQQIDKKTFLTNITQTWNSKKLHSKFKNDLDKQHQLSTKWIELGHLYSETEGFMFSIQDQVVPTKNYQKYITKTNIENDNCRVCKSMPETIQHITSGCSILAQTEYLNRHNLTAKILHKYLLHKHNIKTIEEPYYKYTPDQVNENQNYKIYWDRGIITDKTIINNRPDITVIDKINKITMLIDIAHPLDHNIQKTITEKIRKYTDLAEEIKSMWKMEEVLILPVVISVTGLIPPELPAGFTKHNLPHQLITDMQKSVILETCRIVRKILK

SEQ ID NO: 9617 - protein, 1053 aa, Pissodes strobi
MIKEQVRLETQGESAPETEQATQNEDEPQTTHAIELYIHMNQTHTDIAGENIQTNSNNTDNQRLLTEIEQTFNKNMLLYKGSNPSYRKHLPKLKYNRNTKNTAQIYNNYINKYIDDVKSVEDIIDITYITAISITDTLGITNKNKPSNRKAKIDPTKKPPWQKRLEHKISQIRSDLTQMNNSLVDPKQKHDKLYKKFNINNNTGTRTAQITEAIDTLKQKLMASSKKLKRYIISHKRKQDNTNFTSSEKHFYQNLERANAEPANIKAPKQAEVEQYWKSLWSEPVEHENSEWIKTEQKRTETVEPMMPYEITIDELRIILKKLPNWKAPGPDKIYNYFWKHLTSLHRKMAQIIQHVITHPTEVPPSLAHGITYLKPKNENTHDPKNYRPITCLNTIYKIITKTIAEKVTKHITEQKIEHEEQKGCTKGAKGCKEQLIIDRVITRQAEAKGRNIAVAWIDYQKAYDSVPHTWLLHILEIYKIDQNIIRFLKQTMKNWETKLILTLPHTDLETNNIKIRRGIFQGDTWSPKWFILALNPLSSLLKSINIEYSPTKDYKISHLFYVDDLKLYAPDQNQLSSLLETTTKFSKDIRMNFGLDKCTSLIAKKGKTTETKNIELLINNITFPTLPSNETYKYLGVNETLTHKTKEMKENIENKYKNRLRRIMHTQLNAKNKIKAINTWAIPILTYSFGVIQWTLTDVQALDRLTRKILTDNRALHPNSAVERLYLPRKQGGRGLINIELTHNIQIHSLQRYFNMKATQSPLHASIKQADKKYTPLSTHTQMQQIDKKTFLTNITQTWNSKKLHGKFKNDLDKQHQLSTKWIELGHLYSETEGFMFSIQDQVVPTKNYQKYITKTNIDNDNCRVCKSMSETIQHITSGCSILAQTEYLNRHNLTAKILHKYLLHKHNIKTIEEPYYKYTPDQVNENQNYKIYWDRGIITDKTIINNRPDITVVDKINKITMLIDIAHPLDHNIQKTITEKIRKYTDLAEEIKSMWKMEEVLILPVVISVTGLIPPELPAGFSKHNLPHQLITDMQKSVILETCRIVRKILK

SEQ ID NO: 9618 - protein, 1179 aa, Pterostichus madidus
MVNTRHKRYSGGTGYQAGPVRNRRDDRQSGPEQGEASGATQVVGTTRRERNTANNISDSPTISVATAAAVPTGVERGKRTRWTQEMNRFLYKTYLLITKMETDTQNYSAKLYKEITGKFPELRNKTLMNILSQKREIFTKNRIPQEDIINIRAEVERELRGDEIEGEENTQIAGNNTQPVPQSQEHQIDEDVMNTFQTMATMYSGMQPACKPKLQKLREDKSTKQTINQINKIISHNAEECTTLLSLHALLYTGAITTLTMHNRKTRTHTGRVDKARKPPWQERIERKISMLRKDIGRLTQACTQPQNKKLQELAQEILHRHKNTENNTFNEVKDLLKQKLVVQACRLKRYKESNERRRQTKLFHNNQRLFYRTLDQPATNENNNTAPNPEQTLLFWKGIWEKEKAHNIGATCIKVEKKRIEKVQIMTPIKITPDDIRQATKKTQNWKAPGNDHIHNFWLKRFTGAHEKLAELLDLAINNPQTIPDFMTEGITYLLPKTSPPSEDPSKYRPITCLPTMYKILTSIIATKIYDHLEKHQIISEEQKGCRRNSRGCKEQLLIDTAIIEEAKAKKRSLHTAYIDYRKAFDSVPHTWLLEVLKVYKVNPHIINTLKHTMGTWRTNLSMNKATMGRININRGIFQGDSLSALWFCLSMQPLSTLLQNSRKGYTISGTQHLISHLFYMDDLKLICSCQKDLQKLLRITEDFSHDIRMEFGIEKCKINAMNRGKWVETDSYEMRHQQDELINAMEEHETYKYLGFEQKRGLEKHLIKEKLVERFRHRTKSLLRTKLHARNLATAINTYASPVISYSFGVLNWTQTELEDLNRTLRTMATKNLKHHPKSSMERFHLDRRKGGRGFTDFHNMYYKEIQNLRSFFNMKAQTSALHAAILKIDENRTPLKLATPTYDPLVHLVTDEQKIQRWKEKALHGRYISQLAEQHIDEKASHAWLQTSGLFPETEGFIMAIQDQVIATRNYKKHIIKDANVKHTRCRMCDEGNENVEHIIAGCQTLASTEYTRRHNNVAKIIHTKLCKQALQVEETPYYKYKPEAVIDTPQTKIYWDRTIQTDKTVLHNRPDIVYQIKEQKCTYLIDIAVPAPANIKSKMSEKVNKYIPLANDMKETWEQDKVVVIPIVIGATGEIPKKLHESIEKLGLEPNTYLQLQKAVILDTCNIARKVLNIK

SEQ ID NO: 9619 - protein, 1179 aa, Pterostichus madidus
MVNTRHKRYSGGTGYQAGPVRNRRDDRQSGPEQGEASGATQVVGTTRRERNTANNISDSPTISVATAAAVPTGVERGKRTRWTQEMNRFLYKTYLLITKMETDTQNYSAKLYKEITGKFPELRNKTLMNILSQKREIFTKNRIPQEDIINIRAEVERELRRDEIEGEENTQIAGDNTQPVPQSQEHQIDEDVMNTFQTMATMYSGMQPACKPKLQKLREDKSTKQTINQINKIISHNAEECTTLLSLHALLYTGAITTLTMHNRKTRTHTGRVDKARKPPWQERIERKISMLRKDIGRLTQACTQPQNKKLQELAQEILHRHKNTENNTFNEVKDLLKQKLVVQACRLKRYKESNERRRQTKLFHNNQRLFYRTLDQPATNENNNIAPNPEQTLLFWKGIWEKEKAHNIGATCIKVEKKRIEKVQIMTPIKITPDDIRQATKKTQNWKAPRNDHIHNFWLKRFTGAHEKLAELLDLAINNPQTIPDFMTEGITYLLPKTSPPSEDPSKYRPITCLPTMYKILTSIIATKIYDHLEKHQIISEEQKGCRKNSRGCKEQLLIDTAIIEEAKAKKRSLHTAYIDYRKAFDSVPHTWLLEVLKVYKVNPHIINTLKHTMGTWRTNLSMNKATMGRININRGIFQGDSLSALWFCLSMQPLSTLLQNSIKGYTISGTQHLISHLFYMDDLKLICSSQKDLQKLLRITEDFSHDIRMEFGIEKCKINAMNRGKWVETDSYEMRHQQDELINAMEEHETYKYLGFEQKRGLEKHLIKEKLVERFRHRTKSLLRTKLHARNLATAINTYASPVISYSFGVLNWTQTELEDLNRTLRTMATKNLKHHPKSSMERFHLDRRKGGRGFTDFHNMYYKEIQNLRSFFNMNAQTSALHAAILKIDENRTPLKLATPTYDPLVHLVTDEQKIQRWKEKALHGRYISQLAEQHIDEKASHAWLQTSGLFPETEGFIMAIQDQVIATRNYKKHIIKDANVKHTRCRMCDEGNENVEHIIAGCQTLASTEYTRRHNNVAKIIHTKLCKQALQVEETPYYKYKPEAVIDTPQIKIYWDRTIQTDKTVLHNRPDIVYQIKEQKCTYLIDIAVPAPANIKSKMSEKVNKYIPLANDMKETWEQDKVVVIPIVIGATGEIPKKLHESIEKLGLEPNTYLQLQKAVILDTCNIARKVLNIK

SEQ ID NO: 9620 - protein, 974 aa, Pterostichus madidus
MQPACKPKLQKLREDKSTKQTINQINKIISHNAEECTTLLSLHALLYTGAITTLTMHNRKTRTHTGRVDKARKPPWQERIERKISMLRKDIGRLTQACTQPQNKKLQELAQEILHRHKNTENNTFNEVKDLLKQKLVVQACRLKRYKESNERRRQTKLFHNNQRLFYRTLDQPATNENNNIAPNPEQTLLFWKGIWEKEKAHNIGATCIKVEKKRIEKVQIMTPIKITPDDIRQATKKTQNWKAPGNDHIHNFWLKRFTGAHEKLAELLDLAINNPQTIPDFMTEGMTYLLPKTSPPSEDPSKYRPITCLPTMYKILTSIIATKIYDHLEKHQIISEEQKGCRKNSRGCKEQLLIDTAIIEEAKAKKRSLHTAYIDYRKAFDSVPHTWLLEVLKVYKVNPHIINTLKHTMGTWRTNLSMNKATMGRININRGIFQGDSLSALWFCLSMQPLSTLLQNSRKGYTISGTQHLISHLFYMDDLKLICSSQKDLQKLLRITEDFSHDIRMEFGIEKCKINAMNRGKWVETDSYEMRHQQDELINAMEEHETYKYLGFEQKRGLEKHLIKEKLVERFRHRTKSLLRTKLHARNLATAINTYASPVISYSFGVLNWTQTELEDLNRTLRTMATKNLKHHPKSSMERFHLDRRKGGRGFTDFHNMYYKEIQNLRSFFNMKAQTSALHAAILKIDENRTPLKLATPTYDPLVHLVTDEQKIQRWKEKALHGRYISQLAEQHIDEKASHAWLQTSGLFPETEGFIMAIQDQVIATRNYKKHIIKDANVKHTRCRMCDEGNENVEHIIAGCQTLASTEYTRRHNNVAKIIHTKLCKQALQVEETPYYKYKPEAVIDTPQIKIYWDRTIQTDKTVLHNRPDIVYQIKEQKCTYLIDIAVPAPANIKSKMSEKVNKYIPLANDMKETWEQDKVVVIPIVIGATGEIPKKLHESIEKLGLEPNTYLQLQKAVILDTCNIARKVLNIK

SEQ ID NO: 9621 - protein, 1179 aa, Pterostichus madidus
MVNTRHKRYSGGTGYQAGPVRNRRDDRQSGPEQGEASGATQVVGTTRRERNTANNISDSPTISVATAAAVPTGVERGKRTRWTQEMNRFLYKTYLLITKMETDTQNYSAKLYKEITGKFPELRNKTLMNILSQKREIFTKNRIPQEDIINIRAEVERELRGDEIEGEENTQIVVDNTQPVPQSQEHQIDEDVMNTFQTMATMYSGMQPACKPKLQKLREDKSTKQTINQINKIISHNAEECTTLLSLHALLYTGAITTLTMHNRKTRTHTGRVDKARKPPWQERIERKISMLRKDIGRLTQACTQPQNKKLQELAQEILHRHKNTENNTFNEVKDLLKQKLVVQACRLKRYKESNERRRQTKLFHNNQRLFYRTLDQPATNENNNIAPNPEQTLLFWKGIWEKEKAHNIGTTCIKVEKKRIEKVQIMTPIKITPDDIRHATKKTQNWKAPGNDHIHNFWLKRFTGAHEKLAELLDLAINNPQTIPDFMTEGITYLLPKTSPPSEDPSKYRPITCLPTMYKILTSIIATKIYDHLEKHQIISEEQKGCRKNSRGCKEQLLIDTAIIEEAKAKKRSLHTAYIDYRKAFDSVPHTWLLEVLKVYKVNPHIINTLKHTMGTWRTNLSMNKATMGRININRGIFQGDSLSALWFCLSMQPLSTLLQNSRKGYTISGTQHLISHLFYMDDLKLICSSQKDLQKLLRITEDFSHDIRMEFGIEKCKINAMNRGKWVETDSYEMRHQQDELINAMEEHETYKYLGFEQKRGLEKHLIKEKLVERFRHRTKSLLRTKLHARNLATAINTYASPVISYSFGVLNWTQTELEDLNRTLRTMATKNLKHHPKSSMERFHLDRRKGGRGFTDFHNMYYKEIQHLRSFFNMKAQTSALHAAILKIDENRTPLKLATPTYDPLVHLVTDEQKIQRWKEKALHGRYISQLAEQHIDEKASHAWLQTSGLFPETEGFIMAIQDQVIATRNYKKHIIKDANVKHTRCRMCDEGNENVEHIIAGCQTLASTEYTRRHNNVAKIIHTKLCKQALQVEETPYYKYKPEAVIDTPQIKIYWDRTIQTDKTVLHNRPDIVYQIKEQKCTYLIDIAVPAPANIKSKMSEKVNKYIPLANDMKETWEQDKVVVIPIVIGATGEIPKKLHESIEKLGLEPNTYLQLQKAVILDTCNIARKVLNIK

SEQ ID NO: 9622 - protein, 1179 aa, Pterostichus madidus
MANTRHKRYSGGTGYQAGPVRNRRDDRQSGPEQGEASGATQVVGTTRRERNTANNISDSPTISVATAAAVPTGVERGKRTRWTQEMNRFLYKTYLLITKMETDTQNYSAKLYKEITGKFPELRNKTLMNILSQKRVIFTKNRIPQEDIINIRAEVERELRGDEIEGEENTQIAGDNTQPVPQSQEHQIDEDVMNTFQTMATMYSGMQPACKPKLQKLREDKSTKQTINQINKIISHNAEECTTLLSLHALLYTGAITTLTMHNRKTRTHTGRVDKARKPPWQERIERKISMLRKDIGRLTQACTQPQNKKLQELAQEILHRHKNTENNTFNEVKDLLKQKLVVQACRLKRYKESNERRRQTKLFHNNQRLFYRTLDQPATNENNNIAPNPEQTLLFWKGIWEKEKAHNIGATCIKVEKKRIEKVQIMTPIKITPDDIRQATKNTQNWKAPGNDHIHNFWLKRFTGAHEKLAELLDLAINNPQTIPDFMTEGITYLLPKTSPPSEDPSKYRPITCLPTMYKILTSIIATKIYDHLEKHQIISEEQKGCRKNSRGCKEQLLIDTAIIEEAKAKKQSLHTAYIDYRKAFDSVPHTWLLEVLKVYKVNPHIINTLKHTMGTWRTNLSMNKATMGRININRGIFQGDSLSALWFCLSMQPLSTLLQNSRKGYTISGTQHLISHLFYMDDLKLICSSQKDLQKLLRITEDFSHDIRMVFGIEKCKINAMNRGKWVETDSYEMRHQQDELINAMEEHETYKYLGFEQKRGLEKHLIKEKLVERFRHRTKSLLRTKLHARNLATAINTYATPVISYSFGVLNWTQTELEDLNRTLRTMATKNLKHHPKSSMERFHLDRRKGGRGFTDFHNMYYKEIQNLRSFFNMKAQTSALHAAILKIDENRTPLKLATPTYDPLVHLVTDEQKIQRWKEKALHGRYISQLAEQHIDEKASHAWLQTSGLFPETEGFIMAIQDQVIATRNYKKHIIKDANVKHTRCRMCDEGNENVEHIIAGCQTLASTEYTRRHNNVAKIIHTKLCKQALQVEETPYYKYKPEAVIDTPQTKIYWDRTIQTDKTVLHNRPDIVYQIKEQKCTYLIDIAVPASANIKSKISEKVNKYIPLANDMKETWEQDKVVVIPIVIGATGEIPKKLHESIEKLGLEPNTYLQLQKAVILDTCNIARKVLNIK

SEQ ID NO: 9623 - protein, 1179 aa, Pterostichus madidus
MVNTRHKRYSGGTGYQAGPVRNRRDDRQSGPEQGEASGATQVVGTTRRERNTANNISDSPTISVATAAAVPTGVERGKRTRWTQEMNRFLYKTYLLITKMETDTQNYSAKLYKEITGKFPELRNKTLMNILSQKREIFTKNRIPQEDIINIRAEVERELRGDEIEGEENTQIAGDNTQPVPQSQEHQIDEDVMNTFQTMATMYSGMQPACKPKLQKLREDKSTKQTINQINKIISHNAEECTTLLSLHALLYTGAITTLTMHNRKTRTHTGRVDKARKPPWQERIERKISMLRKDIGRLTQACTQPQNKKLQELAQEILHRHKNTENNTFNEVKDLLKQKLVVQACRLKRYKESNERRRQTKLFHNNQRLFYRTLDQPATNENNNIAPNPEQTLLFWKGIWEKEKAHNIGTTCIKVEKKRIEKAQIMTPIKITPDDIRQATKKTQNWKAPGNDHIHNFWLKRFTGAHEKLAELLDLAINNPQTIPDFMTEGITYLLPKTSPPSEDPSKYRPITCLPTMYKILTSIIATKIYDHLEKHQIISEEQKGCRKNSRGCKEQLLIDTAIIEEAKAKKRSLHTAYIDYRKAFDSVPHTWLLEVLKVYKVNPHIINTLKHTMGTWRTNLSMNKATMGRININRGIFQGDSLSALWFCLSMQPLSTLLQNSRKGYTISGTQHLISHLFYMDDLKLICSSQKDLQKLLRITEDFSHDIRMEFGIEKCKINAMNRGKWVETDSYEMRHQQDELINAMEEHETYKYLGFEQKRGLEKHLIKEKLVERFRHRTKSLLRTKLHARNLATAINTYASPVISYSFGVLNWTQTELEDLNRTLRTMATKNLKHHPKSSMERFHLDRRKGGRGFTDFHNMYYKEIQHLRSFFNMKAQTSALHAAILKIDENRTPLKLATPTYDPLVHLVTDEQKIQRWKEKALHGRYISQLAEQHIDEKASHAWLQTSGLFPETEGFIMAIQDQVIATRNYKKHIIKDANVKHTRCRMCDEGNENVEHIIAGCQTLASTEYTRRHNNVAKIIHTKLCKQALQVEETPYYKYKPEAVIDTPQIKIYWDRTIQTDKTVLHNRPDIVYQIKEQKCTYLIDIAVPAPANIKSKMSEKVNKYIPLANDMKETWEQDKVVVIPIVIGATGEIPKKLHESIEKLGLEPNTYLQLQKAVILDTCNIARKVLNIK

SEQ ID NO: 9624 - protein, 979 aa, Hofstenia miamia
MKTKKKKEIIGLDENGNFIKRISRDDNVTQQLSDLSLTTHPTKISSGQYESHTSNPTLDLSSTGLTQQLSDLSLITHLTKLSTSEPNINNNFLTFIKHRVPTLNRVPKGSRKCLAELFIKCLNDILKTPDSEEHWQKLMSLSKKVLKLPERSGKNKANLTNILNKRIKNFTFSLDVNETLNKHKPKKSKNISQNRLISNKIESGDIKGAVRIISSDDSVAECNMDVYNKLLSKHPQKNSVRVFKNLETSAEINFGAVKNYINSFPPGSAGGPDGLKPQILKDLIHEKNGEIASILIQKLTDFVNIILHGNVPVCVRPVFFGANLTALNKKDGGVRPIAVGNTFRRLASKCAGFLVKNERIASYKNVQLGYGVPKGCESAAHAVRNYINSIDDDNFVLFKVDFKNAFNCIDREKLLLTIYEKYPAIFNYTNNAYGQNSYLFFGDQIILSSVGAQQGDPEGPPLFSDIINPIIQNFSCDLNVWYLDDGNFADNYQKVIATYSYLKTEAEKIGLSVNPSKCEIVFLGSPVNGKKKKIMQEFYEVCPGVSETEIKDLVILGAPIGDKAVENCLSEKLNTFSNMAKNLEKIDTHYAFFLLKNCLHVPKMNYFLRTAPCFLKKEILIKFDQCLIECLKKTCNIGLNSLASMQIQLPVRLSGMGIPSVVNIAPSAYLASVTGSFKLISNILHGKTFPDIYSNSALCAWQNQVSSTVLPCGSPFQKDWLEPVHEKIFSDIISGCNEYNKKRLTAFKGKFQGSWLNALPSKSLGLKCTDAQFRISFALRTGSKICEKHICSCETPVDELGTHGLSCKKSAGRFSRHSHLNDFFKRTIGTAGYNSVLEPPGLCRSDGKRPDGMTLIPWSRGQSLVWDVTVVDSLAPSRICRDVNHIKEAEERKAAKYTEISNSGYLFQPLAFDTQGNCGPSTKSFLKDLGDKLVNISGDKRAKEFLYQSITSIIIQHNAACVLGTLDKQERMDEIFTLL

SEQ ID NO: 9625 - protein, 979 aa, Hofstenia miamia
MKTKKKKEIIGLDENGNFIKRISRDDNVTQQLSDLSLTTHPTKISSGQYESHTSNPTLDLSSTGLTQQLSDLSLITHLTKLSTSEPNINNNFLTFIKHRVPTLNRVPKGSLKCLAELFIKCLNDILKTPDSEEHWQKLMSLSKKVLKLPERSGKNKANLTNILNKRIKNFTFSVDVNETLNKHKPKKSKNISQNRLISNKIESGDIKGAVRIISSDDSVAECNMDVYNKLLSKHPQKNSVRVFKNLETSAEINFGAVKNYINSFPPGSAGGPDGLKPQILKDLIHEKNGEIASILIQKLTDFVNIILHGNVPVCVRPVFFGANLTALNKKDGGVRPIAVGNTFRRLASKCAGFLVKNERIASYKNVQLGYGVPKGCESAAHAVRNYINSIDDDNFVLFKVDFKNAFNCIDREKLLLTIYEKYPAIFNYTNNAYGQNSYLFFGDQIILSSVGAQQGDPEGPPLFSDIINPIIQNFSCDLNVWYLDDGNFADNYEKVIATYSYLKTEAEKIGLSVNPSKCEIVFLGSPVNGKKKKIMQEFYEVCPGVSETEIKDLVILGAPIGDKAVENCLSEKLNTFSNMAKNLEKIDTHYAFFLLKNCLHVPKMNYFLRTAPCFLKKEILIKFDQCLIECLKKTCNIGLNSLASMQIQLPVRLSGMGIPSVVNIAPSAYLASVTGSFKLISNILHGKTFPDIYSNSALCAWQNQVYSTVLPCGSPFQKDWLEPVHEKIFSDIISGCNEYNKKRLTAFKGKFQGSWLNALPSKSLGLKCTDAQFRISFALRTGSKICEKHICSCETPVDELGTHGLSCKKSAGRFSRHSHLNDFFKRTIGTAGYNSVLEPPGLCRSDGKRPDGMTLIPWSRRQSLMWDVTVVDSLAPSRICQDVNHIKEAEEHKAAKYTDISNSGYLFQPLAFDTQGNCGPSTKSFLKDLGDKLVNISGDKRAKEFLYQSITSIIIQHNAACVLGTLDKQERMDEIFTLL

SEQ ID NO: 9626 - protein, 976 aa, Hofstenia miamia
MKTKEIIGLDENGNFIKRISRDDNVTQQLSDLSLTTHPTKISSGQYESHTSNPTLDLSSTGLTQQLSDLSLITHLTKLSTSEPNINNNFLTFIKHRVPTLNRVPKGSRKCLAELFIKCLNDILKTPDSEEHWQKLMSLSKKVLKLPERSGKNKANLTNILNKRIKNFTFSLDVNETLNKHKPKKSKNISQNRLISNKIESGDIKGAVRIISSDDSVAECNMDVYNKLLSKHPQKNSVRVFKNLETSAEINFGAVKNYINSFPPGSAGGPDGLKPQILKDLIHEKNGEIASILIQKLTDFVNIILHGNVPVCVRPVFFGANLTALNKKDGGVRPIAVGNTFRRLASKCAGFLVKNERIASYKNVQLGYGVPKGCESAAHAVRNYINSIDDDNFVLFKVDFKNAFNCIDREKLLLTIYEKYPAIFNYTNNAYGQNSYLFFGDQIILSSVGAQQGDPEGPPLFSDIINPIIQNFSCDLNVWYLDDGNFADNYQKVIATYSYLKTEAEKIGLSVNPSKCEIVFLGSPVNGKKKKIMQEFYEVCPGVSETEIKDLVILGAPIGDKAVENCLSEKLNTFSNMAKNLEKIDTHYAFFLLKNCLHVPKMNYFLRTAPCFLKKEILIKFDQCLIECLKKTCNIGLNSLASMQIQLPVRLSGMGIPSVVNIAPSAYLASVTGSFKLISNILHGKTFPDIYSNSALCAWQNQVSSTVLPCGSPFQKDWLEPVHEKIFSDIISGCNEYNKKRLTAFKGKFQGSWLNALPSKSLGLKCTDAQFRISFALRTGSKICEKHICSCETPVDELGTHGLSCKKSAGRFSRHSHLNDFFKRTIGTAGYNSVLEPPGLCRSDGKRPDGMTLIPWSRGQSLVWDVTVVDSLAPSRICRDVNHIKEAEERKAAKYTEISNSGYLFQPLAFDTQGNCGPSTKSFLKDLGDKLVNISGDKRAKEFLYQSITSIIIQHNAACVLGTLDKQECMDEIFTLL

SEQ ID NO: 9627 - protein, 933 aa, Hofstenia miamia
MKTKKKKEIIGLDENGNFIKRISRDDNVTQQLSDLSLTTHPTKISSGQYESHTSNPTLDLSSTGLTQQLSDLSLITHLTKLSTSEPNINNNFLTFIKHRVPTLNRVPKGSRKCLAELFIKCLNDILKTPDSEEHWQKLMSLSKKVLKLPERSGKNKANLTNILNKRIKNFTFSLDVNETLNKHKPKKSKNISQNRLISNKIESGDIKGAVRIISSDDSVAECNMDVYNKLLSKHPQKNSVRVFKNLETSAEINFGAVKNYINSFPPGSAGGPDGLKPQILKDLIHEKNGEIASILIQKLTDFVNIILHGNVPVCVRPVFFGANLTALNKKDGGVRPIAVGNTFRRLASKCAGFLVKNERIASYKNVQLGYGVPKGCESAAHAVRNYINSIDDDNFVLFKVDFKNAFNCIDREKLLLTIYEKYPAIFNYTNNAYGQNSYLFFGDQIILSSVGAQQGDPEGPPLFSDIINPIIQNFSCDLNVWYLDDGNFADNYQKVIATYSYLKTEAEKIGLSVNPSKCEIVFLGSPVNGKKKKIMQEFYEVCPGVSETEIKDLVILGAPIGDKAVENCLSEKLNTFSNMAKNLEKIDTHYAFFLLKNCLHVPKMNYFLRTAPCFLKKEILIKFDQCLIECLKKTCNIGLNSLASMQIQLPVRLSGMGIPSVVNIAPSAYLASVTGSFKLISNILHGKTFPDIYSNSALCAWQNQVSSTVLPCGSPFQKDWLEPVHEKIFSDIISGCNEYNKKRLTAFKGKFQGSWLNALPSKSLGLKCTDAQFRISFALRTGSKICEKHICSCETPVDELGTHGLSCKKSAGRFSRHSHLNDFFKPPMGTAGYNSVLEPPGLCRSDGKRPDGMTLIPWSRGQSLVWDVTVVDSLAPSRICRDVNHIKEAEERKAAKYTEISNSGYLFQPLAFDTQGNCGPSTKSFLKDLGDNL

SEQ ID NO: 9628 - protein, 967 aa, Hofstenia miamia
MKNGNFIKRISRDDNVTQQLSDLSLTTHPTKISSGQYGSHTANPTLDLSGTGLTQQLSDLSLITHLTKLSTSEPNINNNFLTFIKHRVPTLNRVPKGSRKCLAELFIKCLNDILKTPDSEEHWQKLMSLSKKVLKLPERSGKNKANLTNILNKRIKNFTFSLDVNETLNKHKPKKSKNISQNRLISNKIESGDIKGAVRIISSDDSVAECNMDVYNKLLSKHPQKNSVRVFKNLETSAEINFGAVKNYINSFPPGSAGGPDGLKPQILKDLIHEKNGEIASILIQKLTDFVNIILHGNVPVCVRPVFFGANLTALNKKDGGVRPIAVGNTFRRLASKCAGFLVKNERIASYKNVQLGYGVPKGCESAAHAVRNYINSIDDDNFVLFKVDFKNAFNCIDREKLLLTIYEKYPAIFNYTNNAYGQNSYLFFGDQIILSSVGAQQGDPEGPPLFSDIINPIIQNFSCDLNVWYLDDGNFADNYQKVIATYSYLKTEAEKIGLSVNPSKCEIVFLGSPVNGKKKKIMQEFYEVCPGVSETEIKDLVILGAPIGDKAVENCLSEKLNTFSNMAKNLEKIDTHYAFFLLKNCLHVPKMNYFLRTAPCFLKKEILIKFDQCLIECLKKTCNIGLNSLASMQIQLPVRLSGMGIPSVVNIAPSAYLASVTGSFKLISNILHGKTFPDIYSNSALCAWQNQVSSTVLPCGSPFQKDWLEPVHEKIFSDIISGCNEYNKKRLTAFKGKFQGSWLNALPSKSLGLKCTDAQFRISFALRTGSKICEKHICSCETPVDELGTHGLSCKKSAGRFSRHSHLNDFFKRTIGTAGYNSVLEPPGLCRSDGKRPDGMTLIPWSRGQSLVWDVTVVDSLAPSRICRDVNHIKEAEERKAAKYTEISNSGYLFQPLAFDTQGNCGPSTKSFLKDLGDKLVNISGDKRAKEFLYQSFNYSIIQHNAACVLGTLDKQERMDEIFTLL

SEQ ID NO: 9629 - protein, 979 aa, Hofstenia miamia
MKTKKKKEIIGLDENGNFIKRISRDDNVTQQLSDLSLTTHPTKISSGQYESHTSNPTLDLSSTGLTQQLSDLSLITHLTKLSTSEPNINNNFLTFIKHRVPTLNRVPKGSRKCLAELFIKCLNDILKTPDSEEHWQKLMSLSKKVLKLPERSGKNKANLTNILNKRIKNFTFSLDVNETLNKHKPKKSKNISQNRLISNKIESGDIKGAVRIISSDDSVAECNMDVYNKLLSKHPQKNSVRVFKNLETSAEINFGAVKNNINSFPPGSAGGPDGLKPQILKDLIHEKNGEIASILIQKLTDFVNIILHGNVPVCVRPVFFGANLTALNKKDGGVRPIAVGNTFRRLASKCAGFLVKNERIASYKNVQLGYGVPKGCESAAHAVRNYINSIDDDNFVLFKVDFKNAFNCIDREKLLLTIYEKYPAIFNYTNNAYGQNSYLFFGDQIILSSVGAQQGDPEGPPLFSDIINPIIQNFSCDLNVWYLDDGNFADNYQKVIATYSYLKTEAEKIGLSVNPSKCEIVFLGSPVNGKKKKIMQEFYEVCPGVSETEIKDLVILGAPIGDKAVENCLSEKLNTFSNMAKNLEKIDTHYAFFLLKNCLHVPKMNYFLRTAPCFLKKEILIKFDQCLIECLKKTCNIGLNSLASMQIQLPVRLSGMGIPSVVNIAPSAYLASVTGSFKLISNILHGKTFPDIYSNSALCAWQNQVSSTVLPCGSPFQKDWLEPVHEKIFSDIISGCNEYNKKRLTAFKGKFQGSWLNALPSKSLGLKCTDAQFRISFALRTGSKICEKHICSCETPVDELGTHGLSCKKSAGRFSRHSHLNDFFKRTIGTAGYNSVLEPPGLCRSDGKRPDGMTLIPWSRGQSLVWDVTVVDSLAPSRICRDVNHIKEAEERKAAKYTEISNSGYLFQPLAFDTQGNCGPSTKSFLKDLGDKLVNISGDKRAKEFLYQSITSIIIQHNAACVLGTLDKQERMDEIFTLL

SEQ ID NO: 9630 - protein, 840 aa, Hofstenia miamia
MSLSKKVLKLPERSGKNKANLTNILNKRIKNFTFSLDVNETLNKHKPKKSKNISQNRLISNKIESGDIKGAVRIISSDDSVAECNMDVYNKLLSKHPQKNSVRVFKNLETSAEINFGAVENYINSFRPGSAGGPDGLKPQILKDLIHEKNGEVASILIQKLTDFVNIILHGNVPVCVRPVFFGVNLTALNKKDGGVRPIAVGNTFRRLASKCAGFLVKNERIASYKNVQLGYEVPKGCESAAHAVRNYLNSIDDDNFVLFKVDFKNAFNCIDREKLLLTIYEKYPAIFNYTSNAYGQNSYLFFGDQIILSSVGAQQGDPEGPLFSDIINPIIQNFSCDLNVWYLDDGNFADNYQKVIATYSYLKTEAEKIGLSVNPSKCEIVFLGSPVNGKKKKIMQEFYEVCPGVSETEIKDLVILGAPIGDKAVENCLSEKLNTFSNMAKNLEKIDTHYAFFLLKNCLHVPKMNYFLRTAPCFLKKEILIKFDQCLIECLKKTCNIGLNSLASMQIQLPVRLSGMGIPSVVNIAPSAYLASVTGSFKLISNILHGKTFPDIYSNSALCAWQNQVYSTVLPCGSPFQKDWLEPVHEKIFSDIISGCNEYNKKRLTAFKGKFQGSWLNALPSKSLGLKCTYAQFRISFALRTGSKICEKHICSCETPVDELGTHGLSCKKSAGRFSRHSHLNDFFKRTIGTAGYNSVLEPPGLCRSDGKRPDGMTLIPWSRGQSLVWDVTVVDSLAPSRICRDVNHIKEAEERKAAKYTEISNSGYLFQPLAFDTQGNCGPSTKSFLKDLGDKLVNISGDKRAKEFLYQSITSIIIQHNAACVLGTLDKQERMDEIFTLL

SEQ ID NO: 9631 - protein, 1386 aa, Caenorhabditis sp.
MLKFKKNKAQYPSTSGVTPKRRRSASPLAPVGLAGMNVSWGGVVEEQVEIPEPGVLVAPTTPKVRRDNQRAAARGDAGSGYNVGKQGSGSPPVSPVRASTPVWRSLTELTSLVESAPTAAAELARADARHSGARHREVRGLIRSCTPERRGETDDSESENEGFAGSGRNALYHGRTVFGKVYHVWDEKQDRVLLDCMSKSFDFASYGTNWAIVHEEWTSQAHRGLVPHRTLKALRDRTSGPKWAPRGQEPIREASPVRQPVPSMEEHTSVTATRVLASPAVLKRKRQEPTDRQVVKRARYGRPERGRMDLARELTVSQIAERVGEGRPERGRLDPAQGDVTDIEMDVACPEAEPMMETDDGDEDDRVVKFNEFFAEAIKIDTRTVPRRPRKQITKSDLLWVDGMVREKTSQGKTVQRITAALYAGAKVLEWSQDTRRQLALGRWRDYRASVEDRKRELVGQLNDVMKELQRRKLRGNFDEGVGMRNKRIRRNGPNGTRHLLSRLVELKQTLKVIEFNYDRSTRIRQLRSRRTPPTRTILQSSKNLVDVSADDVRKVWHPIVGREGRVTIPQEFEEWAAQLDMPSHDEVTQAEWTEWWNETMESMKPWRAPGPDGVYAFFWKSVPTARTFLCEWVREKVLGDDNLLPPGMAAGRVVMIPKGTSSKPEDMRPITCLNVSCKILNSMVWKVCAEHLSSLIPPEQQALKQGESNTLHAHIMDAGVATDFRYRKRGKEVHVGWIDYKKAFDSIPHRYIEWLLERVGMRPSARKAYLSFLAGLRVQYEVATVRGKELSSPLKYRRGVPQGDTLSPRLFCLAIAPISYALRQKVSGYTFAHKGENGAETSITHLLYVDDLKLYAPSPDELHKAMGLVQRLSRGVGLLYNPKKCSTAHFGGPEAPFESVPVLSLDQVYKYLGVEQLLGTNVEASRDRITTSVLERADKIWGSDLAFPEKVKMFNMTVAPVVRYFACNHCATGDDRCSSLRAWGEQLDRATRKVMQRHDARFRKCSKYRPYIAVKHLGLGIKSLADEAEIATVFAGVYLLLTPSLGLYKDLAVKQDKRKKRTMVTDLKWVLRKYELDAEVDDSGTIRIGDVNVTNRVEATRALTKLLQARHREDRLNRWNSKSASSAVYNADTDRELSGLWLKSCYLPARVVRDAIGLQEHQVLFNGHPSMGYRKCRFCEETETCQHVVSVCQTFRASLMVKRHNAVCRVIYDHIRWSLDLGRLHTSRTPDPHKVFPSGIEIYYDYRFVTRQVMKYRRPDIVVVLPEKKMIIIIEVAVTWVNHLDDRTRWKYAKYALNGNAGREPPYGNGAALATDLQHSTGFRVEVVPIVVGACGEVHNSFESYLQQIPGCQTPGRRRRLLLLIQKRVVRNTVGIMRAHLASPQ

SEQ ID NO: 9632 - protein, 1258 aa, Pristionchus arcanus
MAPGPRPPPQVPTVPLPFPISEDDLYCLPCSQESPPTHRRYCDKSTYAKHLVLYHNAAKIVMVCRGCGYEDLELRKMTKHRNGNPQCQLAVAPPPVPRPPDPSGRPVPQRRPRVPTGRTATTRSLTTVPPVSAPPVPGTPPQASTLTTATVPTPITVSQDPSPVPSPARATVPPRSPTPAPVPSPILVITPLGPPQAPSPITVGSPTRPRRASNRRILDSTPLRRQAVSSPTPSLDSSISSLSVVGSIAGSGNSRSRPRTRSPSPTRNSVSPNIIADRNPPNSPTSDLASLRTCPSPTSDPSPSPSPARRGPATGGVQSRRTRNTVTPTRNRPVPGRPPPPQPVPIPRPGPFPTDTWIGRVAGASTIADLDAITKELEESVVARRPPDPSRPPPSTIPANRRNRKRKRVEPPLSPQELQTLWRRSRARAYAKITDGSSTQCTVPIQDIHKHFQSVHATTAHVPGPVPLPPPRRPRTNDPLSPPITSREILDRFKRCSDTAPGPDTIRYSEWKGVDPSGRLLAALFCKVQSIGMPHRWKESETTLIHKKGDPSVISNWRPISLLPTLSKIYANVLSARLTCWATRNGRLSRSQKGFLPFRGCSEHSFLVKSAIEDARRRKKTLSLAFLDLKNAFGSVPHSTIRESLSWLGLSPQSIEIAFSSFIGSSTRVKNADGSTPPIPIDSGVVQGSPLSPILFNLAIEPMLRSAARVDPGYPFHGHSVSAAAYADDVCLLAPSPTVLQRQLDQVSSLADWSGLTFNQGKCGSISISGKTNTQDVFTLQSAPIPALSDTDCYQYLGTPTGTRQFKSGSDAIMKMDDELTKIDQSALSPWQKLEAVRTFVIPQLSFSLANSSVAKAPLNALDKKIKKCAKRWLHLPLRASNEVLYMEFDKGGQSLIPLSLLADISTVSHASSLLHSRDPSVSDLSLRILQEVARKRAQRRVTDDEVALYLSGETTGIYRTATIDIPSIWTEARSATRRLASSIPISWISTTGNAPLVALSGSPLSPFRVQQTITKAYRELQYKSLLAKKDQGHSYRSQYIPHLSNQWIREGNFLRFADWRFIHRARLNLLPVNAARRWDATANKTCRRCGAASETLAHVLSVCPKGMPQFKARHDLIHDRLKKAIRPSPHITVTHDQVVPGSGSLLRPDIVYIDNRSKSVSIVDVHLPYENGEGAIERAHATKAAKYDPLIRHFEREGFRAEFHSAIVSTMGRIPRMTLEALKSLRISSGYTRLLYKLMATDAIKGSRNTYVTHITG

SEQ ID NO: 9633 - protein, 1089 aa, Ormyrus pomaceus
MHKDWYDELQAEKVRGATKKDRWSEEEKEMMARKEAELTLQHKKVTNINQKLAAVFAGRTIEAVKGHRRRASYKRRVEKYMELLRQQIRASNSSEEYLSADETTSSSYVVQNTALTKYFDELEALKIKGHDNHRIDTICKMTSWRTKEEIVIELGLFLLEYLPKNPPNERKTTTQSSSRPMSNKKRRRAEYARVQDLWKKDPSRCIKRITEDQLEQQEGIRKEIMEPYWNEVFSKNSGMAPNIKPSDNIQEHLWNPITSEEIKTAFPPRNTAIGPDHVTVKTLRGIPLEVLARIFNLFLWCGRLPEYLYTSRTVLIPKKKGAVDPGDYRPITVSSVVVRTLHKILANRLKIIPLDPRQRGFRDTDGCCDNTALLDLTLRYHRKKFRKLYMASLDMRKAFDSVTFEAIQEVLQAKGIPKEMTEYIMDMYERSNTILQHGGWESPKIHPTCGVKQGDPLSSYIFNFIMDEMLLRIPPEIGADLDGMKINILAFADDLVLVASTQKGLQELLDVSANFLYTCGLEANANKCLTVAMINVPKEKKSVIDAKCSFNIRGTKIPSMKRTDEWKYLGLIFTPEGKTTAKVKQQLEEKLSRITKAPLKPQQRLWALRVIIIPSIMYKLTMGSITFGYLRSIDRKIRSYVKTWLHLPHECPSAYIHACIKDGGLGIPSVRWRAPANWLGRLQHLEESTYVTGSVSSTFIRNEKRKTELRLTDGTKILKTSNMADEWWAEKLYASVDGAALKNSRAVKGQHAWIGSFTKFLSGKDFVNMTKARINALPTRARTSRGRRKDRTCRGGCGNSETLNHVVQHCHRTHGARIKRHDAIVHYMAERLRKIEYNVLLEPKITTPDGLRKPDLAATRGQTSFIIDVQIMSEQTNLDEANKAKVTKYGKDQHVIQYIKGKFKSSSVITLGVTLSCRGIWSKTSAEKLQELGFISFHESVKVGKCVGLRVLPFIPTGSRALLTGTESSLSRVNSFLLADQSMSVDISFLPSLCLSFFLSFFLSFSPSLLPSFSLSFSLSFFLSFFLSLLLSSLLSWNSAWRHASLKEWGAQTCQNVLPLIIGLIRGVELQSVSGSAQSVHRTILHRLR

SEQ ID NO: 9634 - protein, 1003 aa, Dicyema japonicum
MFLHDTVPCTKCLSSIPRKNGFRCPICQQYFHLSCLKISKKAAIKIPNLLCPSCLPSKSLASNALRSALLPSSLSQEDIRKNNRSAFSEVPETARTFPTGANDHPLDVDSFLIKLSEFRGSLKIPLRIPKSARIQVSTCLSSFINDALTSDSCEAWSRLISFAPLALGIPIRTGRNPCPLSTLIKENINRISSHPITTLQEVNCIRPQKNKNNILNCSENTLNERVSIKLAEGDVRAAIRTVSNDDTVLKPTPDVLTHLRSKHPDPPPDVRPLTRPSVLSTLNFSEEEIRILIKSFGKSSCGGLDGLRPGHIKDLTSPSTGEAGNTLISAIAALAGRILGGEIPHFARNMLFSAHLLAFRKKDGGIRPIAVGNYFRRLTAKLAARSVCPRLSSEFAPRQLGVGIANGCEAAVHAARSLFFSNGALSSPHAAVKLDLRNAFNSVRRDRILDACLKRAPEIAQLVFLSYGEESTLIFGNEVVRSRTGVQQGDPLGPLLFALAIDDAVHSLNSPFNLWYLDDASICGSIESISRDLSQLIPALGLLGLELNEGKCELLNINYLQENFLDLRKSITDLIPGVKTTNMSEATFLGCPLSPAGLRAHLVKKDLEFCELTSKLLKLDSHIAFFLMKSSIHMPKLLYTLRCLPCYSHLDILSSMETSLKSSTEAVLNIAFDEIGWTQGKLPVRFGGIGLRSPKDLAPHAHFSSVSSSRQLVREVLLPFNELSLGFPADDLQKFWTAANLPIPSEMSRQKEWDEIWASQSFSTLQPLLDQHRLACLLSAAQKHSGSWLDAFPSASTGSLLDDETLRIGTALRLGLDICTPHRCRCGGVVDVKGLHPLSCRRSAGRSPRHGALNDVISRALNAAGFPNVLEPVGLDRGDGKRPDGMTTFPFRNGKCLIWDATCTDTWSPSAILSSASSPGSAAALAEAHKTEKYSKIAAQHSFVPLAFETSGASGPQTSKFLKDVGLLIARRKMDERESSWLWQRISLTIVRGNAQAIRLAGI

SEQ ID NO: 9635 - protein, 910 aa, Apis cerana
MTESEARSPSSESSEESIYESATEDEGGGEIRETAQQEDRWQEPFLQYITSNHLDEGDFLRGVEKEIEGLAPARNIKQEEVDAVLQKFVDSLKEGTQHEEGNRQRQKGATKKGKKTTHNRRKRFLYAKHQELYRKCPRKLLDLAIMGESSKGEEAISLPGADSVGPLYKNLWGQSGPKKLANLQPQNNKIEIDKIWTPITMGNLLEKFKKIKVDTAAGIDQIKKLHLRRKGALHVFAKLCNLLMLHRIYPAQWKVNRTTLIPKPRKSAEEVENWRPITIGSLLGRIYSAMIDRKLRSKVKQHPRQKGFTQEDGCKNNIAILSSALAKMKDESGGVITVIDISKAFDTVPHEAISKGLEAKEVPSLVSKYIQDMYRGCKTVIHCKDKTLPVDLLRGVKQGDPLSPLLFNLTMDPIIGILDETTEGVKLGSENVSVLAFADDIVLLAKDKETAEKQNRLLHKHLKELNMKVSAEKCGTFQIQHKLKTWFLKDPQLTLGQQSIPYADPEKAIKYLGTTLNPWRGMCEASIKEIIDAAKSVTRLKLKPHQKINLIRIYLLPRYIDKLVANPPSLGTLDRIDHEIKQIIKQILHLHPSTTDGVIYSEKSHGGLGVQRVANIVKLAKLRNSIQMTRSQDIATKTAFERQEEITKKYAASVGLSWPCEIEAIEATRKKLKKADTSRWKSFASQGQGIDEFFGDRIGNAWLYNPELLKPSRYLDALKLRTNTCGTRVALRRAKRDINVNCRRCGVQVETLGHILGLCTHTKNKRIKRHDEICGLIANNIPKEYAIFREPELEIDGDRRKPDMVIKDHDKVYVVDVTVRYENNDSLRKAYKEKCKKYEKTAESLKQRFKAKESRVIPVVIGCRGAVPRATVESLRILGLQTKHALTASLIALRSSIEITNEFLDYDHIP

SEQ ID NO: 9636 - protein, 1169 aa, Apis cerana
MACATTWNGPGKETEQLEKCWGHSNFPRYQKTSKNIMSRNRGASDAGAPGPGTPVADLSATDERATGDDQCLSPDHDLDMINLPLSGQIKCYWCSKKGKDIRFLQESQYAKHKDTQHPQEVIIWRCAACHKEFEKLHGCRCHLPKCKGRKIWEGVAKFKCESCEESFLSQRGLSMHERHRHPAIRNQKRAQSTSRGNTRPVSRASVWSKDETDLLIKLNQRYKHLKQPNVALREYFPDKTLKQISDKRRLLPVQEEEVATTQSEARSPSSESSEESIYESATEDEGGGEIRETAQQEDRWQEPFLQYITSNHLDEGDFLRGVEKEIESLATARNIKQEEVEVLLQKFVDSLKEGTQHEEGNRLRQKGATKKGKRTTHNKRKKFLYAKHQELYRKCPRKLLDLAIMGESGKGEEAISLPGADSVGPLYKNLWGKSGPEKLANLQPQNNKIEIGEIWTPITMGNLLEKFKKIKVDTAAGIDQIKKLHLRKKGALHVFAKLCNLLMLHRIYPAQWKINRTTLIPKPGKSAEEVENWRPITIGSLLGRIYSAMIDRKLRSKVKQHARQKGFTQEDGCKNNIAILSSALAKMKNESGGVITIIDISKAFDTVPHEAISKGLEMKGVPSLVSKYVQDMYRGCKTVIHCKDKTLPVDLLRGVKQGDPLSPLLFNLTIDPIIGILDETTEGVKLGSENVSVLAFADDIVLLAKDKETAEKQNRLLYEHLKELNMKVSAEKCGTFHIQHKLKTWFLKDPQLTLGQQSIPYADPEKAIKYLGTTLNPWRGMCQASIKEIIDAAKSVTRLKLKPHQKINLIRIYLLPRYIHKLVANPPPLGTLDQIDHEIKQIIKQILHLHPSTTDGVIYSDKSHGGLGVQRVANIVKLAKLRNSIRMTRSQDIATKTAFERQEEITKKYAASVGLSWPCEIEEIEATRKKLKRADTSRWKSFASQGQGINEFFGDRVGNAWLYNPELLKPSRYLDALKLRTNTCGTRIALRRTKRDMDVNCRRCGVQVETLGHILGLCTHTKSKRIRRHNEICELIADSISKKFAILREPELEIDGDRRKPDMVIKDHEKVYVVDVTVRYENNDSLRKAYKEKYKKYEKTAETLKKKFKAKESRVIPVVIGCRGAVPRATVESLRILGLQTKHALTASLIALRSSIEITNEFLDYDHIP

SEQ ID NO: 9637 - protein, 1133 aa, Apis mellifera
MSSNEEGASDTGAPGPGVPVADVSAADGRATYDDHGMSTDYEKQTIELPLNGQIQCLWCHIEGRNQRFLQESQYLKHKDTQHPKGEIIWRCAACQKEFEKLHGCRCHLPKCKGRKEAKGVAKFKCDSCEESFLTQRGLSMHELHRHPAIRNLKRTQGTSRGNTRPINRASVWSKEETDLLIKLNERYKHLKQPNVALKEYFPDKTLKQISDKRRLLPVQEPEDVATTDETGPPPSDSSEESIYESATEDEGGGDMQQTAPNDSWKEPFIQSIRTNHLEEEDSLRKVEEAIERMAMNEGVTEQEVGTLLEQFVDSLTQSPTTERKGSRRKSQKTTKRKTTHNNRKKFLYAKHQELYKKSPRRLLELALSGESSSGRQVVNLPEADSVGPLYKSLWGQIGPDQTHRNQPMCNNIDMSEIWTPIALESLVEKFKKIKSDTAAGADQIKKFHLRKKGALHVFAKLCNLLMLHRIYPAQWKTNRTTLIPKPGKSAEEVENWRPITIGSLLGRIYSAMIDRKLRSKIKQHIRQKGFTQEDGCKNNIAILSSALTKMKEDSGGIITIIDISKAFDTVPHGEISQSLMNKGVPSPICEYIQKMYIGCKTIIYCRDKKTLPVDILRGVKQGDPLSPLLFNLIIDPIIGTLDETTEGIKLENENISVLAFADDLVLLAKDKETADKQNRLINEYLDDLKMKVSAEKCTTFEIKRQNKTWFLGDPQLTLGQQRIPYADPEAAIKYLGTNFNPWRGLCKTSIKEIIDAARTVKQLKLKPHQKINLIRTYLLPRYIHKLVANPPPLGTLDLIDKQLKTIIKEILHLHPSTTDGLIYTDKSHGGLGIQRVANIVKLAKLKHSILMTRSEDNAVKIALNGQEGMVKRYATSIGLQWPCGIEEIEETRKKLKRADTNKWKTLISQGQGIKEFFGDKTGNAWLYNPEMLRPSRYLDALKLRTNTYGTKAALHRAKRDIDINCRRCGVQVETLGHILGLCTHTKNKRIKRHDEICDLIAKNVSKEYVIFREPEVEVNGDRRKPDMVIKDHDKVYVVDVTVRYENNDSLNKAYKEKENKYKETAEIMRRDLKAKESRVLPVVIGSRGAVPRATIENLKVLGLQTKHALTASLIALRSSIEMANEFLDYDHTT

SEQ ID NO: 9638 - protein, 841 aa, Apis mellifera
MAMNEGVTEQEVGTLLQQFVDFLTQSPTTEKKGSRRKSQKTTKRKTTHSNRKKFLYAKHQELYKKSPRKLLELALSGESGSGRQVVNLPEANSVGPLYKSLWGQIGPEKPHRNQPMCNNIDMSEIWIPIALESLVEKFKKIKSDTAAGADQIKKFHLRKKGALHVFAKLCNLLMLHRIYPAQWKTNRTTLIPKPGKSAEEVENWRPITIGSLLGRIYSAMIDRKIRSKIKQHIRQKGFTQQDGCKNNIAILSSALTKIKEDSGGVITIIDISKAFDTVPHGEISQSLMNKGVPSLICEYIQNMYIGCKTIIHCRDKKTLPVDIRRGVKQGDPLSPLLFNLIIDPIIGTLDKTTEGIKLENENISVPAFADDLVLLAKDKETADKQNRLINRYLDDLKMKVSAEKCTTFEIKHQNKTWFPGNPQLTLGQQRIPYADPEAAIKYLGTNFNPWRGLCKTSIKEIIDAARTVKQLKLKPHQKINLIRTYLLPRYIHKLVASPLPLGTLDLIDKELKIIIKEILHLHPSTTDGLIYTDKSHGGLGIQRVANIVKLAKLKHSILMTRSEDNAVKIALNGQEGMVKRYDTSIGLQWPCGIEEIEETRKKLKRADTNKWKNLTSQGQGIKEFFGNKTGNAWLYNPEMLRPFRYLDALKLRTNIYGTKVALHRTKRDTDINCRRCGVQVETLGHILELCTHTKNKRIKRHDEICDLIARNVSKEYVIFREPEVEVNGDRRKPDMVIKDHDKVYVVDITVRYENNDSLNKAYKEKENKYKETAETIKRDLKAKESRVLPVVIGSRGAMPRATIENLKVLGLQTKHALTASLIALRSSIEMANEFLDYDHTT

SEQ ID NO: 9639 - protein, 1133 aa, Apis mellifera
MSSNEEGASDTGAPGPGVPVADVSAADGRATYDDHGMSTDYEKQTIELPLNGQIQCLWCHIEGRNQRFLQESQYLKHKDTQHPKGEIIWRCAACQKEFEKLHGCRCHLPKCKGRKEAKGVAKFKCDSCEESFLTQRGLSMHELHRHPAIRNLKRTQGTSRGNTRPTNRASVWSKEETDLLIKLNERYKHLKQPNVALKEYFPDKTLKQISDKRRLLPVQEPEDVATTDETGPPPSDSSEESIYESATEDEGGGDMQQTAPNDSWKEPFIQSIRTNHLEEEDSLRKVEEAIERMAMNEGVTEQEVGTLLEQFVDSLTQSPTTERKGSRRKSQKTTKRKTTHNNRKKFLYAKHQELYKKSPRRLLELALSGESSSGREVVNLPEADSVGPLYKSLWGQIGPEKTHRNQPMCNNIDMSEIWTPIALESLVEKFKKIKSDTAAGADQIKKFHLRKKGALHVFAKLCNLLMLHRIYPAQWKTNRTTLIPKPGKSAEEVENWRPITIGSLLGRIYSAMIDRKLRSKIKQHIRQKGFTQEDGCKNNIAILSSALTKMKEDSGGIITIIDISKAFDTVPHGEISQSLMNKGVPSPICEYIQKMYIGCKTIIYCRDKKTLPVDILRGVKQGDPLSPLLFNLIIDPIIGTLDETTEGIKLENENISVLAFADDLVLLAKDKETADKQNRLINEYLDDLKMKVSAEKCTTFEIKRQNKTWFLGDPQLTLGQQRIPYADPEAAIKYLGTNFNPWRGLCKTSIKEIIDAARTVKQLKLKPHQKINLIRTYLLPRYIHKLVANPPPLGTLDLIDKELKTIIKEILHLHPSTTDGLIYTDKSHGGLGIQRVANIVKLAKLKHSILMTRSEDNAVKVALNGQEGMVKRYATSIGLQWPCGIEEIEEMRKKLKRADTNKWKTLISQGQGIKEFFGDKTGNAWLYNPEMLRPSRYLDALKLRTNTYGTKAALHRAKRDIDINCRRCGVQVETLGHILGLCTHTKNKRIKRHDEICDLIAKNVSKEYVIFREPEVEVNGDRRKPDMVIKDHDKVYVVDVTVRYENNDSLNKAYKEKENKYKETAEIMRRDLKAKESRVLPVVIGSRGAVPRATIENLKVLGLQTKHALTASLIALRSSIEMANEFLDYDHTT

SEQ ID NO: 9640 - protein, 1133 aa, Apis mellifera
MSSNEEGASDTGAPGPGVPVADVSAADGRATYDDHGMSTDYEKQTIELPLNGQIQCLWCHIEGRNQRFLQESQYLKHKDTQHPKGEIIWRCAACQKEFEKLHGCRCHLPKCKGRKEAKGVAKFKCDSCEESFLTQRGLSMHELHRHPAIRNLKRTQGTSRGNTRPTNRASVWSKEETDLLIKLNERYKHLKQPNVALKEYFPDKTLKQISDKRRLLPVQEPEDVATTDETGPPPSDSSEESIYESATEDEGGGDMQQTAPNDSWKEPFIQSIRTNHLEEEDSLRKVEEAIERMAMNEGVTEQEVGTLLEQFVDSLTQSPTTERKGSRRKSQKTTKRKTTHNNRKKFLYAKHQELYKKSPRRLLELALSGESSSGREVVNLPEADSVGPLYKSLWGQIGPEKTHRNQPMCNNIDMSEIWTPIALESLVEKFKKIKSDTAAGADQIKKFHLRKKGALHVFAKLCNLLMLHRIYPAQWKTNRTTLIPKPGKSAEEVENWRPITIGSLLGRIYSAMIDRKLRSKIKQHIRQKGFTQEDGCKNNIAILSSALTKMKEDSGGIITIIDISKAFDTVPHGEISQSLMNKGVPSPICEYIQKMYIGCKTIIYCRDKKTLPVDILRGVKQGDPLSPLLFNLIIDPIIGTLDETTEGIKLENENISVLAFADDLVLLAKDKETADKQNRLINEYLDDLKMKVSAEKCTTFEIKRQNKTWFLGDPQLTLGQQRIPYADPEAAIKYLGTNFNPWRGLCKTSIKEIIDAARTVKQLKLKPHQKINLIRTYLLPRYIHKLVANPPPLGTLDLIDKELKTIIKEILHLHPSTTDGLIYTDKSHGGLGIQRVANIVKLAKLKHSILMTRSEDNAVKIALNGQEGMVKRYATSIGLQWPCGIEEIEETRKKLKRADTNKWKTLISQGQGIKEFFGDKTGNAWLYNPEMLRPSRYLDALKLRTNTYGTKAALHRAKRDIDINCRRCGVQVETLGHILGLCTHTKNKRIKRHDEICDLIAKNVSKEYVIFREPEVEVNGDRRKPDMVIKDHDKVYVVDVTVRYENNDSLNKAYKEKENKYKETAEIMRRDLKAKESRVLPVVIGSRGAVPRATIENLKVLGLQTKHALTASLIALRSSIEMANEFLDYDHTT

SEQ ID NO: 9641 - protein, 1133 aa, Apis mellifera; identical to SEQ ID NO: 9640

SEQ ID NO: 9642 - protein, 1067 aa, Apis mellifera
MSSNEEGASDTGAPGPGVPVADVSAADGRATYDDHGMSTDYEKQTIELPLNGQIQCLWCHIEGRNQRFLQESQYLKHKDTQHPKGEIIWRCAACQKEFEKLHGCRCHLPKCKGRKEAKGVAKFKCDSCEESFLTQRGLSMHELHRHPAIRNLKRTQGTSRGNTRPTNRASVWSKEETDLLIKLNERYKHLKQPNVALKEYFPDKTLKQISDKRRLLPVQEPEDVATTDETGPPPSDSSEESIYESATEDEGGGDMQQTAPNDSWKEPFIQSIRTNHLEEEDSLRKVEEAIERMAMNEGVTEQEVGTLLEQFVDSLTQSPTTERKGSRRKSQKTTKRKTTHNNRKKFLYAKHQELYKKSPRRLLELALSGESSSGREVVNLPEADSVGPLYKSLWGQIGPEKTHRNQPMCNNIDMSEIWTPIALESLVEKFKKIKSDTAAGADQIKKFHLRKKGALHVFAKLCNLLMLHRIYPAQWKTNRTTLIPKPGKSAEEVENWRPITIGSLLGRIYSAMIDRKLRSKIKQHIRQKGFTQEDGCKNNIAILSSALTKMKEDSGGIITIIDISKAFDTVPHGEISQSLMNKGVPSPICEYIQKMYIGCKTIIYCRDKKTLPVDILRGVKQGDPLSPLLFNLIIDPIIGTLDETTEGIKLENENISVLAFADDLVLLAKDKETADKQNRLINEYLDDLKMKVSAEKCTTFEIKRQNKTWFLGDPQLTLGQQRIPYADPEAAIKYLGTNFNPWRGLCKTSIKEIIDAARTVKQLKLKPHQKINLIRTYLLPRYIHKLVANPPPLGTLDLIDKELKTIIKEILHLHPSTTDGLIYTDKSHGGLGIQRVANIVKLAKLKHSILMTRSEDNAVKIALNGQEGMVKRYATSIGLQWPCGIEEIEETRKKLKRADTNKWKTLISQGQGIKEFFGDKTGNAWLYNPEMLRPSRYLDALKLRTNTYGTKAALHRAKRDIDINCRRCGVQVETLGHILGLCTHTKNKRIKRHDEICDLIAKNVSKEYVIFREPEVEVNGDRRKPDMVIKDHDKVYVVDVTVRYENNDSLNKAYKEKENKYKEQRKL

SEQ ID NO: 9643 - protein, 1326 aa, Lissonota sp.
MATWREQELDILREFIANRPETPVTRDELQELAERLPGRSTAGIKKKVCEIRTAARVVNIPAGREIRPRSPRWTEEEEQRLADRYREQEGVSKKAKIQNIANEFPGRSVGTLTERLRTKFPEIYYLQVPERERQQMPLRPGALRADEEVNNDEQIQVELPNRPAQGNVPRHDNVPMHGNIPVQNNGDEDPVIPAVEEEQRPLHVDIDIPAGNEDNIDNRENEGTPRVQEEIEEREREREDHPARAADEENARDEVEEEGEIGENIDETTERRLKRGFETLLRTLKRNRKSPQFKTVNIKNTITNKEILRSIDTILERKIRNIEEKGMPDARERKEIKDSILTAMALLKQEYEGKKDTNPPKHVKMERSIRKLMKKIQTAKSLRRYCAQLNTAQRALVQEIRRRRTNLRSFIATWQDRVDNLTRQAERQKRKYEARIIREKFMQNPAKRTIYEDRKKDNLDAERVENHFKTLYMAENGNRPATPIFNDWIQELGNYQQRAQVEEAVRRENIQEYVEEILKDTRPWKAAGEDGIPAGAYKLLKSAREYLVTFIHDTVTGKRSLNETDVRGRVVLIYKDGDNGDPANYRPISVLNIDYKTLTAVITRMVRKKLPAWAIPCEQLARENVWGTVQGMLIDKGHTQAARLRASQMSQRDRPYNYSAWFDFSKAYDSIHHWQLIRLINVLPIPATVRNTLKAAVRRWTVTIKVGRTNTNPIRVARGVYQGDTVSPLLFIVMTAGILRKLKRDRAINSVTQGKHIVLAFMDDIKCHAPSAEGIREIAATLSRAAGEIGLQLNTRKCGTFAVRRGGEEENEGVQEAGEGLRRDVMQDEEVFLPEVREGYKYLGITQLERDTGTNDIRVKAMVLKELRSILDSKLAVPQMIQLFNTSIIPAATYVLGNLYPDEQQRTTMKKCRGIDTEIRKILREKGLKRYSTSTAGVYAPTDSGGMGVKSISDEVEKQHVRRGIYLMLHPELATTRVQYERLRKKGWRNPLTDAERVLEKYGVRIQRTPDQQGDLEPSEVTKICRATTRELEKQQEKCRLFDRNKNMRYGNTIAAYGDTVTIPMLKSHHLESWMSSILCAAMEEQLVELGANPENRRRCRKGCENIENAYHVVSACMTAEYTVRHNFAVYWALRTIMDATRAPEEVKNRLHFGSGSLVAEYGNERAGRTKIRAGGYVATERPLKHNKPDILIMTENPPRITVIEVSVAHLQNLPDQELLKRTRYQTNSEIEITPENMREVPRGESLVSQLQQAHGCEINLAVMVVGCFGEIAHTAELNRTLNILKKLGVTKKSMENCFKRISYSVAHATAKILVRRCHDAGEALE

SEQ ID NO: 9644 - protein, 1575 aa, Azonax typhaon
MEAVRNRKVPQAGTSVNNEGESRPESTGSGCSAYSGGSNVTRTSEQGHYRLRPRTTNSKNLQKNQTTSPASSTRSLFSSLPSTNSFTRPNSLSSLDSSIPQEDVALEANFIANSMPTTCGPRTRNKWSFEMNEFILRTYLHLTLMETDIKTYLPSLHTKFIERFPERQNVSRQRIGDQRRAIMNKKLLEQEVIDRIYKEVQTEIHSIHNTSVAIETQTLSTQSAQLTQLNPHRRMSWSNKLNESLIKCYYRVTKIQTDMTSYRKALHEAFINLHPDLAHLSEQRIADQKRVIINNKYISDHRLKTLQEEVAVEINNSTENTIHHKTRAQNNTRYNSSQFYTPHISNDQTITRQNTEQNIVRSGSIETETIDRATKNIITDKNQASLIQSFLQILAETTDTPIADRFLLPKAKINKKFLHNFHTLNKYLPEVLTLNNSLRKINNVIYAVAKTLIINNEQTPFLPKNVIKNKTAAPWKKRIQIKIDTHRKELGQFIEIGRGVNTRRMLNIKDKLYKKHNIANENDRRNIEEILKQKVKALAGRIKRYEDINAKKEQNKLFNENEHKLYRSLEYRNISNINIPSKDSVEDFWKSILSNPIEYNKNALWIKQLEETQTDIQTADRDAVTVEEVKAALSKVHNWKTPGIDKIQNYYLKHLTSVHIHIATLFTKIISGSETLEDWFTTGQVILIPKNERTEIPKNWRPIACLPTTYKLLTSVLANQLYNHCQENDIMAIEQRGCRRGARGCKDHLMVNKTILEDAHKSRKNLSMAWIDYQKAFDSISHEWLLKILDIYKCPRRIKCFLQIVMPSWKVIMTARGTHESIITEPIDIKRGIFQGDSLSPLLFCLAINPISFILNKYKVNGYTLRDSFCINHLLYMDDLKVYANSKNDMKILLDNIDVFTSDIGMSFGLDKCNTLNIKAGRRDRAIGNGHVLLNGETFNELGIESTYKYLGIHESGNIEHKDVREQFTKEYFKRIKKLLNTHLNARNVIKGINTYAIPVLLYSFGIINYKITDLKQIDIKTRKILNIKKAHQQKAEVERLYLPVNQGGRGLLNVENTYKTQILKYNQYLKIEQDYLIKVIKQHDINKNKYSITKDAQKVETELKLTSKNKYTDKDIKEAMVKIQNDKWRGKPLHGQFPKKVLDQMNIDKQLSFKWTKNQQINPSIESTIFAIQDQAVKTRQYQRDILKLQVDGKCRMCACKDETAQHIISGCEKLAGSYYIKRHNNLVQYVHWCLAQKHKIEVAKLWWQETLIQPQVKENDTAKILWEIPVQTDVTVTHNRPDLIYTDKENNKTYLIDVTVPTDYNIGAKEIEKLSKYHLLRTEITRLWQTHTTIIPIVIGATGVVAKNITKYIEKLNANIDIGILQKQAAIHTTTILSKVLGDTAFIQNTQDSNIQAPRIAQQTINPPLTQIPNTLNIRPTSKTPVTQNICSTPVIQQTSNTPIIHQTPNTPITQITCRTPVIQETHNTPSISQLSNIPITQETGSTPVIQQTPNTPITQEKGSTPVIQETSNTPIIQQTPNTQDAVNTTNGGTSSAQHNSERKNKLPQHSQTVATTRQLRPRNVSNIEATKK

SEQ ID NO: 9645 - protein, 1248 aa, Deilephila porcellus
MERQSRNERIGSLPGGDRRGTSGADAGRDSMRTVSGSQLNRRARVGSPEDITADLRGGEGTDDVLQGRAPPTSSVGSSAMTTSNENNDKRKKWSTEELQELMFCYFQAKAVGSGYISRLHQIFTQRNPNNPKIHKFNGNTLSNQARRIIKQNIISKELLDEIQKQAVDSESLENREGNVYDVYQQPTQDTIPQTLNTDHIIYNTPEQAQAIEHLTQNIEVNEDQNPLILDFLRILAATKETPLPDRLFLPKAKINKHFLQNFHILNKYLPNLLITNNSLMEINNIIYAAAKTLIMKNQQTPYAPKNTLKTKSEPPWKKRIKIKIDKYRKDLGQLIEIDRGINTRRMIKIKDKLYRKFNIQSENDQKNAIETIKQKIKALAGRIKRYEDINTKKEQNKLFNENEHMLYRSLGGQSFKDIKLPSKVGIKEFWSSVLSNPIQYNNEATWIKKVEESSNEISTINTEEILEEHVKSATKKMLNWKTPGIDKIHNYYIKYFTSTHKYLALVYTKIVTGIEALEDWFTTGQVILIPKNEQTEDPKNWRPIACLPTMYKLLTSILTNTLYTHCHDNNIIAVEQRGCRRGARGCKDHLMVNKSILEDAHKSQKNLSMAWIDYQKAFDSISHNWLLKVLDIYKCPPIIKRFLQVTMPAWKVVMTARGHRETITTDPIYIRRGIFQGDSLSPLLFCLALNPLSFILNKYDRKGYKLKNNVYINHLLYMDDLKIYSNNSNNLKVLLNSVEIFTSDIGMKFGLDKCNILNISSGRRSKATGEGHVLLNGEKIKQLGIEDKYKYLGIHESGKIEHSTIREQITKEYFRRIKKLLNTHLNSRYLIKGINTYAIPVLLYTFGIINYKTSDLKKIDTKTRKLLAINKAHQQKADVERLYLPVSEGGRGLINVEYMYKTQILKYKQYLIGEHDYLIKAIIEHDKHKDKFSIVNEAQTIERELHLPQGNIHLEKEIKLAIIKNRNDRWRSKQLHGQFPKKVLDQANVNKELSFDWIKKQHIAPKIESSIFAIQDQAVITRQHQRDILKEQIDGKCRLCANKDETTQHIISGCEKLAGTYYVRRHNNLVQYVYWCLARKHKMEVSDFWWKETLTQPQIKENESAKILWEFPVHTDITVTHNRPDIIYIDKNNNKTYLIDITVPSDYNIGAKEIEKLSKYHLLRNEVSRLWNTQAIIIPVVIGATGIVAKSISKYIDQLNCNINISILQKQAAIHTSTMLSKVLGDTVFVTTQRSLYPQDTHNVQNNN

SEQ ID NO: 9646 - protein, 1262 aa, Chiomara georgina
MGAGYIKMLHTLFRTRNPNNPKIHKFTGNTLSTHARNLIARNAIPKETLESIKIRAEDFTENNTLNEDSNDSNIHQATDNPSPSTPSDTQYRASPTESTVEIFPEISEREVSDDRRRKWTDAEMKELMFCYYKARLEGPGYINRLKTIYIERNPHSSKINRINGTYLSNQARTIIKHDLLSQELLNRIQSSAEGIQETVTANTNNEEHTELQVTEREIVHYSPEQTEIINQATHNILDGENQDPLILKFLNTLSETREIPIAERYHLPRAKINKQFIENCTKLNKYLPNLLEIHNTLRDINEILYAAAKTLIVANNQSPYKPMTTLKSKKTPAWKKRIQGKINKFRKQLGQFIEIEKEVKSRRMMKIKDRLFRQYRIQNVDDLKNTMEILKQKIKALAARIKRYEEMNNRKQHNKLFSENQHKFYRSLGNHSDRDIKIPEKSDIEQFWTQIYSNPIEYNTEAKWIEEIEDLSNDIDTATVEEITIDQVKIAIRKLHNWKTPGIDRLQNYYLKYFTSAHKYLAKLFTKIVGGREDLEEWFTTGQVILIPKNENTEDPKNWRPIACLPSMYKVLTSVLANLLYIHCSNHNILAVEQRGCRRGARGCKDHLMVNKAILEDAHQSQRNLSMAWIDYQKAFDSVSHEWILKVLDVYRCPPMIKNFLLMSMPSWKVVMTACGSTESITTEPISIRRGIFQGDSLSPLLFCMAINPLSHILNKYERKGYKLKDSFWINHLLYMDDLKVYSNNKSNLKVLLDSVEVFTNDIGMNFGLDKCNIIHINSGHVTDTIGTGHVLLSGETFDQLAIDKTYKYLGINESGNINHNIIREQIIKEYFKRIKKLLNTYLSSRNIIKGINTYAIPVLLYSFGIINYKNSDLKKIDTKTRKLLAIKKAHQQKAEVERLYLPILQGGRGLLNVEFMYKTQILKYKQYLKEGQDHLIETIIKHDSSKDKYSIIKEAKEIETEIHLKINSTHTDNEIKEAIIKTQCIRWRNKPLHGQFPKKVLDQANVDVENTFRWIKKQQISPSIEASIFAAQDQAVMTNQHQRDILGLPIDGKCRLCACKDETTQHILAGCEKLAGTYYVKRHNNLVQYIYWCLARKHNIVVDRFWWKEALTQPKTVENETAKIMWEIPIQTDITVTHNRPDLVYMDKTTNNTYLIDITVPSDYNIGAKEVEKLSKYHLLKTELRRLWNTRTHVIPIVIGTTGVVAKSLSRYIEKLNCHIDTTILQKQAAIHSVTILSKVLGDTVFVNKAALGGVSASSFL

SEQ ID NO: 9647 - protein, 1290 aa, Emesis heteroclita
MTNGALVTFVIMKRQINNCNIGPLPEGDRRGMSGADAGRDSMQTVSGSLLNRRARVGGPENSTADQWDGGVTEDALQSRATPSECSAGSSVATISNNVSNDRRRKWSNEEMEELMFCYFQAQFQGLGYIARLERLFKDRNSCNPKIHKFNGNTLANQARRILKQNIISQEVLNRIKRRAETLELESIENRTQTEEQIAPNTQQDTQITHLNTYTDITQSIQQANVTIQAEDVNQLTQNINVNEDQDPLILDFLRTLAETKEQTVADRYLLPKAKINKQFLQNLHKLDRYLPNLLIVNRSLREINDIVYATAKTLILNNNQTPFLPKPATKSKSEPRWKIRIATKLEKCRKEVAQLIEISRGISTRRMHKIKEKLYSKYKIENDNDFRNQIEILKQRIKALAARIKRYEDINNRKEQNRLFSENEHRFYKNLENSSNNGNDHIKLPSKENIEQFWKSILSNPIQYNQEAQWIEELENLTDTLNSNDAEEITIEQVKTAIERLHNWKTPGIDKIHNYYLKYLTSTHRYIASLFTNIVQGNEIIEEWFTTGQVILIPKNEHTEEPKNWRPIACLPSIYKLLTSVLANQLYCHCHENNIIAIEQRGCRRGARGCKDHLMVNKAILEDAHLSQKNLSMAWVDYQKAFDSISHEWLLKILDIYKCPLVIKNFLHAVMPQWRVVMTARDSQNVVITDPICIRRGIFQGDSLSPLLFCLAINPLSHILNKYELKGYKLKDSVYINHLLYMDDLKIYANHRNNLRVLLDSVEIFTNDIGMSFGLDKCNTVHLKSGHRSGTIGEGHVLLSGDTFSELAIRSTYKYLGVHESGKIEHSVVREQITKKYFKRVKMLLCTHLNSRNLVKGVNTYAIPVLLYSFGIINYKISDLRKIDIKTRKLLNIKKAHQQKADVERLYLPITQGGRGLINVENMYKTQIIKYKQYLQIQADYLIQAIVQHDKNRNKYSIIKDFEEIERELSLPQSNTHINKEIKDAIIKIQNHRWRNKQLHGQFPKTVLDQTNIDKELSFKWIKTQKISPSLESSIFAIQDQAIMTRQYQRDILKEPIDGKCRLCATKDETAQHIISGCEKLAGTYYVKRHNSLVKYVYWCLAKKHEIKVSDHWWQEALYQPQVKENDSAKILWEIPIQTDITVAHNRPDIIYVDKINNKTYLIDITVPSDYNLGAKEIEKLSKYHLLRTEISRLWNTQTTVIPIVVGATGVVAKSITKYIEKLDTPINISILQKQAAIHTSVIISKVLGETVFVHNTNVEYTQQQTQITQQSSDIQLTFYPHTTNYTSII

SEQ ID NO: 9648 - protein, 1336 aa, Eueides isabella
MPPKIQPHVRIDHLITWGADTRCEITGVANVALVTHLTMEPFNIDKRIGSLPGGERRGTSGADAGRDSMQAVSGSLLNRRARVGEPEGITAEQRGGVGTGDALQSGASMLVDHSAGSSVEIIQELKDDKRRKWSKEEERELMYCFYKAQSQGPGYINRLFTLFRDRNPSNPKIFKFNGNTLATQARRIIKQNIVSQELLNRIKDEAERTVIENADLTSDVTELDLPIAETTNHIQPNLHTNTQHEVHTNTQLPLEHMDGTDQLTREIVVTEDQDPLILNFLQVLAETREIPIESRLFLPKAKINKYFLQNLHKLNNYLPNILVTTETLKELNNVIYATAKTLIVTNDQTPFKPKKIVKRISDPPWKRRIKERIEKNRKELGQLLEIGRGVNTSRMINIKTKLYSKHNIRNDNDRNNVVEILKQKVKALAARVKRYEDMNNRKEQNKLFNENEHRLYRSLGNKNTSNDIKLPSRDNVEEFWKSILSKPIKYNKDAKWIEEIENTTERVNTEDPQEIAEEEVKLAVLKLKNWKTPGIDRIQNYYIKYLTSTHKYLASIFTNVIAGREQLQEWFTTGQVILIPKNEHTENPKNWRPIACLSSIYKLLTSVLANLLYNHCQENNIMAIEQRGCRRGVSGCIDHLMINKAVLEDAHLSQKNLSMAWIDYQKAFDSVPHEWLLKVLDIYKCPPMIKTFLKIVMPAWKVVMTARGTNGSLTTEPIHIKRGIFQGDSLSPLLFCLAINPVSFILNKYKSKGYKLKDSFWVNHLLYMDDLKIYANNTNNLEVLLDSIEIFTNDIGMNFGMDKCNTIHIKAGHRNKTIGEGHVLLSGDTFEQLGIGRTYKYLGIHESGKIEHSQIREQITKEYFKRTKKLLNTHLNSRNIIKGINTYAIPVLLYSFGIINYRNRDLKSIDIKTRKLLSINKTQQQKADVERVYLPISEGGRGLINVENMYNTQILKYKTYLEKETDDLIKVIVQHDTNRDKFSIVKDAQEIEKQLGLPQNSTYTNNDIQQAILKKQKGKWRSKKLHGQFPKAVLDQANIDKEGSFKWIKKQQISPSVESTVFAIQDQAVVTRQHQRDILKLDVDGKCRLCANKDETTQHIISGCENLAGAYYVKRHSSLVQYMHWCLAKKHKFQVSNLWWKETLLEPQVKENNEAKIMWEVPIQTDVTVAHNRPDLIYIDKINNNTYLIDVSVPSDYNIGAKEIEKLSKYHLLKTEIRRLWNTHSTVIPIIIGATGIISKSLHRYIDELNLTIGITILQKQAAFHTTTILSKVLGDTVFVNHTSVTPQPKSDAQNTQQTTHAIDVHHSSSRLRTQKLHTHTSPKNSTINTRRSRRR

SEQ ID NO: 9649 - protein, 1343 aa, Heliconius hermathena
MLQYRTVFLPPKIQPHVRIDHQITWGADTRCEITGVANVALVTHLTMEPFNIHTRIGSLPGGERRGTSGADAGRDSIQAVSGSLLNRRARVGEPEGITDEQRGGVGTDSALQSGASMLIDHSAGSSGETIQESNGDKRRKWSKEEERELMYCFYKAQSQGPGYINRLFTLFKDRNPSNPKIHKFNGNTLSNQARRIIKQKVISQELLNRIKDEAEGRAIENTILTRNITELNLIPEESNNHTQTNLHINIQHEIHTNIQLTQEQVEITDTLTRNVVVAEDQDPLILNFLQVVAETREIPIESRDFLPKAKINKYFLQNLHRLNSYLPNLLITTESLRELNNIIYATAKTLIINNKQKPFKPKNTIRKISDPPWKKRIKNRIEKNRKELGQLLEIGRGVNSSRMINIRTKLYNKYNIKNDNDRSNTVEILKQKVKALAGRIKRYEEKNNRKDQNKLFNENEHRLYRSLGNNSAAYDMKLPSRNNVEEFWKSILSKPINYNKNAKWIEEIEVSSEKIITEDPQDITEEEVKYTLTKFKNWKTPGLDRIQNYYLKYLTSTHKYLARVFTNIIRGREQLEGWFTTGQVILIPKNENTENAKNWRPIACLPSTYKLLTSILANLLYNHCQENNIMAIEQRGCRRGVRGCKDHLMINKAILEDAHLSQKNLSMAWIDYQKAFDSVSHEWLLKVLDIYKCPPMIKAFLNIAMPTWKVIMTARGTNESVTTEPIHIKRGIFQGDSLSPLLFCLAINPISLILHKYKVKGYKLKDSFWINHLLYMDDLKIYANNRNNLEVLLDSIEIFTKDIGMTFGLDKCNTIHIEAGHRNNTIGEGHVLLSGDTVEQLGIGRTYKYLGIHESGKIDHNQIREQVTKEYFKRTKKILNTHLNSRNIIKGINTYAIPVLLYSFGIINYKKRDLKAIDIKTRKLLSIKKAQQQKADVERVYLPVVEGGRGLINIENMYNTQILKYKTYLENECDDLIKVIIKHDRNKNKYSIIKEAQEIEIELRLPQNRTYTNNEIKQAILKEQKDKWRGKHLHGQFPKAVLDQANIDKEGSFKWIKKQQITPSVESSVFAIQDQAVMTRQHQRDVLKLEVDGKCRLCGSKDETTQHIISGCEKLAGAYYVKRHNSLVQYVYWCLAQKHNFEVANLWWKETLMEPQVKENNQAKIMWEIPIQTDVTVTHNRPDLIYIDKANNKTYLIDISVPSDYNIGAKEIEKLSKYHLLKTEIRRLWNTQSTVIPIIIGATGIISKSLHRYIDELNATIDITILQKQAAFHTTTILSKVLGDTVFVNNTLITPQSTSDAPGTQTSQTVGSHDSSSSSRTQILQTNSVPRKNTINAHRRGRR

SEQ ID NO: 9650 - protein, 1298 aa, Xestia c-nigrum
MERQRNSTRIGPLPGGERRGTSGAGAGRDSIRAVSDSLLSRRARVGGPEGTTAEQRGGVDTDDALRSRATTPIDDSAGSSRETIQELNEDRRKKWSTEELKELMYCFFKAQSQGPGYINRLLTLFKDRNPTNPKIHKFNGNTLSNQARRIIKQNVFSQELLNRLKDEAEGRVADNTVITGNMTESHSPTDTSNTQHDLHTNTQHDTHTNTQPSVEQTELIDQLTRNVTVTEDQDPLILSLLQVLAETKETPINDRFLLPKAKINRHFLQNLHTLNSYLPNLLITTDTLRELNNIIYATAKTLILNNKQIPFAPKNVIKPKSDPPWKKRIQNKIEKYRKELGQLVEIGRGVSTRRMNNIKTKLYNKYNIQSENERNNTEEILKQKIKALAGRIKRYEEISNRKEQNRLFKENEHRLYRSLGTNSKSNDIKLPSKECVEAFWKSILSEPIQYNKDARWINELEISSDRIGTVESQEITEEQVKIAIRKLHNWKTPGIDKIQNYYLKYLTSTHKYFATVFTNIIGGREQLEEWFTTGQVILIPKNENTEDPKNWRPIACLPSSYKLLTSILANQLHNHCQQNNIMAIEQRGCRRGARGCKDHLMVNKAILEDAHQSQKNLSMAWIDYQKAFDSVSHEWLLRILDIYKCPPMIKTFLEITMPTWKVIMTARGTNESLSTEPIYIKRGIFQGDSLSPLLFCLAINPISSILSKYELKGYKLKDSFWVNHLLYMDDLKIYANNKNNLKVLLDSVEIFTNDIGMTFGLNKCNTIHIRSGHRNNTIGEGHILLSGDTFEQLGIGRTYKYLGIHESGKIEHSQIREQVTKEYFKRTKKLLNTHLNARNIIKGINTYAIPVLLYSFGIINYKNSDLKAIDIKTRKLLAIKKAQQQKADVERLYLPIIEGGRGLINVENMYKTQILKYKHYLYGENDDLIKVIVQHDKNRDKYSIIKEAQEIERELQLPTNNIYTDKEIKQAIVKKQNDRWRNKQLHGQFPKAVLDQANIDKEKSFKWIKKQQISPSIESAIFAIQDQAVMTRQHQRDILKVDIDGKCRLCAAKDETTQHIISGCEKLAGTYYVKRHNNLVQYVHWCLAKKHNIEVSSLWWKESLTQPQVKENEQAKIMWEIPIQTDVTVTHNRPDLIYVDKTNNNTFLIDIAVPSDYNIGAKEIEKLSKYHLLKTEIRRLWNTQTTVIPIVIGATGIISKSLHRYIDQLSITIDITILQKQAAIHTTTILSKVLGDTVFVNRSASTQETTPDTQQTSHTVDSQQSSVTQLSSTTHTPNTQSQPSTTQSIPSTRRRRRS

SEQ ID NO: 9651 - protein, 1125 aa, Apodemia arnacis
MTQAETINQLTQNINVDENQDPLILDFLRTLAETKEQPIADRYLLPKAKINKQFLQNLHKLDNYLPNLLIINNSLREINDIIYATAKTLILNNKQIPFLPKPVTKMKSEPSWKKRIATKLGKCRKEVGQLIEIGRGINSRRMQKIKDKLYSKYKIENENDLRNQIEILTQRIKALAARIKRYDDINNRKEQNRLFSENEHRFYRSLGNSNSNNINHVRLPSKDNIEQFWKSILSNPIHYNKEAKWIEEVENLTDEIHMNDPEEITVEQVKTAIKRLHNWKTPGIDKIHNYYLKYLTSTHKNLASLFTNIVKGNEMIEEWFTTGQVILIPKNEPTEDPKNWRPIACLPSTYKLLTSVLANQLYCHCHENNIMAVEQRGCRRGARGCKDHLMVNKAILEDAHLSQKNLSMAWVDYQKAFDSISHKWLLKILDVYKCPPIIKRFLQIVMPQWRVIMTARGSQNTVTTEPIYIKRGIFQGDSLSPLLFCLAINPLSYILNKYELKGYKLKDSVYINHLLYMDDLKIYANHSNNLKVLLDSVEIFTNDIGMSFGLNKCNVVHLKSGYRSSVKGEGHVLLSGETFGQLAIGNTYKYLGVHESGKIEHSVVREQIIKKYFKRLKFLLNTHLNSRNVIRGVNTYAIPVLLYSFGIINYKISDLKKIDIKTRKLLNIKKAHQQKADVERLYLPISEGGRGLINVENMYKTQIIKYKQYLQTQGDHLIQSIVQHDENRNKYSILKDSEEIERELSLPQGDIHINKDIKEAIIKIQNYRWRNKQLHGQFPKTVLDQANVDKELSFKWIKKQRISSSLESTIFAIQDQAVMTRQHQRDILKEPVDGKCRLCATKDETTQHIISGCEKLAGTYYVKRHNDLVKYVYWCLAKKHKINVSDLWWQEVLVQPQVKENDSAKILWEIPIQTDVTVAHNRPDLVYVDKANNKTYLIDITVPSDYNIGAKEIEKLSKYHLLRTEISRLWNTQSSVIPIVVGATGVVAKSIPKYIEKLETPIDISILQKQAAIHTSVILSKVLGETVFVNNTDIHDTQQTQVARQSPDTQITQQSSVTQNTQQPSDTPTTQQLDNTQITPQPEDTQITQQSLDIQNTTNQSQITSDTQISSNRRTRRRKKNIIST

SEQ ID NO: 9652 - protein, 1323 aa, Apodemia chisosensis
MKRQQNSLRFGPLPGGERRGTSGADAGRDSMQTVSGSLLNRRARAGGPENITADQRGGGVTEDALQSEASPFECSAGSSVATTTTNVSDDRRRKWSNEEMEELMYCYFKAQFQGPGYIARLERLFTDRNLNNPKIHKFNGNTLSNQARRILKQNIISQEILNQIKKRAETLESESTENLTQIEEQTATNTQQDIQMTHENTYTDITQNIQQNTQQEYTMTQAENINQLTQNINVDENQDPLILDFLRTLAETKEKPIADRYLLPKAKINRQFLQNLHKLDQYLPNLLIINNSLREINDIIYATAKTLILNNKQTPFLPKPVTKNKSEPSWKKRIATKLGKCRKEVGQLIEISRGINSRRMQKIKDKLYLKYKIENDNDLRNQIEILTQRIKALAARIKRYDDINNRKEQNRLFSENEHRFYRSLGNNNSNNINHIRLPSKDDMEQFWKSILSNPVHYNKEAKWIEEVENLTDDIHMNDAEQITVEQVKMAIKRLHNWKTPGIDKIHNYYLKYLTSTHKYLASLFTNIVKGKEIIEEWFTTGQVILIPKNEHTEDPKNWRPIACLPSTYKLLTSVLANQLYYHCHDNNIMAVEQRGCRRGARGCKDHLMVNKAILEDAHLSQKNLSMAWVDYQKAFDSISHKWLLKILDIYKCPPIIKHFLQIVMPQWRVIMTARGFQDTVTTEPIYIKRGIFQGDSLSPLLFCLAINPLSYILNKYELKGYKLRDGVYINHLLYMDDLKIYANHSNNLKVLLDSVEIFTNDIGMSFGLNKCNVVHLKSGYRSRVTGEGHVLLSGETFSQLAIGNTYKYLGVHESGKIEHSVVREQITRKYFKRVKLLLNTHLNSRNVIKGINTYAIPVLLYSFGIINYKISDLRKIDIKTRKLLNIKKAHQQKADVERLYLPILEGGRGLINVENMYKTQIIKYKQYLQIQGDYLIQAIVQHDENRNKYSIVKDFEEIESELSLPHGNTHINKDIKEAIIKIQNYRWRNKQLHGQFPKTVLDQANVDKELSFKWIKKQKISSSLESTIFAIQDQAVMTRQHQRDILKEPVDGKCRLCAIKDETTQHIISGCEKLAGTYYVKRHNDLVKYVYWCLARKHKISVSDLWWQENLVQPQVKENDSAKILWEIPIQTDVTVAHNRPDLIYMDKTNNKTYLIDITVPSDYNIGAKEIEKLSKYHLLRTEISRLWNTQSSVIPIVVGATGVVAKSITKYIEKLETPIDISILQKQAAIHTSVILSKVLGETVFVHSTDIHDVQQTQIAQQSPVTQITQQPGNTQITPHPEGTQMTQQSFDTQVTQQLTIINSSSDTNNSSNTRMRRRRKK

SEQ ID NO: 9653 - protein, 1299 aa, Xestia xanthographa
MERQRNSTRIGPLPGGERRGTSRADAGRDSIRAVSGSLLSRRARVGEPEGTTAEQRGGVDTDDALRSRATTPIDHSAGSSRETIQELNEDRRKKWSTDELKELMYCFFKAQSQGPGYINRLFTLFRDRNPTNPKIHKFNGNTLSNQARRIIKQNVFSQELLNRIRDEAEGRVTENTEITTNMTEPNSATDTTNTQHDSPTNTQHDIHTNTQPSLEQTELIDQLTRNVTVTEDQDPLILNFLQVLAETKETPIKDRYLLPKAKINRFFLQNLHTLNCYLSNLLITADTLRELNNIIYATAKTLILNNKQIPFVPKNVIKARSDPPWKKRIQNKIEKYRKELGQLVEIGRGVNTRRMNNIKTKLYNKYNIQCENERNNTEEILKQKVKALAGRIKRYEEISNRKEQNRLFKENEHRLYSSLGNNSNSNDIKLPSKECVEEFWKSILSKPIQYNKDARWIDELEISSNRIGTVESQEITEEQVKIAIGKLHNWKTPGIDKIQNYYLKYLTSTHKYFATAFTNIIGGREQLEEWFTTGQVILIPKNENTEDPKNWRPIACLPSSYKLLTSILANQLYNHCQENSIMAIEQRGCRRGARGCKDHLMVNKAILEDAHQSQKNLSMAWIDYQKAFDSVSHEWLLRILDIYKCPPMIKAFLEITMPTWKVIMTARGTNESLSTEPIHIKRGIFQGDSLSPLLFCLAINPISSILNKYEMKGYKLKDSFWVNHLLYMDDLKIYANNKNNLKVLLDSVEIFTNDIGMTFGLNKCNTIHIRSGHRNNTIGEGHILLSGDAFEQLGIDRTYKYLGIHESGKIDHSQIREQVTKEYFKRTKKLLNTHLNARNIIKGINTYAIPVLLYSFGIINYKNSNLKAIDIKTRKLLAIKKAQKQKADVERLYLPIIEGGRGLINVENMYKTQILKYKHYLEGDNDDLIKVIVQHDKNRDKYSIIKEAQEIERELQLPQNSIHTDKEIKHAIVKIQNDKWRNKQLHGQFPKAVLDQANIDKEKSFKWIKKQQISPSIESAIFAIQDQAVMTRQHQRDILKVDIDGKCRLCDSKDETVQHIISGCEKLAGTYYVKRHNNLVQYVHWCLAKKHNIEVSSLWWKESLTQPQVKENEQAKIMWEIPIQTDVTVTHNRPDLIYVDKTNNNTFLIDIAVPSDYNIGAKEIEKLSKYHLLKTEIRRLWNTQTTVIPIVVGATGIISKSLHRYIDQLNVKIDATILQKQAAIHTTTILSKVLGDTVFVNRPPSTLETTPETQQTSHTVDSQHLSVTQRSSTSDTPNTQSHPSTTQNIISTRRCRRRR

SEQ ID NO: 9654 - protein, 1162 aa, Maniola jurtina
METINNRKRIGPLPGGERRGTSGADAGRSSMQTVSDSLLSRRAGVGEPEDSTADQIRGGEGTGDALQNRASPTDSAGSTAMTTDENISDDKRRKWSIDEFMELMFCYYKARADGSGYLARLQKLFTERNPNNPKIHKFNGNKLANQARTVLKRNFISKELLDRVQKQAEGVISTENPEPISNEEQIITPMQTHSTQQQQQNTHQVQHTENTLEQAEIIDQLTRNIEVNEDQDPLIIQLLQMLAETKETPIEERLLLPKAKINKKFIDSLNLLNNYLPKLLITNNSLREVNDIIYASAKTLIVNNNQTPYAPKNTVKPKSDPPWKKRIQSKIDKLRKELGQLVEIQRGVNTLRMVKIKDRLYTKYNIQSENDHSNTAEIIKQKIKALAGRIKRYVDMNNRKEQNKLFNVNEHRLYRSLGSNGKKDIKVPNKQGLEEFWTSILSNPIEYNYEANWIKEIEHASREVITTDIQEITENQVKSALKKLLNWKSPGLDKIQNYYLKYLTSVHKYLALLFTNIVSGAERLEEWFTTGQVILIPKNENIEDPKNWRPIACLPTMYKLLTSVLADVMYSHCKENNIMAVEQRGCRRGARGCKDHLMTNKSILEDAHQSQKNLSMAWIDYQKAFDSVSHEWLLKLLEIYKCPTIIKRFLQLTMPFWRVIMTARGSQELITTEPIYIRRGIFQGDSLSPLLFCLAINPLSFILNKYEMKGYKLKDSVWINHLLYMDDLKIYANNTNNLRVLIDSVEIFTNDIGMRFGLDKCNILHISSGCRSNAIGEGHILLSGETFKQLELGQKYKYLGVQESGKIEHNAIREQITKEYFKRVKKLLNTHLNSRNLIKGINTYAILILLYSFGIINYKNSDLKKIDVKTRKMLAMKKAHKQKADVERLYLPVTEGGRGLINVEFMYKSQIVKYKQYLNEESDYLIKAIVQHDTHRDKYSIMKEAQEIERELHLQQKNIHTNKEIKDAIIKRHNEAWRSKQLHGQFPKKVLDQANVYKELSFKWMKRQQISPSIEASIFAIQDQAVMTRQHQRDILKEPVDGKCRLCATKDETTQHIISGCEKLAGTYYVKRHNNLVQYVYWCLAKKHNFEVSNLWWKEILTQPQVIENATAKILWEMPVQTDVTVTHNRPDLIYIDKNKNRTFLIDITVPSDYNIGPKEKL

SEQ ID NO: 9655 - protein, 1196 aa, Xestia xanthographa
MYCFFKAQSQGPGYINRLFTLFIDRNPTNPKIHKFNGNTLSNQARRIIKQNVFSQELLNRIRDEAEGRVTENTEITTNMTEPNSATDTTNTQHDSPINTQHDIHTNTQPSLEQTELIDQLTRNVTVSEDQDPLILNFLQVLAETKETPIKDRYLLPKAKINRFFLQNLHTLNSYLSNLLITADTLRELNNIIYATAKTLILNNKQIPFVPKNVIKARSDPPWKKRIQNKIEKYRKELGQLVEIGRGVNTRRMNNIKTKLYNKYNIQCENERNNTEEILKQKVKALAGRIKRYEEISNRKEQNRLFKENEHRLYSSLGNNSNSNDIKLPSKECVEEFWKSILSKPIQYNKDARWIDELEISSNRIGTVESQEITEEQVKIAIGKLHNWKTPGIDKIQNYYLKYLTSTHKYFATVFTNIIGGRDQLEEWFTTGQVILIPKNENTEDPKNWRPIACLPSSYKLLTSILANQLYNHCQENSIMAIEQRGCRRGARGCKDHLMVNKAILEDAHQSQKNLSMAWIDYQKAFDSVSHEWLLRILDIYKCPPMIKAFLEITMPTWKVIMTARGTNESLSTEPIHIKRGIFQGDSLSPLLFCLAINPISSILNKYEMKGYKLKDSFWVNHLLYMDDLKIYANNKNNLKVLLDSVEIFTNDIGMTFGLNKCNTIHIRSGHRNNTIGEGHILLSGDAFEQLGIDRTYKYLGVHESGKIEHNQIREQVTKEYFKRTKKLLNTHLNARNIIKGINTYAIPVLLYSFGIINYKNSNLKAIDIKTRKLLAIKKAQKQKADVERLYLPIIEGGRGLINVENMYKTQILKYKHYLEGENDDLIKVIVQHDKNRDKYSIIKEAQEIERELQLPQNSIHTDKEIKHAIIKIQNDKWRNKQLHGQFPKAVLDQANIDKEKSFKWIKKQQISPSIESAIFAIQDQAVMTRQHQRDILKVEIDGKCRLCDSKDETVQHIISGCEKLAGTYYVKRHNNLVQYVHWCLAKKHNIEVSSLWWKESLTQPQVKENEQTKIMWEIPIQTDVTVTHNRPDLIYVDKTNKNTFLIDIAVPSDYNIGAKEIEKLSKYHLLKTEIRRLWNTQTTVIPIVVGATGIISKSLHRYIDQLNVKIDATILQKQAAIHTTTILSKVLGDTVFVNRPPSTLETTPETQQTSHTVDSQHLSVTQRSSTSDTPNTQSHPSTTQNIISTRRCRRRR

SEQ ID NO: 9656 - protein, 1322 aa, Emesis mandana
MMERQRNSLRIGPLPGGDRRGTSGADAGRDSMQTVSGSSLSRRARAGGPENITADHRGGGITGDALQSEASSYESSAGSSVATTNNNVSDDRRRKWSNEEMEELMFCYFKAQFQGPGYITRLERIFTDRNLSNPKIHKFNGNTLSNQARRILKQNIISQEVLNRIRRKAESTEFESTENDTPIEEQIAINTQHDLQITQENRHVNTIQNNSQDSQQEYTTTHAENINQLTQNINVDENQDPLILEFLRALAETKEQPIADRYLLPKAKINKQFLQNLHKLNQYLPNLLVINHSLREVNDIIYATAKTLILNNKQTPFLPKPVIKPKSDPRWKVRIATKLEKCRKEVAQLIEINRGISSRRMQKIKDKLYFKYKIEDDNGLRNQIEILTQRIKALAARIKRYDDINNRKEQNRLFSENEHRFYRSLGSSNNNNINHIRLPSKENIEHFWKSILSSPVQYNKEAKWIEEIENLTDGINVNSTEDMITTEEVEISINRLHNWKTPGIDKIHNYYLKYLTSTHKYLAILFTNLVRGSEPIEEWFTTGQVILVPKNENTEDPKNWRPIACLPSTYKLLTSVLANRLYRHCHDNDIMAVEQRGCRRGARGCKDHLMVNKAILEDAHISQKNLSMAWVDYQKAFDSISHEWLLKILDVYKCPPIIKKYLQIVMPQWRVIMTARSSQNTVTTDPIFITRGIFQGDSLSPLLFCLAINPLSFILNKYELKGYKLKDSEYINHLLYMDDLKIYANHNNNLKVLLDSVEIFTNDIGMSFGLDKCNIIHLKSGYRSSTIGEGHVLLSGETFSQLAIGNTYKYLGVHESGKIEHSVVREQITKKYFKRIKMLLNTHLNSRNIIKGVNTYAIPVLLYSFGIINYKISDLRKIDTKTRKLLNIKKAHQQKADVERLYLPITQGGRGLINVENMYKTQIIKYKQYLQIQGDHLIQAIVQHDENRNKYSIVKDFREIERELGLPRGNTHINKEIKDAIVKIQNVRWRNKQLHGQFAKTVLDQANIDKELSFKWIKKQKISPSLESSIFAIQDQAVMTRQHQRDILKDPVDGKCRLCATKDETTQHIISGCEKLAGTYYVKRHNDLVKYVYWCLARKHKIEVSDLWWQETLIQPQVKENDSAKILWEIPIQTDVTVAHNRPDLIYVDKVNNKTYLIDITVPSDYNIGAKEIEKLSKYHLLRTEISRLWSTQTTVIPIVVGATGVVAKSISKYIEKLETPIDISILQKQAAIHTSVILSKVLGDNVFVHNTHTHDLQQTQIAPHSLDTQATHRTDDILITQQSDNTQITHQSLDAQDAPADSNITQESSYTRRTRRRRIIL

SEQ ID NO: 9657 - protein, 990 aa, Apodemia walkeri
MQKIKDKLYSKYKLESENDLRNQIEILTQQIKALAARIKRYDDVNNRKEQNRLFGENEHRFYRNLGNSNTDNTNHIKLPSKSNIEEFWKSILSKPVQYNKKARWIEETENLTDDLITNNAEEITVEQIETAIRRLHNWKTPGVDKIHNYYLKYLTNTHKYLASLFTNIVKGNEMIEEWFTTGQVILIPKNEHTEDPKNWRPIACLPSIYKLLTSVLANQLYCHCHENNIMAVEQRGCRRGARGCKDHLMVNKAILEDAHLSQKNLSMAWVDYQKAFDSISHEWLLKILDVYKCPPIIKRFLQIVMPQWRVIMTARGSQDTVTTEPIYIKRGIFQGDSLSPLLFCLAINPLSYILNKYELKGYKLKDSVYINHLLYMDDLKIYANHSNNLKVLLDSVEIFTNDIGMSFGLNKCSVVHLKSGYRSSVTGEGHVLLSGETFSQLAIGNTYKYLGIHESGKIEHSVVREQITKKYFKRVKLLLNTHLNSRNVIKGVNTYAIPVLLYSFGIINYKISDLRKIDIKTRKLLNIKKAHQQKADVERLYLPITQGGRGLINVENMYKTQIIKYKQYLQTQGDHLIQAIVQHDENRSKYSIVKDFADIERELSLPHGNTHIDKDIKNAIITIQNYRWRNKQLHGQFPKTVLDQANIDKELSFKWIKKQRISSSLESAIFAIQDQAIMTRQHQRDILKEPVDGKCRLCSTKDETTQHIISGCEKLAGTYYVKRHNNLVKYVYWCLAKKHKINVSDLWWQEPLVQPQVKENDSAKILWEIPIQTDVTVAHNRPDLIYVDKCNNKTYLIDITVPSDYNIGAKEIEKLSKYHLLRTEISRLWKTQSSVIPIVVGATGIVAKSITRYIEKLETPIDISILQKQAAIHTSVILSKVLGETVFVHNTDIHDTQQTQDTRQSPDTQITHQTTTIQATQSLVDTQTTQKLGDTHITRHSEFTQQSGGIQVTPTDSQNTQQTTIMTLSSDTHSSSNRRTRRRRKNIKNT

SEQ ID NO: 9658 - protein, 1349 aa, Apodemia murphyi
MKRLLNSTSIGPLPGGDRRGTSGADAGRDSMQTVSGSLLNRRARAGGPENITADQRGGGVTGDALQSEAMPFECSVGSSGATTTNNVSDDRRRKWSNDEMEELMYCYFKAQFQGPGYIARLERLFTDRNLNNPKIHKFNGNTLSNQARRILKQNIISQEVLNRIKRRAETLDLEAAENFTQIEDETEANTQQDTQDTHENTHINITQNIQQNTQQIYTTTQTETINQLTQNINVDENQDPLILDFLRTLAETKELPIADRYLLPKAKINKEFLQNLNTLNQYLPNLLVINNSLREINDIIYATAKTLILNNKQSPFLPKPSTKIKSEPSWKRRIATKLGKYRKEVGQLIEIGRGINSRRMQKIKDKLYSKYKIENENDLRNQIEIVTQRIKALAARIKRYDNMNNRKEQNRLFGENEHRFYRNLGNSNSNNTNHIKLPSKSDIEQFWKSILSKPVQYNKKARWIEETENLTDELITSNGEEITVEQIETAVSRLHNWKTPGVDKIHNYYLKYLTNTHKYLASLFTNIVKGNEMIEEWFTTGQVILIPKNEHTEDPKNWRPIACLPSIYKLLTSVLANQLYSHCHENNIMAVEQRGCRRGARGCKDHLMVNKAILEDAHLSQKNLSMAWVDYQKAFDSISHEWLLKILDVYKCPSIIKRFLQIVMPQWRVIMTARGSQDIVTTEPIYIKRGIFQGDSLSPLLFCLAINPLSYILNKYELKGYKLKDSVYINHLLYMDDLKIYANHSNNLKVLLDSVEIFTNDIGMSFGLSKCSVVHLKSGYRSNVTGEGHVLLSGETFSQLAIGNTYKYLGIHESGKIEHSVVREQITKKYFKRIKLLLNTHLNSRNVIKGVNTYAIPVLLYSFGIINYKISDLRKIDIKTRKLLNIKKAHQQKADVERLYLPITQGGRGLINVENMYKTQIIKYKQYLQTQGDHLIQAIVQHDENRSKYSIVKDFADIERELSLPHGNTHINKDIKNAIITIQNYKWRSKQLHGQFPKTVLDQANIDKELSFKWIKKQRISSSLESAIFAIQDQAIMTRQHQRDILKEPVDGKCRLCATKDETTQHIISGCEKLAGTYYVKRHNDLVKYVYWCLAKKHKINVSDLWWQEPLVQPQVRENDSAKILWEIPIQTDVTVVHNRPDLIYVDKCNNKTYLIDITVPSDYNIGAKEIEKLSKYHLLRTEISRLWNTQSSVIPIVVGATGIVAKSITKYIEKLETPIDISILQKQAAIHTSVILSKVLGETVFVHNTDIHDTQQTQDTRQSPDTQITQQTTTIQATQSLVDTQTTQQLGDTQITRHSEITLQSGDIQVTPTDSQRTQQATVMTLSSDTHTSSNRRTGRRRKNIKNT

SEQ ID NO: 9659 - protein, 1425 aa, Hyalothyrus neleus
MVTLIWSMTSKNSNHGPLPGGDRRGTSGAGAGRDSMQTVSDSLLNRRARVGGPENITADQRGRERTGDALQSRATPTEHSAGSPVLTSTNNENRDRRKKWSTDEIHELMFCYFKAQFDGPGYICRLEKLFKDRNPNNPKIHNFNGNTLATQARRIIKQNILSQELLERIKRTTEEQEPTETDAENTYHTQNIEPIIENTGNVLSTRDLEENIRQDTEQNRGQILIETETTNDFTRNITVDENQDSIILHFLQTLAETRHTPITDRFILPKAKINKQFLHNFNTINNFLPNLLAIYTSLREMNDIIYAAAKTLIVNNKQSPFIPKSVIKNKTIPPWKQRIQNKIEKFRKELGQFIEIGRGINTRRMLNIKDKLYSNYNIHNENDHRNIEEILKQKIKALAGRLKRYEGMNDRKEQNTLFSENQHKLYRSLGCRTISSINIPSKHNMEHFWKSILSNPIQYNKDAKWIEQLDVTQTNVHTTERDEITVEEVKEAISKLHNWKTPGIDKIQNYYLKYFTSIHMYIAKLFTKIVTGTELLEDWFTTGQVILIPKNEKTDDPKNWRPIACLPSTYKLLTSVLANQLYNHCQENNIMAVEQRGCLRGARGCKDHLMVNKAILEDAHQSKKNLSMAWIDYRKAFDSISHEWLIKVLEIYKCPRVIRSFLQTVMPSWKVVMTARGTQDSITTEPIYIRRGIFQGDSLSPLLFCLALNPISFILNKYEMKGYKLRDSLWVNHLLYMDDLKVYANNRSNLKILLDSIDIFTSDIGMSFGLDKCNILNIISGRRDRAIGDAHVLLNGEKFNELGIENTYKYLGIHESGKIEHGTMREQLTKEYFKRIKKLLNTHLNARNIIKGINAYAIPVLLYSFGIINYKIKDLKQIDTKTRKILNIKKAHQQKAEVERLYLPINQGGRGLLNVENMYKIQILKYKQYLEVEQDYLIKAIAQHDINKDKYSILKYAKEIEKELKLTRGNMHTNREIKQAIVKIQNDKWRSKQLHGQFPKKVLDQMNIDKELSFKWIKKQQITPSIESVVFAIQDQAVVTRQHQRDIFKEQIDGKCRLCACKDETAQHIISGCEKLAGTYYVKRHNNLVQYVYWCLANKHKIETAKLWWQETLIQPQVKENDTAKIMWEIPVHTDITVNHNRPDIIYVDKESNKTYLIDVTVPTDYNIGAKEIEKLSKYHLLKTEITRLWNTHTLVIPIVIGATGIVAKSITKYIEKLNANIDLSILQKQAAIHTSMILSKVLGDTVFVSHKQESNAQKVRNAQQTIEQGTINTPITQQTSYTSITQQIASTSMMTHQTCKTSATHQICNTPITLQTCNASITLQTPNTSITQETFDTSITQQTPHTPITQQTSHIPITQQTSNTPITQQTCNTQVIQQISNIPTNGQMSSTQSTKRQTNTPSQNSQNHLQTSSNIRHLRPRKKR

SEQ ID NO: 9660 - protein, 1239 aa, Hemaris fuciformis
MEREFSNARIGPLPGGDRRGTSGADAGRDSMRTVSGSLLNRRAGVGGPEDITADLRGGEGADDVLQSRASPTHSVGSSASTTNNVNNDKRRKWSLEELKELMFCYFKARSEGSGYLNRLQEMFTERNPNNPKIQKYNGNTLANQARRIIKQNTISKELLDQIQKHAEGTFDTTEITDGNVIESDSPITHRTTPQIVLNTTHAHIPIDHAENIDRLTGNIEVNEDQNPLVLEFLQILAETKATPLEERLFLPKAKINKKFIANLHILNTYMSNLLIINNSLREINNIIYAAAKTLIINNKQIPYMPKNIIKLKTVPPWKKRIQIKIEKLRKELGQLIEVDRGITTRRMIKVKDRLYKKHNICNDNDHKNVIEILKQKIKALAGRIKRYEDMSIKKEQNKLFVENEHRLYRSLERNNVQDIKLPNKASIEEFWTSVLSNPIEYNSEANWIKDIEMESREINTTTIDVILEEHVQYATKKLLNWKSPGIDKVQNYYVKYFTSVHKHLATAYTNIFTGIESLEEWFTTGQVILIPKNDHTEDPKNWRPIACLPTMYKLLTSILTNTLYSHCQENHIIAVEQRGCRRGTRGCKDHLMVNKAILEDAHKHKKNLSMAWIDYQKAFDSISHDWLMKILEIYKCPSIIRQFLQLTMPSWKVIMTARGLNDSITTEPIHIRRGIFQGDSLSPLLFCLAINPISSILNKYVLKGYKLKDSYQINHLLYMDDLKVYSNSSSNLKVLLNSIEIFTSDIGMTFGLNKCNILNINSGYRSNVTGEGHILLGGEIIKQLPRGDTYKYLGVHESGKIEHNVVREQITKEYFRRIKKLLNTHLTSRYLIKGINTYATPVLLYSFGVINYKLTDLKKIDTKTRKLLAMKKAHQQKADVDRLYLPIIQGGRGLQNIEYLYKSQILKYKVYLKTQNDHLIKTIVQHDTCKDKYSIIDEAQTIERELNLATGNTHTEKEIKEAITKNYNQRWRNKQLHGQYPKKVLDQANIDIQLTFNWIKKQQITPSIEASIFAIQDQAVMTRQHQRDILKETIDGKCRLCASKDETAQHIISGCEKLAGTYYIKRHNNLVQYVFWCLARKHSIEVSNLWWKEVLLHPQIRENESAKILWEMPVQTDITVTHNRPDIIYIDKIKNKTYLIDVTVPSDYNIGAKEIEKLSKYHLLKNEVSRLWSTQTTVIPIVIGATGTVAKSIQKYINSLDSNIDINILQKQAAIHTSTILSKVLGDTVFVTAHQTPNT

SEQ ID NO: 9661 - protein, 1239 aa, Hemaris fuciformis
MEREFSNARIGPLPGGDRRGTSGADAGRDSMRTVSGSLLNRRAGVGGPENITADLRGGEGADDVLQSRASPTHSVGSSASTTNNVNNDKRRKWSLEELKELMFCYFKARSEGSGYLNRLQEMFTERNPNNPKIQKYNGNTLANQARRIIKQNTISKELLDQIQKHAEGTFDTTEITDGNVIESDSPITHRTTPQIVLNTTHAHIPIDHAENIDRLTGNIEVNEDQNPLVLEFLQILAETKATPLEERLFLPKAKINKKFIANLHILNTYMSNLLIINNSLREINNIIYAAAKTLIINNKQIPYMPKNIIKLKTVPPWKKRIQIKIEKLRKELGQLIEVDRGITTRRMIKVKDRLYKKHNICNDNDHKNVIEILKQKIKALAGRIKRYEDMSIKKEQNKLFVENEHRLYRSLERNNVQDIKLPNKASIEEFWNSVLSNPIEYNSEANWIKDIEMESREINTTTIDVILEEHVQYATKKLLNWKSPGIDKVQNYYVKYFTSVHKHLATAYTNIFTGIESLEEWFTTGQVILIPKNDHTEDPKNWRPIACLPTMYKLLTSILTNTLYSHCQENHIIAVEQRGCRRGIRGCKDHLMVNKAILEDAHKHKKNLSMAWIDYQKAFDSISHDWLIKILEIYKCPSIIRQFLQLTMPSWKVIMTARGLNDSITTEPIHIRRGIFQGDSLSPLLFCLAINPISSILNKYVLKGYKLKDSYQINHLLYMDDLKVYSNSSSNLKVLLNSIEIFTSDIGMTFGLNKCNILNINSGYRSNVTGEGHILLGGEIIKQLPRGDTYKYLGVHESGKIEHNVVREQITKEYFRRIKKLLNTHLTSRYLIKGINTYATPVLLYSFGVINYKLTDLKKIDTKTRKLLAMKKAHQQKADVDRLYLPIIQGGRGLQNIEYLYKSQILKYKVYLKTQNDHLIKTIVQHDTCKDKYSIIDEAQTIERELNLATGDTHTEKEIKEAITKNYNQRWRNKQLHGQYPKKVLDQANIDIQLTFNWIKKQQITPSIEASIFAIQDQAVMTRQHQRDILKETIDGKCRLCASKDETAQHIISGCEKLAGTYYIKRHNNLVQYVFWCLARKHSIEVSNLWWKEVLLHPQIRENESAKILWEMPVQTDITVTHNRPDIIYIDKIKNKTYLIDVTVPSDYNIGAKEIEKLSKYHLLKNEVSRLWSTQTTVIPIVIGATGTVAKSIQKYINSLDSNIDINILQKQAAIHTSTILSKVLGDTVFVTAHQTPNT

SEQ ID NO: 9662 - protein, 913 aa, Emmelina monodactyla
MNNIKFKLYNKYNIQTENDHNNTAEIIKQKIKALSGRIKRYEDMNNRKEQNQLFTENQHKLYTSLGNNQLDNIKLPSKDGVEEFWKSILSNPIQYNSNAKWIQEIECTTNEITPENEENITEDQIKTAIKKNHNWKTPGIDKIHNYYLKYLTNTHQYLATLFTKLVTGTEIMDEWFTTGQVILKPKKNPTEDPKNWRPIACLPSMYKLLTSVLANMLYKHCHENSLIAVEQRGCRRGARGCKDHLMVNKAILEDAYNSQKNLSMAWIDYQKAFDSVSHEWLLRVLDIYKCPPMIKKFLGATMPSWKVIMTARGTQESITTEPIYIRRGIFQGDSLSPLLFCLALNPLSTILNKYKTKGYKLKDSYWINHLLYMDDLKIYAGNKNNLKVLLDSVEIFTQDIGMIFGLDKCNTLHLASGRRKSTTGEAHALLNGETFQQLAIDNTYKYLGINESGKIDHNMVKEQIIKEYFKRIKKLLNTHLNARNVIKGINAFAIPVLLYSFGIINYKNSDLKRIDIKTRKLLAIHKAHQQKAEVERLYLPIAHGGRGLQNVENLYKIQILKYQQYIKQNDDYLIELIAEHDLHRQKYSIKKYSEEIQRELSLQPNNNHTDKEIKEAIIKTQLDRWSNKQLHGQFLKKVLQSANIDKEQSFRWLKKQQVSPSIESAIFAAQDQAVMTRQHRRDILKEQVDGKCRLCAAKDETTQHIISGCEKLASTYYTRRHNNLVKYVYWCLAKRYNIPVSNLWWQETMTQPQVKENENAKIMWEIAVQTDVTVTHNRPDLILTDKHTNKTYLIDITVPSDYNIGAKEIEKLSKYHLLKREISRLWNTHTSVIPIVVGATGVVAKSLTRYIDKLDTYININILQKQAAIHTTTILSKVLGDTIFVNNTDTNNITHIQQSSTTHASTQVINSPN

SEQ ID NO: 9663 - protein, 1239 aa, Hemaris fuciformis
MEREFSNARIGPLPGGDRRGTSGADAGRDSMRTVSGSLLNRRAGVGGPEDITADLRGGEGADDVLQSRASPTHSVGSSASTTNNVNNDKRRKWSLEELKELMFCYFKARSEGSGYLNRLHEMFTERNPNNPKIQKYNGNTLANQARRIIKQNTISKELLDQIQKHAEGTYDTTEITDGNVIESDSQITHRTTPQIVLNTTHAHIPIDHAENIDRLTGNIEVNEDQNPLVLEFLQILAETKATPLEERLFLPKAKINKKFIANLHILNTYMSNLLIINNSLREINNIIYAAAKTLIINNKQLPYMPKNIIKLKTVPPWKKRIQIKIEKLRKELGQLIEVDRGITTRRMIKVKDRLYKKHNICNDNDHKNVIEILKQKIKALAGRIKRYEDMSIKKEQNKLFVENEHRLYRSLERNNVQDIKLPNKASIEDFWTSVLSNPIEYNSEANWIKDIEMESREINTTTIDVILEEHVQYATKKLLNWKSPGIDKVQNYYVKYFTSVHKHLATAYTNIFTGIESLEEWFTTGQVILIPKNDHTEDPKNWRPIACLPTMYKLLTSILTNTLYSHCQENHIIAVEQRGCRRGTRGCKDHLMVNKAILEDAHKHKKNLSMAWIDYQKAFDSISHDWLIKILEIYKCPSIIRQFLQLTMPSWKVIMTARGLNDSITTEPIHIRRGIFQGDSLSPLLFCLAINPISSILNKYVLKGYKLKDSYQINHLLYMDDLKVYSNSSSNLKVLLNSIEIFTSDIGMTFGLNKCNILNINSGYRSNVTGEGHILLGGEIIKQLPRGDTYKYLGVHESGKIEHNVVREQITKEYFRRIKKLLNTHLTSRYLIKGINTYATPVLLYSFGVINYKLTDLKKIDTKTRKLLAMKKAHQQKADVDRLYLPIIQGGRGLQNIEYLYKSQILKYKVYLKTQNDHLIKTIVQHDTCKDKYSIIDEAQTIERELNLATGNTHTEKEIKEAITKNYNQRWRNKQLHGQYPKKVLDQANIDIQLTFNWIKKQQITPSIEASIFAIQDQAVMTRQHQRDILKETIDGKCRLCASKDETAQHIISGCEKLAGTYYIKRHNNLVQYVFWCLARKHSIEVSKHWWKEVLLHPQIRENESAKILWEMPVQTDITVTHNRPDIIYIDKIKNKTYLIDVTVPSDYNIGAKEIEKLSKYHLLKNEVSRLWSTQTTVIPIVIGATGTVAKSIQKYINSLDSNIDINILQKQAAIHTSTILSKVLGDTVFVTAHQTPNT

SEQ ID NO: 9664 - protein, 1267 aa, Mellicta athalia
MESFINDERTEPLPGGERRGTFGAGAGRDSMQTVSGSLLSRRARVGGPEDTTADQRGGEGVDDVLQSRASPTNSVGSSASTTNKAVSDDRRRKWSTEELEELMFCYFKARSGGAGYINRLEELFTARNPENPKIQKFNGNTLSNQARRVIKQNVISQELLNRIQKRAEGIVVTENTEQFSTPSHIEHTSTQSEEGSITQIQTLHNPPSNNTQPTSTERAEEIDQLTRNIVVNENEEPIVLQFLQTLAETKDIPIEERLLLPKAKINKSFIENLNTLNKYLPNLLVTNNSLREISNILYATAKTLIIDNNQTPYAPTMTIKPKRDPPWKKRIQIRIEKLRKELGQLIEIERGINTNRMRKIRDKLYTKHNIQSENDHNNTAEIIKQRIKALAGRIKRYEEMNTKKEQNKLFAENEHRLYRSLGSNATKDIKIPSKENVEEFWKSILSNPQQYNAEANWIKEIETMSNEVNTVDSVEITEDQVKFALRRMHNWKSPGLDQIQNYYIKYLTSVHKYLASLFTNIVSGTEPVEEWFTTGKVILVPKNENTEDPKNWRPIACLPNMYKLLTSILANVLYSHCHENNIISEEQRGCRRGVRGCKDHLMVNKAILEDAHQSQKNLSVAWIDYRKAFDSVSHEWLLKLLDVYRCPSMIKRFLLLAMPSWRVIMTARGSHESITTEPIYIRRGIFQGDSLSPLLFCLALNPLSFVLNKYEMKGYKLKDSIWINHLLYMDDLKIYANNRTNLKVLLDSVEIFTSDIGMKFGLEKCNVLHLNAGHRNIAAGGGHILLSGETFKQLAIDDRYKYLGVHESGKIEHSVIREQITKEYIKRVKKLLNTHLNSRNLIKGINTYAVPVLLYSFGVINYKNTDLKKIDVKTRKLLAIKKAHQQKAEVGRLYLPIKQGGRGLLNVEYMYKTQIVKYKQYLKAESDHLIKAIVQHDTSRDKYSIIKEAQEIEKELHLPQGNALTDEEIRKSIVNRHNEIWRSKQLHGQFPKKVLDQGNIDKELSFKWIKKQQISPSIESSIFAIQDQAVMTRQHQRDILKEPVDGKCRLCASKDETAQHIISGCEKLAGTYYVKRHNNLVQYIYWCLARRHKMEVSHLWWKETLTQPQVKENSSAKIMWEIPVQTDVTITHNRPDIIYTNKDNNKTYLIDITVPSDYNIGAKEIEKLSKYHLLKTEISRLWNTQTVVIPIVIGATGAVAKSIKKYIEQLDSNIDISILQKQAAIHTTIILSKVLGDTVFVHNIQDQLLQNTQSSLDRDTQQLLSDT

SEQ ID NO: 9665 - protein, 1345 aa, Apodemia duryi
MATEALALPSKMKSRYNSSSKGPLPGGERRGTSGADAGRDSMQTVSGSLLSRRARAGGPENITADQRGGGITGDALQSEASPFECSAGSSAATTINNVSDDRRRKWSNEEMEELMYCYFKAQSQGPGYIARLERLFTDRNLNNPKIHKFNGNTLSNQARRILKQNIISQEVLNRIKRRAESLELESTEIYTQICEQTATHTQRDIQITHDNLHNNITQNTEHNTPQEYTTTQAENINQLTQNINVDEDQDPLILDLLRTLAETKEQAIADRYLLPKAKINSQFLQNLHKLNEYLPNLLIINNSLREINDIIYATAKTLILNNKQTPFLPRPVIKVKTEPSWKKRIATKLGKCRKEVGQLIEISRGINSRRMQKIKDKLYSKYKIENENDLRNQIEILTQRIKALAARIKRYDDINSRKEQNKLFSENEHRFYRSLGNNNSDNMDHVILPSKDDIEQFWKSILSNPIHYNKEAKWIKEVENLTDEIHRNDAEGITVEQVETAIRRLHNWKTPGIDKIHNYYLKYLTSTHKYLASLFTNIVKGNELVEEWFTTGQVILIPKNEHTEDPKNWRPIACLPSIYKLLTSVLANQLYCHCHENNIMAVEQRGCRRGARGCKDHLMVNKAILEDAHLSQKNLSMAWIDYQKAFDSISHKWLLKILDVYKCPPMIKSFLQIVMPQWRVIMTARGSHNTVTTEPIYIKRGIFQGDSLSPLLFCLAINPISYILNKYELKGYKLKDSVYINHLLYMDDLKIYANHGNNLKVLLDSVEIFTNDIGMNFGLNKCNVIHLKSGFRSSTIGEGHVLLSGEIFSQLAIGNTYKYLGVHESGKIEHSVVREQITKKYFKRVKLLLNTHLNSRNFIKGVNTYAIPVLLYSFGIINYKISDLRKIDVKTRKLLNIKKAHQQKADVERLYLPITQGGRGLINVENMYKTQIIKYKQYLQTQSDHLIQAIVQHDENRNKYSILKDFEEIERELSLPQGNTHFNKDIKEAIIKIQNYRWRNKQLHGQFPKTVLDQANVDKELSFKWIKKQRISSSLESSIFAIQDQAVMTRQHQRDILKEPVDGKCRLCATKDETTQHIISGCEKLAGTYYVKRHNDLVKYVYWCLAKKHNINASDLWWQETLVQPQVKENDSAKILWEIPIQTDVTVAHNRPDLIYVDKANNKTYLIDITVPSDYNIGAKEIEKLSKYHLLRTEISRLWNTQSSVIPIVIGATGIVAKSISRFIEKLETPIDISILQKQAAIHTSIILSKVLGETVFVHNTDIHDTQQTQVTQQTHDTQRTQQSSVTQTIQQTGDTQIIQYTEDAQITQQTFDTQTTSNHSQITSGMHISSNTRTRRRKKNIINT

SEQ ID NO: 9666 - protein, 1259 aa, Emmelina monodactyla
MESQPNNLRNWPLPGVDRQGTSGADAGRDSMRTVSGSLLSRRARVGVPEDITADRGGEGTEVVLRGGATPNIHTAGPSVETANNSINDDRRRKWSTQELTELMFCYYKAQAGGPGYIRRLQQLFTERNPDNPKIHKFNGNTLSNQARKVIKQNFLSQELLHQIKRKAEGIAPSQDIETTEPIDNGEGAPLIPRVNSPQHHLQTTHEETDIIDQLTQNIIVDEDQEPIILNFLQTLSETKETPVTERLCLPKAKINKSFIKNLNTINKYLPNLLVTNSSLLSINNIIYATAKTLITNNNQTPFLPKSNIRNTKPVPPWKRRIQIKIEKLRKELGQLLEIERGVNSRRMNNIKFKLYNKYNIQTENDHNNTAEIIKQKIKALSGRIKRYEDMNNRKEQNQLFTENQHKLYTSLGNNQLDNIKLPSKDGVEEFWKSILSNPIQYNSNAKWIQEIECTTNEITPENEENITEDQIKTAIKKIHNWKTPGIDKIHNYYLKYLTNTHQYLATLFTKLVTGTEIMDEWFTTGQVILIPKKKPTEDPKNWRPIACLPSMYKLLTSVLANMLYKHCHENSLIAVEQRGCRRGARGCKDHLMVNKAILEDAYNSQKNLSMAWIDYQKAFDSVSHEWLLRVLDIYKCPPMIKKFLGATMPSWKVIMTARGTQESITTEPIYIRRGIFQGDSLSPLLFCLALNPLSTILNKYKTKGYKLKDSYWINHLLYMDDLKIYAGNKNNLKVLLDSVEIFTQDIGMIFGLDKCNTLHLASGRRKSTTGEAHALLNGETFQQLAIDNTYKYLGIHESGKIDHNMVKEQIIKEYFKRIKKLLNTHLNARNVIKGINAFAIPVLLYSFGIINYKNSDLKRIDIKTRKLLAIHKAHQQKAEVERLYLPIAHGGRGLQNVENLYKIQILKYQQYIKQNDDYLIELIAEHDLHRQKYSIKKYSEEIQRELSLQPNNNHTDKEIKEAIIKTQLDRWSNKQLHGQFLKKVLQSANIDKEQSFRWLKKQQVSPSIESAIFAAQDQAVMTRQHRRDILKEQVDGKCRLCAAKDETTQHIISGCEKLASTYYTRRHNNLVKYVYWCLAKRYNIPVSNLWWQETMTQPQVKENENAKIMWEIPVQTDVTVTHNRPDLILTDKHNNKTYLIDITVPSDYNIGAKEIEKLSKYHLLKREISRLWNTHTSVIPIVVGATGVVAKSLTRYIDKLDTYININILQKQAAIHTTTILSKVLGDTIFVNNTDTNNITHIQQSSTTHASTQVINSPN

SEQ ID NO: 9667 - protein, 1376 aa, Apodemia virgulti
MPPTSLTSRPAITPRPRGGRTSALCGENNSLMANEALALPSKMKSRYNSSSKGPLPGGERRGTSGADAGRDSMQTVSGSLLSRRARAGGPENITADQRGGGVTGDALQGETSPFECSAGSSAATTINNVSDDRRRKWSNEEMEELMYCYFKAQSQGPGYIARLERLFTDRNLNNPKIHKFNGNTLSNQARRILKQNIISQEVLNRIKRRAESLELESTEIYTQICEQTATHTQRDIQITHDNLHNNITQNTEHNTPQEYTTTQAENINQLTQNINVDEDQDPLILYLLRTLAETKEQAIADRYLLPKAKINSQFLQNLHKLNEYLPNLLIINNSLREINDIIYATAKTLILNNKQTPFLPRPVIKVKTEPSWKKRIATKLGKCRKEVGQLIEISRGINSRRMQKIKDKLYSKYKIENENDLRNQIEILTQRIKALAARIKRYDDINSRKEQNKLFSENEHRFYRSLGNNNSDNMDHVILPSKDDIEQFWKSILSNPIHYNKEAKWIKEVENLTDEIHRNDAEGITVEQVETAIRRLHNWKTPGIDKIHNYYLKYLTSTHKYLASLFTNIVKGNELIEEWFTTGQVILIPKNEHTEDPKNWRPIACLPSIYKLLTSVLANQLYCHCHENNIMAVEQRGCRRGARGCKDHLMVNKAILEDAHLSQKNLSMAWIDYQKAFDSISHKWLLKILDVYKCPPMIKSFLQIVMPQWRVIMTARGSHNTVTTEPIYIKRGIFQGDSLSPLLFCLAINPLSYILNKYELKGYKLKDSVYINHLLYMDDLKIYANHSNNLKVLLDSVEIFTNDIGMNFGLNKCNVIHLKSGFRSSTIGEGHVLLSGEIFSQLAIGNTYKYLGVHESGKIEHSVVREQITKKYFKRVKLLLNTHLNSRNFIKGVNTYAIPVLLYSFGIINYKISDLRKIDVKTRKLLNIKKAHQQKADVERLYLPITQGGRGLINVENMYKTQIIKYKQYLQTQSDHLIQAIVQHDENRNKYSILKDFEEIERELSLPQGNTHFNKDIKEAIIKIQNYRWRNKQLHGQFPKTVLDQANVDKELSFKWIKKQRISSSLESSIFAIQDQAVMTRQHQRDILKEPVDGKCRLCATKDETTQHIISGCEKLAGTYYVKRHNDLVKYVYWCLAKKHNINASDLWWQETLVQPQVKENDSAKILWEIPIQTDVTVAHNRPDLIYVDKANNKTYLIDITVPSDYNIGAKEIEKLSKYHLLRTEISRLWNTQSSVIPIVIGATGIVAKSISRFIEKLETPIDISILQKQAAIHTSIILSKVLGETVFVHNTDIHDTQQTQVTQQTHDTQRTQQSSVTQTIQQTGDTQIIQYTEDAQITQQTFDTQTTSNHSQITSGMHISSNTRTRRRKKNIINT

SEQ ID NO: 9668 - protein, 1269 aa, Parapoynx stratiotata
MERQINRTSIESLPGGDRRGTSGADAGRHSMRTVSGSPLNRRAGVGETVYATAERGRAGTDDALQGRASPTDSVGSSVSTTNNISDDRRRKWSIEEMKELMFCYFKSRSGGAGYIGRLYSLFCQRNPNNPKIHKFNGNTLSNQARRIIKQNVISQQLLNQIQNEAEGITSEADNNTRFEPEQGLEPALSPPNTHTPQNIQPPEHTTEQAEIIEQLTQNVIVNENQDPLILNFLPALAETQETAVAERPFLPKAKINKQFLTNLHTLNNYMPNILVTNNTLRDINNIIYAAAKTLIVSNNQSPYVPKEVIKTKTDPPWKRRIQTSIEKFRKEIAQLIEIDRGIDTRRMTNIKEKLYRKYNIQNRNDQTNTIETLKQKVKALAGRIKRYEDMNNRKEQNRMFNENQHRFYRTLGNNSYKDIKLPRKETTEEFCSSILSEPIHYNTEARWIKEVEETSSEVNTIDTEDISETQIKTAVRKLLNWKSPGLDKIQNYYLKYFTSVHSYLALLFTKIVRNTENIEEWFTTGQVILIPKNENTEDPKNWRPISCLPTMYKLFTSVLADLLYDHCSSNNIMAPEQRGCRRGTRGCKDHLMVNKAVLEDAHQSQKNLSMAWIDYQKAFDSVSHDWLLKVLDVYKCPPMVKRFLQLVMPSWQVIMTARGSQSALTTEPILIKRGIFQGDSLSPLLFCLAVNPLSFILNKYELKGYKLKDSCWINHLLYMDDLKLYANNKHNLKVLLDSVEIFTNDIGMRFGLDKCNTLHLSSGHRSSATGEGHILLSGETIKQLAIGDTYKYLGVHESGKIEHSVIKDHLMKEYFKRIKKLLHTHLNARCLIKGINVYAIPVLLYSFGIIHYKNTDLKKIDTKTRKLLAINKAHQQKADVQRLYLPVAEGGRGLINVEYTYKAQIVKYKQYLKEENDYLIKAIVKHDKNRDKYSIIKDAQEIELQLHLTQSNTHTDNEIKQAIVKQHKETWRGKQLHGQFPKKVLDQANIDTESSFKWIKKQQISPNIESSIFAIQDNAIMTRQHQRDILKEPVDGKCRLCACKDETVQHITSGCEKLAGTYYVKRHNNLVQYVYWCLAKKHKIEVSNLWWKETMIQPQVKENDSTKILWEMPVHTDITVTHNRPDLIYIDKISNKTYLIDITVPSDYNIGPKEIEKLSKYHLLKTEVSRLWNTQVTVVPIVVGSTGVVAKSIKRYIDKLDASIDITILQKQAALHTSIIISKVLGDTVFVNNTHQSGASDTNMQTVQNTHTPQTQHTSQQTNTQTSQS

SEQ ID NO: 9669 - protein, 1165 aa, Mellicta athalia
MFCYFKARSGGAGYINRLEELFTARNPENPKILKFNGNTLSNQARRVIKQNVISQELLNRIQKRAEGIVVTENTEQFSTPSHIEHTSTQSEEGSITQIQTLHNPPSNNTQPTSTERAEEIDQLTRNIVVNENQKPIVLQFLQTLAETKDIPIEERLLLPKAKINKSFIENLNTLNKYLPNLLVTNNSLREISNILYATAKTLIIDNNQTPYAPTMTIKPKRDPPWKKRIQIRIEKLRKELGQLIEIERGINTNRMRKIRDKLYTKHNIQRENDHNNTAEIIKQRIKALAGRIKRYEEMNTKKEQNKLFAENEHRLYRSLGSNATKDIKIPSKENVEEFWKSILSNPQQYNAEANWIKEIETMSNEVNTVASVEITEDQVKFALRRMHNWKSPGLDQIQNYYIKYLTSVHKYLASLFTNIVSGTEPVEEWFTTGKVILVPKNENTEDPKNWRPIACLPNMYKLLTSILANVLYSHCHENNIISEEQRGCRRGVRGCEDHLMVNKAILEDAHQSQKNLSVAWIDYRKAFDSVSHEWLLKLLDVYRCPPMIKRFLLLAMPSWRVIMTARGSHESITTEPIYIRRGIFQGDSLSPLLFCLALNPLSFVLNKYEMKGYKLKDSIWINHLLYMDDLKIYANNRTNLKVLLDSVEIFTSDIGMKFGLEKCNVLHLNSGHRNIAAGGGHILLSGETFKQLAIDDRYKYLGVHESGKIEHSVIREQITKEYIKRVKKLLNTHLNSRNLIKGINTYAVPVLLYSFGVINYKNTDLKKIDVKTRKLLAIKKAHQQKAEVGRLYLPIKQGGRGLLNVEYMYKTQIVKYKQYLKAESDHLIKAIVQHDTSRDKYSIIKEAQEIERELHLPQGNALTDEEIRKSIVNRHNEIWRSKQLHGQFPKKVLDQGNIDKELSFKWIKKQQISPSIESSIFAIQDQAVMTRQHQRDIHKEPVDGKCRLCASKDETAQHIISGCEKLAGTYYVKRHNNLVQYIYWCLARRHNLEVSHLWWKETLTQPQVKENSSAKIMWEIPVQTDVTITHNRPDIIYTNKDNNKTYLIDITVPSDYNIGAKEIEKLSKYHLLKTEISRLWNTQTVVIPIVIGATGAVAKSIKKYIEQLDSNIDISILQKQAAIHTTIILSKVLGDTVFVHNIQDPLLQNTQSSLDRDTQQLLSDT

SEQ ID NO: 9670 - protein, 1259 aa, Emmelina monodactyla
MESQPNNLRNWPLPGVDRQGTSGADAGRDSMRTVSGSLLSRRARVGVPEDITADRGGEGTEVVLRGGATPNIHTAGPSVETANNSINDDRRRKWSTQELTELMFCYYKAQADGPGYIRRLQQLFTERNPDNPKIHKFNGNTLSNQARKVIKQNFLSQELLHQIKRKAVGIEPSQDNETTEPIDNGEDVPLIPRVNSPQHHLQTTHEETHIIDQLTQNIIVNEDQEPIILNFLQTLSETKETPVTERLCLPKAKINKSFIKNLNTINKYLPNLLVTNSSLLSINNIIYATAKTLITNNNQTPFLPKSNIRNTKPVPPWKRRIQIKIEKLRKELGQLLEIERGVNSRRMNNIKFKLYNKYNIQTENDHNNTAEIIKQKIKALSGRIKRYEDMNNRKEQNQLFTENQHKLYTSLGNNQLDNIKLPSKDGVEEFWKSILSNPIQYNSNAKWIQEIECTTNEITPENEENITEDQIKTAIKKIHNWKTPGIDKIHNYYLKYLTNTHQYLATLFTKLVTGTEIMDEWFTTGQVILIPKKNPTEDPKNWRPIACLPSMYKLLTSVLANMLYKHCHENSLIAVEQRGCRRGARGCKDHLMVNKAILEDAYNSQKNLSMAWIDYQKAFDSVSHEWLLRVLDIYKCPPMIKKFLGATMPSWKVIMTARGTQESITTEPIYIRRGIFQGDSLSPLLFCLALNPLSTILNKYKTKGYKLKDSYWINHLLYMDDLKIYASNKNNLKVLLDSVEIFTQDIGMIFGLDKCNTLHLASGRRKSTTGEAHALLNGETFQQLAIDNTYKYLGIHESGKIDHSMVKEQIIKEYFKRIKKLLNTHLNARNVIKGINAFAIPVLLYSFGIINYKNSDLKRIDIKTRKLLAIHKAHQQKAEVERLYLPIAHGGRGLQNVENLYKIQILKYQQYIKQNDDYLIELIAEHDLHRQKYSIKKYSEEIQRELSLQPNNNHTDKEIKEAIIKTQLDRWSNKQLHGQFLKKVLQSANIDKEQSFRWLKKQQVSPSIESAIFATQDQAVMTRQHRRDILKEQVDGKCRLCAAKDETTQHIISGCDKLASTYYTRRHNNLVKYVYWCLAKRYNIPVSNLWWQETMTQPQVKENENAKIMWEIPVQTDVTVTHNRPDLILTDKHNNKTYLIDMTVPSEYNIGAKEIEKLSKYHLLKTEISRLWNTHTSVIPIVVGATGVVAKSLTRYIDKLDTYININILQKQAAIHTTTILSKVLGDTIFVNNTDANNITHIQQSSTTHTSTQLINSPN

SEQ ID NO: 9671 - protein, 978 aa, Emesis furor
MQKIKDKLYLKYIIEDDNGLRNQIEILTQRIKALAARIKRYDNINNRKEQNRLFSENEHRFYRSLGSSNNNNINHIRLPSKENIEHFWKSILSSPVQYNKEAKWIEEIENLTDGISVNSTEDMITTEEVEISINRLHNWKTPGIDKIHNYYLKYLTSTHKYLAILFTNLVRGSEPIEEWFTTGQVILVPKNENTEDPKNWRPIACLPSTYKLLTSVLANRLYRHCHDNDIMALEQRGCRRGARGCKDHLMVNKAILEDAHISQKNLSMAWVDYQKAFDSISHEWLLKILDVYKCPPIIKKYLQIVMPQWRVIMTARSSQNTVTTDPIFIKRGIFQGDSLSPLLFCLAINPLSFILNKYELKGYKLKDSVYINHLLYMDDLKIYANHNNNLKVLLDSVEIFTNDIGMSFGLDKCNIIHLKSGYRSSTIGEGHVLLSGETFSQLAIGNTYKYLGVHESGKIEHSVVREQITKKYFKRIKMLLNTHLNSRNIIKGVNTYAIPVLLYSFGIINYKISDLRKIDTKTRKLLNIKKAHQQKADVERLYLPITQGGRGLINVENMYKTQIIKYKQYLQIQGDHLIQAIVQHDENRNKYSIMKDFREIERELGLPRGNTHINKEIKDAIVKIQNVRWRNKQLHGQFAKTVLDQANIDKELSFKWIKKQKISPSLESSIFAIQDQAVMTRQHQRDILKDPVDGKCRLCATKDETTQHIISGCEKLAGTYYVKRHNDLVKYVYWCLARKHKIEVSDLWWQETLIQPQVKENDSAKILWEIPIQTDVTVAHNRPDLIYVDKVNNKTYLIDITVPSDYNIGAKEIEKLSKYHLLRTEISRLWSTQTTVIPIVVGATGVVAKSISKYIEKLETPIDISILQKQAAIHTSVILSKVLGDTVFVHNTHTHDSQQTQIAPQSLDTQTTHQTDDILITQQLGDTQIIHQSLETQDIPADIQITHQSLDAQDAPADTSITQESSIRRRKRRRRIIL

SEQ ID NO: 9672 - protein, 1275 aa, Astraptes brevicauda
MPREGRTLETLRVRYTPMTNGALVTFVNMERQFRNRTLGPLPGGDRRGTSGADAGRDSMQTVSDSLLNRRARVGGPENTTAEQWGGEGTDDALQSGASLTDSVGSSVTTTNNTVSDDRRRKWSTEELQELMFCYFKARSDGPGYIDRLHRLFSERNPNNPKIHKFNGNTLSNQARRIIKQNIISQELLDRIQKHAEGRTDAVESSEQNVVEEEVTMHSHITITPNTNHVEYTIEQIQTIDQLTQNIEVNEDQDPLILNFLQILSETKETAIAERQYLPKAKINKRFIENLCNLNKFLPNILATTYSLREINDVIYAAAKTLIINNNQLPYTPKNTFKIKSDPPWKRRIQSKIERFRKELGQLIEIGRGINTRRMINIKDKLYRQYNIQNENEHSSIEEILKQKIKALAGRIKRYEDINSKKEQNRLFSENEHKLYRSLGGNSFKDIKLPNKEIVEEFWKSILSNPIHYNSKATWIKEVEESVSEVNTIDIEEISEEHIKQAIKKLLNWKTPGIDKVQNYYLKYLTSVHSYLGSVFTKIVSRRETLEDWFTTGQVILIPKNQETEEPKNWRPIACLPTMYKLLSSILSNILYDHCHQNNIISIEQRGCRRAARGCKDHLMVNKAILEDAHQSQKNLSMAWIDYQKAFDSVPHEWLAKVLDVYKCPPVIKRFLEIVMPTWRVIMTARGTQNSLTTEPICIRRGIFQGDSLSPLLFCLAINPLSFILNKYEMKGYKLKDSLWVNHLLYMDDLKLYANNRHNLKVLLDSVEIFTSDIGMRFGLDKCNTIHISSGHRNKVTGEGHILLDGAMIKQLAIGDRYKYLGIHESGKIEHNVIRDQIIKEYFKRIKKLNNTHLNSRNLIKGINTYAIPVLLYSFGVINYKNSDLKKIDTKTRKLLAIKKAHQQKAEVERLYLTIDQGGRGLLNVENMYKTQIIKYKQYLKAECDDLIKAIVEHDIHRDKYSIINESQEIENQLHLDRGKIYTNKDIREAIVKRCKDIWRNKQLHGQFIKKVLDQTNIDTELSFKWIKKQQISPIIESSIFAIQDQCVMTRQHRRDILKEPVDGKCRLCASKDETTQHIISGCEKLAGNYYVKRHNNLVQYVYWCLAKKHKMEVSNLWWKETLIQPHVKENETAKILWEMPVQTDVTITHNRPDIIYIDKINNKTYLIDVTVPSDYNIGPKEIEKLSKYHLLKNEVNRLWKTQTTIIPVVVGATGIVGRNIKKYIEKLGTFIDITILQKQAAIHTSTILSKVLGDTVFVNTTQNDHRQNTEPPTHT

SEQ ID NO: 9673 - protein, 1259 aa, Emmelina monodactyla
MESQPNNLRNWPLPGVDRQGTSGADAGRDSMRTVSGSLLSRRARVGVPEDITADRGGEGTEVVLRGGATPNIHTAGPSVETANNSINDDRRRKWSTQELTELMFCYYKAQAGGPGYIRRLQQLFTERNPDNPKIHKFNGNTLSNQARKVIKQNFLSQELLHQIKRKAEGIEPSQDTETTEPIDNGEGAPLIPRVNSPQHHLQTTHEETDIIDQLTQNIIVNEDQEPIILNFLQTLSETKETPVTERLCLPKAKINKSFIKNLNTINKYLPNLLVTNSSLLSINNIIYATAKTLITNNNQTPFLPKSNIRNTKPVPPWKRRIQIKIEKLRKELGQLLEIERGVNSRRMNNIKFKLYNKYNIQTENDHNNTAEIIKQKIKALSGRIKRYEDMNNRKEQNQLFTENQHKLYTSLGNNQLDNIKLPSKDGVEEFWKSILSNPIQYNSNAKWIQEIECTINEITPENEENITEDQIKTAIKKIHNWKTPGIDKIHNYYLKYLTNTHQYLATLFTKLVTGTEIMDEWFTTGQVILIPKKNPTEDPKNWRPIACLPSMYKLLTSVLANMLYKHCHENSLIAVEQRGCRRGARGCKDHLMVNKAILEDAYNSQKNLSMAWIDYQKAFDSVSHEWLLRVLDIYKCPPMIKKFLGATMPSWKVIMTARGTQESITTEPIYIRRGIFQGDSLSPLLFCLALNPLSTILNKYKTKGYKLKDSYWINHLLYMDDLKIYAGNKNNLKILLDSVEIFTQDIGMIFGLDKCNTLHLASGRRKSTTGEAHALLNGETFQQLAIDNTYKYLGIHESGKIDHNMVKEQIIKEYFKRIKKLLNTHLNARNVIKGINAFAIPVLLYSFGIINYKNSDLKRIDIKTRKLLAIHKAHQKKAEVERLYLPIAHGGRGLQNVENLYKIQILKYQQYIKQNDDYLIELIAEHDLHRQKYSIKKYSEEIQRELSLQPNNNHTDKEIKEAIIKTQLDRWSNKQLHGQFLKKVLQSANIDKEQSFRWLKKQQVSPSIESAIFAAQDQAVMTRQHRRDILKEQVDGKCRLCAAKDETTQHIISGCEKLASTYYTRRHNNLVKYVYWCLAKRYNIPVSNLWWQETMTQPQVKENENAKIMWEIPVQTDVTVTHNRPDLILTDKHNNKTYLIDITVPSDYNIGAKEIEKLSKYHLLKREISRLWNTHTSVIPIVVGATGVVAKSLTRYIDKLDTYININILQKQAAIHTTTILSKVLGDTIFVNNTDTNNITHIQQSSTTHASTQVINSPN

SEQ ID NO: 9674 - protein, 1400 aa, Hesperia meskei
MENKLNGKRIGPLPGGDRRGTSVAGVRRLSMLASGSPLSRRAGVGVGNERGAPDTTAEIYEGNTLRSGETSPASSAGTPHPTTIRHDDSRRKWSLEELHELMFCFYKARAQGAGYIKRLEELFRHRNPNNPKSQTFTGNTLSTQARNVIARNVIPIDVLNSIKTRADTINHPQNLNSESLEDPQTTGPTTTDNTNNTQHHSQSRPSPIQSSEYSEPPPDTGGTIGDDRRRKWTKAEMEELMLCYYKARLGGSGYISRLQRIFGERNPQNPKVKRFNGFSLSTQARTIIKNNMLSQEVLNRIKQLAEEAAENLENTGPVLNAPVHELSSIPHDTQSENTQTYTLEHAQTIEEVTQNIGDSEDQDPIILSFLNILSEIKEIPISERNYLPKAKINNKFIENCQKLNKFLPNLLEIHTSLREVNDIIYAAAKTLIIRNNQKPFEPKNTIKPNRNPAWKKRIQKKLNMFRKELGRLIEIERGVRSRRMEKNRDYLYNKYNIQNENDHSNIAEMLKQKIKALAGRIKRYEDLNKRKEQNKLFKENEHKFYRSSGSNNEEREVKIPSKDRVEQFWKSILSNPIKYNTEARWINEVEESVTDVNTVESDNITVEEVKFAIRKLHNWKSPGIDKIQNYYLKYLTCTHVYLSKLYSRIVRGLEHLEDWFTTGQVILIPKNTDTENPKNWRPIACLPSMYKLLTSVLANTLYSHCSNNNIILPEQRGCRRGARGCKDHLMVNKAILEDAHSAQKNLSMAWIDYQKAFDSVSHEWLLKVLDIYKCPPMIKKFLEMTMPTWKVIMTARGTLESLTTGPIYIKRGIFQGDSLSPLLFCLAINPLSFILNKYEFKGYKLKDSYYINHLLYMDDLKIYSNNRNNLNVLLDSVEIFTTDVGMRFGLDKCNVIHLNMGQRSGTTGKGHVLLNGEEFSELEIGNNYKYLGVSESGKIVHSEIRDQVTKEYFKRVKKLLNSHLNSRNLIKGINTYAIPVLLYSFGIINYKISDLKKIDTKTRKLLAIKKAHQQKADVERLYLPIAHGGRGLLNVEYMYKTQIIKYKQYLRIEQDHLIKTIVQHDIHKDKYSLIKEAEEIETELNLANNKRHTDKEIKDAIVRKQNEIWRNKQLHGQFVKSVLDQANVDIVQSFKWIKKQQVSPSIESSIFAIQDQAVMTRQHQRDILKEPVDGKCRLCAVKDETAQHLISACEKLAGTYYVKRHNNLVQYIYWCLARKHNMDSSNLWWKETLTQPKVIENDLAKIMWEIPIQTDVTVSHNRPDLIYVDKTTNNTYLIDITVPSDYNIGAKEIEKLSKYHLLKTELRRLWNTRTHVIPIVVGATGIVAKSISRYIDKLDSSIDITILQKQAAIHTSIILGKVLGDTVFVNSSHSDHTEDTTLLTANTTQSISTQNIQHTR

SEQ ID NO: 9675 - protein, 1376 aa, Apodemia mormo
MSPTSLTSRPAITPRPRGGRTSALCGENNSLMANEALALPSKMKSRYNSSSKGPLPGGERRGTSGADAGRDSMQTVSGSLLSRRARAGGPENITADQRGGGVTGDALQGETSPFECSAGSSAATTINNVSDDRRRKWSNEEMEELMYCYFKAQSQGPGYIARLERLFTDRNLNNPKIHKFNGNTLSNQARRILKQNIISQEVLNRIKRRAESLELESTEIYTQICEQTATHTQRDIQITHDNLHNNITQNTEHNTPQEYTTTQAENINQLTQNINVDEDQDPLILYLLRTLAETKEQAIADRYLLPKAKINSQFLQNLHKLNEYLPNLLIINNSLREINDIIYATAKTLILNNKQTPFLPRPVIKVKTEPSWKKRIATKLGKCRKEVGQLIEISRGINSRRMQKIKDKLYSKYKIENENDLRNQIEILTQRIKALAARIKRYDDINSRKEQNKLFSENEHRFYRSLGNNNSDNMDHVILPSKDDIEQFWKSILSNPIHYNKEAKWIKEVENLTDEIHRNDAEGITVEQVETAIRRLHNWKTPGIDKIHNYYLKYLTSTHKYLASLFTNIVKGNELVEEWFTTGQVILIPKNEHTEDPKNWRPIACLPSIYKLLTSVLANQLYCHCHENNIMAVEQRGCRRGARGCKDHLMVNKAILEDAHLSQKNLSMAWIDYQKAFDSISHKWLLKILDVYKCPPMIKSFLQIVMPQWRVIMTARGSHNTVTTEPIYIKRGIFQGDSLSPLLFCLAINPLSYILNKYELKGYKLKDSVYINHLLYMDDLKIYANHSNNLKVLLDSVEIFTNDIGMNFGLNKCNVIHLKSGFRSSTIGEGHVLLSGEIFSQLAIGNTYKYLGVHESGKIEHSVVREQITKKYFKRVKLLLNTHLNSRNFIKGVNTYAIPVLLYSFGIINYKISDLRKIDVKTRKLLNIKKAHQQKADVERLYLPITQGGRGLINVENMYKTQIIKYKQYLQTQSDHLIQAIVQHDENRNKYSILKDFEEIERELSLPQGNTHFNKDIKEAIIKIQNYRWRNKQLHGQFPKTVLDQANVDKELSFKWIKKQRISSSLESSIFAIQDQAVMTRQHQRDILKEPVDGKCRLCATKDETTQHIISGCEKLAGTYYVKRHNDLVKYVYWCLAKKHNINASDLWWQETLVQPQVKENDSAKILWEIPIQTDVTVAHNRPDLIYVDKANNKTYLIDITVPSDYNIGAKEIEKLSKYHLLRTEISRLWNTQSSVIPIVIGATGIVAKSISRFIEKLETPIDISILQKQAAIHTSIILSKVLGETVFVHNTDIHDTQQTQVTQQTHDTQRTQQSSVTQTIQQTGDTQIIQYTEDAQITQQTFDTQTTSNHSQITSGMHISSNTRTRRRKKNIINT

SEQ ID NO: 9676 - protein, 1257 aa, Emmelina monodactyla
MESQPNNLRNWPLPGVDRQGTSGADAGRDSMRTVSGSLLSRRARVGVPEDITADRGGEGTEVVLRGGATPNIHTAGPSVETANNSINDDRRRKWSTQELTELMFCYYKAQAGGPGYIRRLQQLFTERNPDNPKIHKFNGNTLSNQARKVIKQNFLSQELLHQIKRKAEGIEPSQDTENTEPIDNGEGAPLIPRVNSPQHHLQTTHEETDIIDQLTQNIIVNEDQEPIILNFLQTLSETKETPVTERLCLPKAKINKSFIKNLNTINKYLPNLLATNSSLLSINNIIYATAKTLITNNNQTPFLPKSNIRNTKTVPPWKRRIQIKIEKLRKEVGQLLEIERGVNSRRMNNIKFKLYNKYNIQTENDHNNTAEIIKQKIKALSGRIKRYEDMNNRKEQNQLFTENQHKLYTSLGNNQLDNIKLPSKDGVEEFWKSILSNPIQYNSNAKWIQEIECTTNEITPENEENITEDQIKTAIKKIHNWKTPGIDKIHNYYLKYLTNTHQYLATLFTKLVTGTEIMDEWFTTGQVILIPKKNPTEDPKNWRPIACLPSMYKLLTSVLANMLYKHCHENSLIAVEQRGCRRGARGCKDHLMVNKAILEDAYNSQKNLSMAWIDYQKAFDSVSHEWLLRVLDIYKCPPMIKKFLGATMPSWKVIMTARGTQESITTEPIYIRRGIFQGDSLSPLLFCLALNPLSTILNKYKTKGYKLKDSYWINHLLYMDDLKIYASNKNNLKVLLDSVEIFTQDIGMIFGLDKCNTLHLASGRRKSTTGEAHALLNGETFQQLAIDNTYKYLGIHESGKIDHNMVKEQIIKEYFKRIKKLLNTHLNARNVIKGINAFAIPVLLYSFGIINYKNSDLKRIDIKTRKLLAIHKAHQQKAEVERLYLPIAHGGRGLQNVENLYKIQILKYQQYIKQNDDYLIELIAEHDLHRQKYSIKKYSEEIQRELSLQPNNNHTDKEIKEAIIKTQLDRWSNKQLHGQFLKKVLQSANIDKEQSFRWLKKQQVSPSIESAIFAAQDQAVMTRQHRRDILKEQVDGKCRLCAAKDETTQHIISGCEKLASTYYTRRHNNLVKYVYWCLAKRYNIPVSNLWWQETMTQPQVKENENAKIMWEIPVQTDVTVTHNRPDLILTDKHNNKTYLIDITVPSDYNIGAKEIEKLSKYHLLKREISRLWNTHTSVIPIVVGATGVVAKSLTRYIDKLDTYININILQKQAAIHTTTILSKVLGDTIFVNNTDTNNITHIQQSSTTHASTQVINS

SEQ ID NO: 9677 - protein, 1396 aa, Cycloglypha thrasibulus
MANGAIANPISMERFRKSKRLGPLPGGDRRDTSAAGSGRVAGLASDSLLNRRAGVGDPEGGRDASNITAENNAGDILRSRDYSPTCSAGASESTTLSTLEDARRRWSPEETNELLFCYYRARAMGAGYMKRLHTLFKTRNPDNPKKDKFTGSNLATHARNIISRKVIPKETLDSIKIRAENITTTPNIQHIESNNILNNNNYSNNINGIEETNHTSTIITSDVTLTHNRVTGTEVTADPILRANEHVVNDDRRRKWSDEEMKELMFCYYKARLGGPGYICRLEKIFLERNPHHPKIDRINGYYLSTQARTIIKNNMLSQELLNRIKNLTEGVQESVTASTNTEDHLTVQVTENEPQYYSVEQAEIINQAAHNISDSENQDPIILQFLNILSETKEIPISERHYLPKAKINKQFIENCNKLNKYLPNLLEIHTALTDINEILYAAAKTLIVVNNQFPYIPQNTIKPKKTPPWKKRIQGKINKFRKELGQFIEIDKGVNSRRMIKIRDRLYRKHRIQNVEELKNTIEILKQKIKALAARIKRYEEMNDRKEHNKLFSENQHRFYRSLGNNTDREIQIPDKNNVEEFWTSIYSNPIQYNREAGWIEEIADSLNDVGTATIEEITIDQVKFAIKKLHNWKTPGIDKLQNYYIKYFTSAHKYLATLFTKIVKGRENLEEWFTTGQVILIPKNENTEQPKNWRPIACLPSMYKVLTSVLANMLYTHCSDNNILAVEQRGCRRGARGCKDHLMVNKAILEDAHQSQKNLSMAWIDYQKAFDSVSHEWLLKILDVYQCPPMIKNFLLMTMPTWKVIMTARGTRHSITTEPISIRRGIFQGDSLSPLLFCLAVNPISHILNKYENKGYKLKDSFWINHLLYMDDLKVYASNRNNLKVLLDSVEIFTNDIGMNFGLDKCNIIHINSGHINNTTGTGHVLLSGETFNHLAVGKTYKYLGINESGRIDHNVIREQITKEYFKRIKKLLNTYLNSRNIIKGINTYAIPILLYSFGIINYKNSDLKKIDTKTRKLLTIKKAHQQKAEVERLYLPVLQGGRGLLNVEFTYKTQILKYKQYLQVEQDHLIKTIVQHDVSKDKYSIINEAKEIETEIHLNTNSTHTDKDIKEAIYKTQRSRWRDKPLHGQFPKKVLDQANVDTESSFRWFKKQQISPTIEASIFAAQDQAVMTRQHQRDIVGLPIDGKCRLCACKDETTQHILAGCEKLAGTYYVKRHNNLVQYIYWCLARKHNIEVDRLWWKETLSQPKVVENETAKIMWEIPIQTDVTVTHNRPDLVYVDKTTNNTYLIDITVPSDYNIGAKEVEKLSKYHLLKTELKRLWNTHTHVIPIVVGATGVVAKSLNRYIGKLNYTFDTTILQKQAAIHSITILSKVLGDTVFVNGAGESVSSLP

SEQ ID NO: 9678 - protein, 1256 aa, Codatractus cyledis
MATPINMENFNNRIRIGPLPGGDRRGTSGAGAGRDSIRTTSDSLLNRRARVGEPENVTADQRGGEGVDDALQSRASPTDSVGSSTTTTNNTINDDRRRKWSTEELKELMFCYFKARSEGLGYIGRLQALFTERNPNNPKINTFNGNTLATQARRIIKQNVISQELLVQIQKQAENTVSIEYPEQISHATQEHDTTPPPVQKTEQNIPHTQHTQRTPEQIELIDQLTRNVQVNEDQDPLVLHFLQILAETKETPLTERLLLPKAKINKRFIENMNTLNNYIPNLLVTNTNLREINNIIYAAAKTLIINNSQIPYIHKNTIKPKCDPPWKKRIQIKIEKFRKELGQLIEIERGITTRRMRKIKEKLYIKYNIQNENDHQNIAETLKQKIKALAGRIKRYEEMNSRKEQNNLYRENQHRFYKTLGNNYSKDIKVPNKEEVEKFWTSILSNPIHYNTKAKWIEEVEISSSEINTKDIEEITEHQVKSAIRKVLNWKAPGIDKIQNYYLKYLTSIHPYLSSLFTNIVDGTETLEEWFTTGQIILIPKNEHTEDPKNWRPIACLPSMYKLLTSVLANILYSHCDENNIMALEQRGCRRGARGCKDHLMVNKAILEDAHQSQKNLSMAWIDYQKSFDTISHEWLLKILDIYKCPPMIKRFLQLTMPSWRVIMTARGFQDSITTEPIYIRRGIFQGDSLSPLLFCLAINPISFILNKYEMKGYKLKDSFWINHLLYMDDLKVYANNRNNLKVLLDSVEIFTGDIGMRFGLDKCNTIHISSGYRSSAIGEGHILLSGEVFKQLAIEDRYKYLGVHESGKIEHSIIRDQIIKEYFKRIKKLLNSYLNSRFLIKGINSYAIPVLLYSFGVINYKDSDLKKIDVKTRKILAIHKAHKQKAEVKRLYLPLTQGGRGLINVEYMYKSQIVKYKQYLQTESDYLIKAIVQHDRHKDKYSIIKEAQQIEGELHLTQNSIHTDEDIKKAIVKTYNKIWRTKQLHGQFPKKVLDQANIDVELSFNWIKKQQISPKVESSLFAIQDQAIMTRQHQRDILKEPIDGKCRLCACKDETTQHIISGCEKLAGTYYVKRHNNLVQYVYWCLAKKHKIDVSDLWWKETLVQPQVKENESAKILWEMPVQTDVTVTHNRPDLIYIDKNSNKTYLIDVTVPSDYNIGAGEIEKLSKYHLLKTEVSRLWNTQTTIIPIVIGATGIVAKSIKKYIDKLDSRIDISILQKQAAIHTSVILNKVMGDTVFLHNTTIRKLHYNLAES

SEQ ID NO: 9679 - protein, 1259 aa, Emmelina monodactyla
MESQPNNLRNWPLPGVDRQGTSGADAGRDSMRTVSGSLLSRRARAGVPEDITADRGGEGTEVVLRGGAPPNIHTAGPSVETANNSINDDRRRKWSTQELTELMFCYYKAQAGGPGYIRRLHQLFTERNPDNPKIHKFNGNTLSNQARKVIKQNFLSQELLHQIKRKAEGIEPSQDTETTEPIDNGEGVPLIPRVNSPQHHLQTTHEETHIIDQLTQNIIVNEDQEPIILNFLQTLSETKETPVTERLCLPKAKINKSFIKNLNTINKYLPNLIVTNSSLLSINNIIYATAKTLITNNNQTPYLPKSNIRNTKPVPPWKRRIQIKIEKLRKELGQLLEIERGVNSRRMNNIKFKLYNKYNIQTENDHNNTVEIIKQKIKALSGRIKRYEDMNNRKEQNQLFTENQHKLYTSLGNNQLDNIKLPSKDGVEEFWKSILSNPIQYNSNAKWIQEIECTTNEIIPENEENITEDQIKTAIKKIHNWKTPGIDKIHNYYLKYLTNTHQYLATLFTKLVTGTEIMDEWFTTGQVILIPKKNPTEDPKNWRPIACLPSMYKLLTSVLANMLYKHCHENSLIAVEQRGCRRGARGCKDHLMVNKAILEDAYNSQKNLSMAWIDYQKAFDSVSHEWLLRVLDIYKCPPMIKKFLCATMPSWKVIMTARGTQESITTEPIYIRRGIFQGDSLSPLLFCLALNPLSTILNKYKTKGYKLKDSYWINHLLYMDDLKIYASNNNNLKVLLDSVEIFTQDIGMIFGLDKCNTLHLASGRRKSTTGEAHALLNGETFQQLAIDNTYKYLGIHESGKIDHNMVKEQIIKEYFKRIKKLLNTHLNARNVIKGINAFAIPVLLYSFGIINYKNSDLKRIDIKTRKLLAIHKAHQQKAEVERLYLPIAHGGRGLQNVENLFKIQILKYQQYIKQNDDYLIELIAEHDLHRQKYSIKKYSEEIQRELSLQPNNNHTDKEIKEAIIKIQLDRWSNKQLHGQFLKKVLQSANIDKEQSFRWLKKQQVSPSIESAIFATQDQAVMTRQHRRDILKEQVDGKCRLCAAKDETTQHIISGCEKLASTYYTRRHNNLVKYVYWCLAKRYNIPVSNLWWQETMTQPQVKENENAKIMWEIPVQTDVTVTHNRPDLILTDKHNNKTYLIDITVPSDYNIGAKEIEKLSKYHLLKTEISRLWNTHTSVIPIVVGATGVVAKSLTRYIDVLDTYININILQKQAAIHTTTILSKVLGDTIFVNNTDTNNITHIQQSSTTHASTQVINSPN

SEQ ID NO: 9680 - protein, 1250 aa, Entheus sp.
MERQLKNCRQGPLPGGDRRGTSGADAGRSSTQTVSGSLLNRRARAGGPENITADQWGGEGTGDALQGGALPTDPVGSLVTTTSNTINNDRRRKWSTEELQELMFCYFKARSGGPGYIDRLQELFSERNPNNSKILKFNGNTLSNQARRVIKQNVLSQELLDRIQKLAEGTIEIIENTEPNLDKEQSQNTSNTSIEIPQNTYNQEHTTEHLQLIDRLTQNIQVNEDQDPIILNFLQILSETKETSIAERPFLPKAKINRQFIKNLHILNTYLPNILVTNNSLRDINNIIYATAKTLIISNSQSPYIPKDNLKIKSDPPWKKRIQTKIETFRKELGQLIELDRGINTRRMIKIKDKLYRKHNILNENDHKNIEEILKQKIKALASRIKRYEDINTRKKQNSLFVENEHKLYRNLGGRSFKDIKLPNKDTVEEYWSSILSNPTKYNTKAKWITEVENSSRDINTVDIEKISEDQIKYAIRKLQNWKSPGIDKIQNYYLKYLTSVHSYLATLFTNIVHCRETLEEWFTTGQVILIPKNEHTTDPKNWRPIACLSTMYKLLTSVLGNILYNHCHQNNIIAIEQRGCRRGVKGCKDHLMVNKAILEDAHQSQKNLSMAWIDYQKAFDSVSHEWLLRVLDVYKCPSLIKRFLKLVMPSWKVTMTARGNQNSLTTDPIFIKRGIFQGDSLSPLLFCLAINPLSLMLNKYEMKGYKLKDSLWINHLLYMDDLKVYANNRYNLKVLLDSVEIFTSDIGMTFGLDKCNVIHFSSGHRNNVTGEGHILLNRETIKELAIGDRYKYLGIHESGKIEHSVIKDQITKEYFNRIKKLLNTHLNSRYLIKAINTYAVPVLLYSFGIINYKNCDLKKIDTKTRKLLAIKKAHQQKAEVERLYLPLNQGGRGLLNIEFMHITQIIKYKQYLQEESDDLIKLIASHDISRDKYSIINDAKEIENQLHLKKATVHTDNEIKEAIIKKCNVQWRNKQLHGQFPKKVLDQANIDTELSFKWIKKQQISPKIESSVFAIQDQAIMTRQHRRDILKEQLDGKCRLCACKDETTQHIISGCEKLAGNYYIKRHNNLVQYVHWCLAKKHKIEVSHLWWKENLVQPQVKENDTAKILWEMPVQTDITITHNRPDLIYIDKTNNKTYLIDITVPSDYNIGPKEIEKLSKYHLLKTEISRLWNTKTTVVPIVIGATGVVAKNITKYINQLDASIDISILQKQAAIHSITTLSKVLGDTVFTKNTQIHNTQNPANSTHIT

SEQ ID NO: 9681 - protein, 1278 aa, Muschampia plurimacula
MFCYFKAQNDGPGYTHRLYQLFKYRNPNNPKIHKFNGNTLATQARRIIKQNIVSQELLERIKRTAVGQDTHVAQVIAENTDHTEIIESITENIDIAQSSQYSQVKENRTTEQNIYHPPIETQTIDELTRNITVDENQDPLILNFLEILAETKNITIEDRFLLPKANINKKFLHNFQKINKYLPNLLSINTTLREINDVIYAAAKTLIVNNRQSPFVPNNIIKTIKDPRWKNRIQTKIHKFRKELGQFTEIGKGINTRKMLKIKNKLFTKYNIQNENDRINRVEFLKQKIKALAGRVKRYGDIIARKEQNKLFSENQHKLYRSLESHNISNIKIPSKDNVENFWKSILSNPIYYNRDAQWIKYLEEAQTNVHTTERDSITVEEVKNAISKLHNWKTPGIDKIQNYYLKHFTNAHTYLATLFTKLVTGTELLEDWFTTGQVILIPKNTQTDDPKNWRPIACLPSTYKLLTSVLANQLYKHCQDNEIIAVEQRGCRRGARGCKDHLMINKAILEDAHQSQKNLSMAWIDYRKAFDSISHEWLMKILDIYKCPSMIRNFLQNVMPSWRVIMTARGTQNSITTAPIYIKRGIFQGDSLSPLLFCLALNPISEILNKYEMKGYKLKDSFYINHLLYMDDLKVYANNKSNLKVLLDSIDIFTNDIGMSFGLDKCNVLHIKAGRREKTTGNGHVLLNGDTFNELGIENKYKYLGIHESGKIEHSTVRDQLKKEYFRRVKKILNTHLNARNIIQGINTYAIPVLLYSFGIINYKITDLKQIDTKTRKILSIKKAHHQKSDIERLYLPVNQGGRGLLNVENMYKIQILKYKQYLRIEQDYLIKSIAQHDTSRDKYSIINDAREIETELSLIRRETHSDKDIKEAIVRKQNNTWRTKPLHGQFPRKVLDQMNIDKELSFKWIKNQQITPAIESTIFAIQDQAVNTRQHQRDILKIQTDGKCRLCASKDETAQHIISGCEKLAGTYYVRRHNNLVQYVFWCLARKHKIDVATLWWQETLLQPQVKENNSAKILWEMPVQTDITVTHNRPDLIYIDKENNKTYLIDISVPTDYNTGAKEIEKLSKYHLLKTEITRIWNTQAIIIPIIIGATGIVAKNITQYINKLDANIDIHILQKQAAIHTSIILSKVLGDTALTQQTVPQQTMNTPIIDQSISRLSKQQVSITQPANRKNRQEQTRKKKQTVTQQMMNTPNKQQILITPAIFQTTNTQYSGTEEIIRNTTTSQETPNIFKTHSIANTLNTSHQHLQTQEVLESTLTQRLRRRNKNKNNA

SEQ ID NO: 9682 - protein, 1188 aa, Sycophaga agraensis
MPLRFYSMESNDNIASDAASREMPPNLPVAAEINAERLGGGMRASLRTRQSERVRIDLTTRARSEPEVIWEETKLEILATAVEHLSCPVCKDLRLNLICIGAKALEDHAKDKHPGTRITWKCRDCLKTYVTAHGLRIHARHCKGPTVLVEREFKCSLCEAQFNTIIGLSQHERIRHPALRNSKREQQAAGTGRKGRLPSLLNDDEFQRLIELDAQYSSCKQINAKIRQHFPNLTCKQIGDLRRRIPRNEEPINVSNMAHDAPEADSSGSGSDAFVDASDSFDTISVDPEADNVAEPPTDSPQVISQEWTVLLRERINQSVELREPWRRLHESIKEAASNESTAESLDALGALLSTTLLEQAPKENKRQGGLRKTKRRVNNNRPPNRNAKKRYFYARCQEMVNKCPKRLADIIVANDMSLLQKGEPPKSRDIEALYNSLWNRCGPRQLDITAPTVAERNAGSFWRHITAEEIRKKVISMARDTAAGPDGIKRSALMKGDAQVIIAAFYNLIMLKRHYPTDWKMNRTTLIPKTGKDKADVRNWRPLTIGSILSRIFSALIDKRLRVNIKQSSRQKGFSDENGCCINVETLNAAIRHVKKEGGVIGVTDLEKAFDTIPHSMIPVALRLKGVPESMTQFIASMYIGVKTSIKASDGDVAIEIKRGVKQGDPLSPLLFNLCIEPMLDQLQQNTDGISLDGERKLAVLAFADDVVLLARDSHSSKQQFDIVQNYLAKLEMNLSVSKCTATEFVAKSKTFYIKDPNIELGGSKIDFVAPEESLRYLGAKIKPWKGLISDFEIETFKTMIGRVRRLPLKPIQAINLLTTYLLPRYLYGLIIKPPSIATLKSIDKVVRKEVKEMLHIHPTVCNEFMYTAKRCGGLGLPNIEKSVLVAALRNGIKAGSSRDEVTREVMKGDTIQKALVGYSKQLRLSWPVSLKELEKRKRQIKREYLVEWSRKMGQGQGVLAFDNDMVANEWLKRGGILKPSLTTKAIKLRTNTYATRMVLRRDPQHRAVSELCRKCGVGKENLPHILGLCLDTKTARMRRHDDIKDFIRDKVGASHNVLDEPRILHQGALYKPDLVVEVNEAEALVVDITVRYEKDERLREARIEKEEKYKPICDVVKVLLNRPKVTVAAIVVGTRGAMPQQTISELKRMGITNKKDWLTLSMIALRTSIGIMERFFDYDAEAGPLS

SEQ ID NO: 9683 - protein, 1078 aa, Gonioctena quinquepunctata
MFAYRTPHDIHKHNQSLATLIKKNINNPPNLITSHTLFKNNFSNIQNLTKRVVSKISDGDISSAIRIMSSSDTVANFDSSTLLELQSKHLVASNQCNISAPDDEALQVTESDVMKTIKSFRVGSSGGLDSLRPSHIQDLLSHSSGFSKDKLLSSITSLCNFMLAGKVNPDICPILYGATLCALKKKTGGIRPIAIGLFYRRLVAELGCLDVRDRLGKLFRPVQFGFGTPGGCGAVTHAALQFINYHPNSSSKIFLKLDFKNAFNSIHRNILLDQIKNMIPNLFPFLNQCYQNETFLSFGDSLIMFGRGVQQEDPLGLALFCLAIEKSTKSLNCDFNCWYLDDGSIGGDIDSVLDNLRTVISTPKAVGLELNFNKCEMFSLSTLKPDELLKFTSLVPGITFQEKPNWNLLGAPLSDEALPVCLIEKQRALSLIASRMSDIPTHIAFFILKNCLAIPKLTFIMRCSPTWHSEEQLLEFDSILRKILEEITNNHMPDNTWRQATLPVDKGGLGIRLASSLKLPTYLSSFSSVPQLVYMILPDSFSNLPNHLFVEGEQEWISKTNSKLPELMKKFRRTWDRPLIEMVAKDLLVSAMSAEEKARIKAVTFHHSGAWLNASPAASLGSLLDDESFRISIGLRLGSPICVPHTCKCGVLVDEEGTHGLSCKFSAGRQSRHHAVNDLLKRALTTANIPSILEPTDVSRDDGNRPDGMTLIPWKFGKPAVWYFTCVDSVATSHVVAFSKCPGAAAVNGEKIKIKKYQNLQQLFIFYPVAVETFGVFGPNAFEFIEDIGRRITEVTNDRRATSFFIQRISIAIQRGNAASVLGTFPSSRQLNELFSNPQRTIFPMESSYKSLGSVLDNDLSKSTRPSISPCNSSSNSVISLPHRSSASKNNRIREHSSVSYNTIKSLVHGSAKIPGLNGLKNIGNTCFMNSIIQCLSNTKWLLEYLRKDEYMRDINTSISNTKGALIKQFALVIKDLWSKDSSDKVVNTVFFKSQLQKFAPRFMGYAQQDAQEFLRYLLEGLHEDVNRVTEKPKPTLKEIDEILSDHEKAQESWSRYLRKDNSKIVGNFVGQLKSSLN

SEQ ID NO: 9684 - protein, 1024 aa, Metaphire vulgaris
MESVINENNDLPRTTRKASGVCSHCFVQRQLHIRDGTVHEHGPRNNRCPGSHLPPLTAAVDTSQVYEITDRRNLPTIHNSSTISDSPNHPDPQVRVIKHIPKSALFACSSKLTDILGSIAAHPENQELWRALLGFATTFLRQPSRAGRNRKLSQIIKSRLNQSSIIQEIDTAKLTKPHCFKPKPKSPDERLIAAVTAKLEDGNIRAATRILCDNDHPIEPNADSFAALLEKHPSNTYQEEMRCLPTPTAITTCLKVTVQDVEQAVNSFPKGSAGGPDGFRPQHLVELVKNKESAAELLRALTDFTNVILSGKCPQQVIPILFGGNLIALSKKTGGLRPIAIGYIWRRLVAKCANRYAVSKLAPDLIPIQIGVGCPGGCEAAVHAARTFITNMHHDQLFVKLDFANAFNSVRRDVMLRSVYEHIPELYSFIHQSYAYPSILQFGPFAIRSEMGPQQGDPLGPLLFLSSSAANSTFLQSQLKIGYLDDLTLGGSQKAVMNDLSKIIELETSLGISLNRRKCEIYGESSVVSDAFNDFRRVEFGSLELLGAPLFKGSALDESLRKQCATLEDAIKRLCCLPTQHAIILLRSSFGAPKLTHLLRCSPCSEHPLLEVIDKIMRTGIQNILNVDLDDTQWLQATLPIREGGLGFRAVSTLAPYAYLASAASTERTKSAILGTLDTQDPLVSQLIIKIKAPSSIIESLPTSQKAWEGPAIESTRKQIWDSYTDPFNRARLTAVAAPHAGDWLHLPLASCGLFLDNEAIRVAAGLRLGLNICAPHKCQCGEIVDPRGQHGFVCRLSAGRSIRHCTLNDIIWQALQKAGVLSTKEPLGLLRSDGKRPDGATLIPWASGKYVAWDVTSVHTCAKSYLHLTSHSLGAAAENAATRKHHKYSGLPVSYKFIPIAFETMGPLNAEGSEFIAEIGRRIACVTGDPREPFYLFQRLSACTQRFNNVAFKGTFSSKTKNLPELHSFKIMTDVETNVEIEESNEEASELFIVDDKTARQKKKAGGIQKQERHQSRASSLRE

SEQ ID NO: 9685 - protein, 949 aa, Metaphire vulgaris
MESVIIEKNDLPRMTRKASGVCSHCFVQRQLHIRDGTVHEHGPRNNRCPGSHLPPLTAAVDPSQVYQITDRRNQLTIPESSTISDSPNHPDPNVRVIKHIPKSALFACSSKLTDFLGSISAHPENQELWRALLGFATTFLRQPSRAGRNRKLSQIIKSRLNQSSIIQEIDTAKLTKPHCFKPKPKSPDERLIAAVTAKLEDGNIRAATRILCDNDHPIEPSADSFAALLEKHPSNTYQEEMRRLPTPTVITTCLKVTVHDVEQAINSFPKGSAGGPDGFRPQHLVELVKNKESAAELLRALTDFTNVILSGKCPQQVIPILFGGNLIALSRKSGGLRPIAIGYIWRRLVAKCANRYAVSKLAPDLVPIQIGVGCPGGCEAAVHVARTFITNMRHDQLFVKLDFANAFNSVRRDVMLRSVYEHVPELYPFIHQSYAYPSILQFGPFSIRSEMGPQQGGPLGPLLFCLPLQPTLRALQSQLKIGYLDDLTLGGSQKAVMNDLSKIIELETSLGISLDRRKCEIYGESSVVSDAFNDFRRVEFGSLELLGAPLFKGSALDESLRKQCATLEDAIKRLSCLPTQHAIILLRSSFGAPKLTHLLRCSPCSEHPLLEVIDKIMCTGLQNILNVDLDNTQWLQATLPIHEGGLGFRAVSTLAPYAYLASAASTERTKSAILGPLDTQDPHVSQLIIKIKAPSSIIESLPTSQKAWEGPAIEQARKQIWDSYTDPFNRARLTAVAAPHAGDWLHALPLASCDLFLDNEAIRVAVGLRLGLNICAPHKCQCGQIVDPRGQHGFVCRLSAGRSIRHCTLNDIIWQALQKAGVPSTKEPLGLLRSDGKRPDGATLIPWASGKYVAWDVTSVHTCAKSYLHLTSNSLGAAAENAATRKHHKYSGLPVSYKFIPIAFETMGPLNAEGSEFIAEIGRRIACVTGDPRESFYLFQRLSLHTAIQ

SEQ ID NO: 9686 - protein, 1169 aa, Metaphire vulgaris
MESVINENNDLPRTTRKASGVCSHCFVQRQLHIRDGTVHEHGPRNNRCPGSHLPPLTAGVDTSQVYEITDRRNLPTIHNSSTMSDSPNHPDPQVRVIKHIPKSALFACSSKLTDILGSIAAHPENQELWRALLGFATTFLRQPSRAGRNRKLSQIIKSRLNQSSIIQEIDTAKLTKPHCFKPKPKSPDERLIAAVTAKLEDGNIRAATRILCDNDHPIEPNADSFAALLEKHPSNTYQEEMRRLPTPTAITTCLTVTVQDVEQAINSFPKGSAGGPDGFRPQHLVELVKNKESAAELLRALTDFTNFILSGKCPQQVIPILFGGNLIALSKKTGGLRPIAIGYIWRRLVAKCANRYAVNKLAPDLIPIQIGVGCPGGCEAAVHAARTFITNMHHDQLFVKLDFANAFNSVRRDVMLRSVYEHIPELYHFIHQSYAYPSILQFGPFAIRSEMGPQQGDPLGPLLFCLPLQPTLRSLHSQLKIGYLDDLTLGGSQKAVMNDLSKIIELETSLGISLNRRKCEIYGESSVVSDAFSDFRRVEFGSLELLGAPLFKGSALDESLRKQCATLEDAIKRLCCLPTQHAIILLRSSFGAPKLTHLLRCSPCSEHPLLEVIDKIMRTGIQNILNVDLDNTQWLQATLPIREGGLGFPAVSTLAPYAYLASAASTERTKSAILGPLDTQDPLVSQLIIKVKAPSSIIESLPTSQKAWEGPAIESTRKQIWDSYTDPFNRARLTAVAAPHAGDWLHALPLASCGLFLDNEAIRVAVGLRLGLNICAPHKCQCGEIVDPRGQHGFVCRLSAGRSIRHCTLNDIIWQALQKAGVPSTKEPLGLLRSDGKRPDGATLIPWASGKYVAWDVTSVHTCAKSYLNLTSHSLGAAAENAATRKHHKYSGLPVSYKFIPIAFETMGPLNAEGSEFIAEIGRRIACVTGDPRESFYLFQRLSACTQRFNNVAFKGTFSSKTKNLPELHSFKFMTDVETNDVEIEESNEEASELFIVDDKTARQKKKKQEEYKSKNATKAEQVLYENENDIAGVNEPEMPKETENESPPEKSEATEEWTEDEKDEKSRFGENIKKKMNRKKTPKAGKPEQTVPPSIPIIIIDLLPDGGPVGAIQEHDVGADSNMAKDIFTSEEARARDRVQNDTYKEIGLHRIDGIERGIHDVVVRMTT

SEQ ID NO: 9687 - protein, 992 aa, Metaphire vulgaris
MESVIIENNDLPRTTRKASGVCSHCFVQRQLHIRDGTVHEHGPRNNRCPGSHLPPLTAAVDPSQVYQITDRRNQLTIPESNTISDSLNHPDPQVRVIKHIPKSALFACSSKLTDILGSIAAHPENQELWRALLGFATTFLRQPSRAGRNRKLSQIIKSRLNQSSIIQEIDTAKPTKPHCFKPKPKSPDERLIAAVTAKLEDGNIRAATRILCDNDHPIEPNAGSFAALLEKHPSNTYQEEMRRLPTPTAITTCLKVTVQDVEQAINSFPKGSAGGPDGFRPQHLVELVKNKESAAELLRALTDFTNAILSGKCPQQVIPILFGGNLIALSKKTGGLRPIAIGYIWRRLVAKCANRYAVSKLAPDLVPIQIGVGCLGGCEAAVHAARTFITNMHHDQLFVKLDFANAFNSVRRDVMLRSVYEHIPELYPFIHQSYAYLSILQFGPFAIRSEMGPQQGDPLGPLLFCLPLQPTLRSLHSQLKIGYLDDLTLGGSQEAVMNDLSKIIELEASLGISLNRRKCEIYGESSVVSDAFGDFRRVEFGSLELLGAPLFKGSALDESLRKQCATLEDAIKRLCCLPTQHAIILLRSSFGAPKLTHLLRCSPCSEHPLLEVIDKIMRTGIQNILNVDLDDTQWLQATLPIREGGLGFRAVSTLAPYAYLASAASTERTKSAILGPLDTQDPLVSHLIIQIKAPSSIIESLPTSQKAWEGPAIESTRKQIWDSYTDPFNRARLTAVAAPHAGDWLHALPLASCGLFLDNEAIRVAVGLRLGLNICAPHKCQCGEIVDPRGQHGFVCRLSAGRSIRHCTLNDIIWQALQKAGVPSTKEPLGLLRSDGKRPDGATLIPWASGKYVAWDVTSVHTCAKSYLHLTSNSLGAAAENAATRKHHKYSGLPVSYKFIPIAFETMGPLNAEGSEFIAEIGRRIACVTGDPREAFYLFQRLSACTQRFNNVAFKGTFSSKPKPARAAFVQDYDRRRDERRRDERRRNRRVE

SEQ ID NO: 9688 - protein, 1303 aa, Metaphire vulgaris
MESVIIENNDLPRTTRKASGVCSHCFVQRQLHIRDGTVHEHGPRNNRCPGSHLPPLTAAVDPSQVYQITDRRNQLTIPESSTISDSANHPDPNVRVIKHIPKSALFACSSKLTDFLGSISAHPENQELWRALLGFATTFLRQPSRAGRNRKLSQIIKSRLNQSSIIQEIDTAKPTKPHCFKPKPKSPDERLIAAVTAKLEDGNIRAATRILCDNDHPIEPSADSFAALLEKHPSNTYQEEMRRLPTPTAITTCLKVTVHDVEQAINSFPKGSAGGPDGFRPQHLVELVKNKESAAELLRALTDFTNVILSGKCPQQVIPILFGGNLIALSKKTGGLRPIAIGYIWRRLVAKCANRYAVSKLAPDLIPIQIGVGCSGGCEAAVHAARTFITNMRHDQIFVKLDFANAFNSVRRDVMLRSVYEHIPELYPFIHQSYAYPSILQFGPFAIRSEMGPQQGDPLGPLLFCLPLQPTLRSLHSQLKIGYLDDLTLGGSQEAVMNDLSKIIELEASLGISLNRRKCEIYGESSVVSDSFSDFRRVEFGSLELLGAPLFKGSALDESLRKQCATLEDAIKRLCCLPTQHAIILLRSSFGAPKLTHLLRCSPCSEHPLLEVIDKIMRTGLQNILNVDLDNTQWLQATLPIREGGLGFRAVSTLAPYAYLASAASTERTKSAILGPLDTQDPLISQLIIQIKAPSSIIESLPTSQKAWEGPAIESTRKQIWDSYTDPFNRARLTAVAAPHAGDWLHALPLASCGLFLDNEAIRVAVGLRLGLNICAPHKCQCGEIVDPRGQHGFVCRLSAGRSIRHCTLNDIIWQALQKAGVPSTKEPLGLLRSDGKRPDGATLIPWASGKYVAWDVTSVHTCAKSYLHLTSNSLGAAAENAATRKHHKYSGLPVSYKFIPIAFETMGPLNAEGSEFIAEIGRRIACVTGDPREAFYLFQRLSACTQRFNNVAFKGTFSSKTKNLPELHSFKIMTDVETNDVETNDFEIEELNEEASELFIVDDKTARQKKKNQEEYKSKNATKAEQVLYENENDIAGVNEPEMPNETENESPPEKSEATEEWTEDEKDEKSRFGKNIKKKMNRKKTPKAGKPEQTVPPSIPFIDLLPDGDPVGELQDHDVGADSNMAKDIFTSEEARARDRVQNDTYKEVRIAAEVHRQTRKYMQTIFNPGPKLIDLCETLEGITRKLIKEDGLRAGLAFLMDVSINNYAAHYNPNNGDMTVFQHDDLMKVDFGIHFNGRVIDCAFTVAFNSRYDPLLAAMKDATNTGIRERRIDVRISDVGEAIREVIESMRLNWTERCTQ

SEQ ID NO: 9689 - protein, 1166 aa, Metaphire vulgaris
MESVINENNDLPRTTRKASGVCSHCFVQRQLHIRDGTVHEHGPRNSRCPGSHLPPLTAAVDTSQVYQITDRRNLPTIHNSSTISDSPNHPDPQVRVIKHIPKSALFACSSKLTDILGSIAAHPENQELWRALLGFATTFLRQPSRAGRNRKLSQIIKSRLNQSSIIQEIDTAKPTKPHCFKPKPKSPDERLIAAVTSKLEDGNIRAATRILCDNDHPMEPNAESFAALLEKHPSNTYQEEMRCLPTPTAITTCLKVTVQDVEQAINSFPKGSAGGPDGFRPQHLVELVKNKESAAELLRALTDFTNVILSGKCPQHVIPILFGGNLIALSKKTGGLRPIAIGYIWRRLVAKCANRYAVSKLAPDLIPIQIGVGYSGGCEAAVHAARTFITNMHHDQLFVKLDFANAFNSVRRDVMLRSVYEHIPELYPFIHQSYAYPSILQFGPFAIRSEMGPQQGDPLGPLLFCLPLQPTLRSLHSQLKIGYLDDLTLGGSQKAVMNDLSKIIELETSLGISLNRRKCEIYGESSVVSDAFNDFRRVEFGSLELLGAPLFKGSALDESLRKQCATLEDAIKRLCCLPTQHAIILLRSSFGAPKLTHLLRCSPCSEHPLLEVIDKIMRTGIQNILNVDLDDTQWLQATLPIREGGLGFRAVSTLAPYAYLASAASTERTKSAILGTLDTQDPLVSQLIIKIKAPSSIIESLPTSQKAWEGPAIESTRKQIWDSYTDPFNRARLTAVAAPQAGDWLHALPLASCGLFLDNEAIRVAVGLRLGLNICAPHKCQCGEIVDPRGQHGFVCRLSAGRSIRHCTLNDIIWQALQKAGVPSTKEPLGLLRSDGKRPDGATLIPWASGKYVAWDVTSVHTCAKSYLHLTSHSLGAAAENAATRKHHKYSGLPVSYKFIPIAFETMGPLNAEGSEFIAEIGRRIACVTGDPREPFYLFQRLSACTQRFNNVAFKGTFSSKTKNLPELHSFKIMTDVETNVEIEESNEEASELFIVDDKTARQKKKKQEEYKSKNATEAEQVLYENENDIAGVNEPEMPKETENESPPEKSEATEGWTEDEKDEKSRFGENIKKKMNRKKTPKAGKPEQTVPPSIPIIDLLPDGSPVGAIQEHDVGADSNMAKDIFTSEEARARDRVQNDTYKEIGLHRIDGIERGIHDVVVRMTT

SEQ ID NO: 9690 - protein, 1167 aa, Metaphire vulgaris
MESVINENNDLPRTTRKASGVCSHCFVQRQLHIRDGTVHEHGPRNSRCPGSHLPPLTTAVDTSQVYQITDRRNLPIIHNSSTMSDSLNHPDPQVRVIKHIPKSALFACSSKLTDILGSIAAHPENQELWRALLGFATTFLRQPSRAGRNRKLSQIIKSRLNQSSIIQEIDTAKLTKPHCFKPKPKSPDERLIAAVTAKLEDGNIRAATRILCDNDHPIEPSADSFAALLEKHPPNTYQEEMRCLPTPTAITTCLKVTVQDVEQAINSFPKGSAGGPDGFRPQHLVELVKNKESAAELLRALTDFTNVILSGKCPQQVIPILFGGNLIALSKKTGGLRPIAIGYIWRRLVAKCANRYAVSKLAPDLIPIQIGVGCPGGCEAAVHAARTFITNMHHDQLFVKLDFANAFNSVRRDVMLRSVYEHIPELYPFIHQSYAYPSILQFGPFAIRSEMGPQQGDPLGPLLFCLPLQPTLRSLHSQLKIGYLDDLTLGGSQKAVMNDLSKIIELETSLGISLNRRKCEIYGESSVVSDAFNDFRRVEFGSLELLGAPLFKGSALDESLRKQCATLEDAIKRLCCLPTQHAIILLRSSFGAPKLTHLLRCSPCSEHPLLEVIDKIMRTGIQNILNVDLDDTQWLQATLPIREGGLGFRAVSTLAPYAYLASAASTERTKSAILGPLDTQDPLVSQLIIKIKAPSSIIESLPTSQKAWEGPAIESTRKQIWDSYTDPFNRARLTAVAAPHAGDWLHALPLASCGLFLDNEAIRVAVGLRLGLNICAPHKCQCGEIVDPRGQHGFVCRLSAGRSIRHCTLNDIIWQALQKAGVPSTKEPLGLLRSDGKRPDGATLIPWASGKYVAWDVTSVHTCAKSYLHLTSHSLGAAAENAATRKHHKYSGLPVSYKFIPIAFETMGPLNAEGSEFIAEIGRRIACVTGDPREAFYLFQRLSACTQRFNNVAFKGTFSSKTKNLPELHSFKFMTDVETNDVEIEESNEEASELFIVDDKTAPQKKKKQEEYKSKNATKAEQVLYENENDIAGVNEPEMPKETENESPPEKSEATEEWTEDEKDEKSRFGENIKKKMNRKKTPKAGKREQTVPPSIPIIDLLPDGGPVGAIQEHDVGADSNMAKDIFTSEEARARDRVQNDTYKEIGLHRIDGIERGIHDVVVRMTT

SEQ ID NO: 9691 - protein, 1035 aa, Metaphire vulgaris
MESVIIENNDLPRTTRKASGVCSHCFVQRQLHIRDGTVHEHGPRNSRCPGSHLPPLTAAVDTSQVYQITDRRNLPTIHNSSTMSDSLNHPDPQVRVIKHIPKSALFACSSKLTDILGSIAAHPENQELWRALLGFATTFLRQPSRAGRNRKLSQIIKSRLNQSSIIQEIDTANPTKPHCFKPKPKSPDERLIAAVTAKLEDGNIRAATRILCDNDHPIEPSAGSFAALLEKHPSNTYQEEMRLLPTPTTIITCLKVTVHDVEQAINSFPKGSAGGPDGFRPQHLVELVKNKESAAELLRALTDFTNVILSGKCPQQVIPILFGGNLIALSKKTGGLRPIAIGYIWRRLVAKCANRYAVSKLAPDLIPIQIGVGCPGGCEAAVHAARTFITNMHHDQLFVKLDFANAFNSVRRDVMLSSVYEHIPELYPFIHQSYAYPSILQFGPFAIRSEMGPQQGDPLGPLLFCLPLQPTLRSLHSQLKIGYLDDLTLGGSLEAVMNDLSKIIELEASLGISLNRRKCEIYGESSVVSDSFSDFRRVEFGSLELLGAPLFKGSALDESLRKQCATLEDAIKRLCCLPTQHAIILLRSSFGAPKLTHLLRCSPCSEHPLLEVIDKIMRTGIQNILNVDLDNTQWLQATLPIREGGLGFRAVSTLAPYAYLASAASTERTKSAILGPLDTQDPLISQLIIQIKAPSSIIESLPTSQKAWEGPAIESTRKQIWDSYTDPFNRARLTAVAAPHAGDWLHALPLASCGLFLDNEAIRVAVGLRLGLNICAPHKCQCGEIVDPRGQHGFVCRLSAGRSIRHCTLNDIIWQALQKAGVPSTKEPLGLLRSDGKRPDGATLIPWASGKYVAWDVTSVHTCAKSYLHLTSNSLGAAAENAATRKHHKYSGLPVSYTFIPIAFETMGPLNAEGSEFIAEIGRRIACVTGDQREAFYLFQRLSACTQRFNNVAFKGTFSSKTKNLPELHSFKIMTDVETNDVETNDVETNDVEIEELNEEASEHRRRQNRSTEEEKPGGIQKQERHQSRASSLRE

SEQ ID NO: 9692 - protein, 1153 aa, Anoncus sp.
MASRRPGARHGSRQMRHSGDAGAGIDVLPEPHVAPPPNPVHPSGRGFRDRARNRQNRSTGTPAPLGGAQLAVNPLNLTEDGSREGATAPPRSEQLPNRNVNNNFEADPGYGAGVRGQPDDRPNGEPDGAPPEGPNPPPGVVRGGFQCPNCERSFATKIGFGVHRQAMHPVEYNAEINVVRRKKQWSDEEIRLLAWEELMAPQNVPVLNVYLAGKFGGTRTVEAVKGMRRQGKYRDALGAVRATMEAREAPQRVMGGGRRENEVEEAVDDAQGQAGNVMVDENPAPAADAAIPREKLREWLRRATSEVGQNVVGGLHLIRAMGRAIDDANPEVELEAWYREQFPPGDGVWQRRRRVEREGESRKEKRRREYTELQTLWRKNQAKAARKILDGDTENEQHLPLNTQEAYWRGVMEEQPEQQGLEGVAIAPGAERCPGVWSPITVAEVSGHYPPAKSSAGPDGLSVADWRTRVPDEIKTIVMNVLLLGECVPAIWRNSRTILIPKIPGAQEPSLYRPISISSVVLSNLHKILAKRVSALGLMDPRQRAFIEADGVAENIFVLVAVIKESRTRLRPIHVATLDVRKAFDPVNHEAITYVLRKNRLPEELVRYMAYVYETSTTVIEVGGERTNPIRPARGVRQGDPLSPLLFNLVVNEVLHGLLPIVGVELGECNVNALAFADDLVLLASTRDGLQRSLDSTAGQLRRFGLTLMSAKCSVLSMIPSGRDKKMKVIERSQFVVDGQVPQVQVMDRWRYLGVSFDRRGLVMSSADFRGMLERVKAGPLKPQQRWRILVTYLLPRATHSLVLGRTTYGELRRLDRQIRGAVRAWFRLPADTPVAFFHAPVKEGGLGIAAFESFIPELKLKRLTSISVSSFPAARAAAATSFVIDTRRWCSRASCRSSEWTRRLHGMVDGWELRETARSSLSSRWFVDDYVRIPSREWIENIRVRINALPSGMRTSRGARQADREVMCRAGCGRPETTAHIIQECHRTHGGRILRHDAVVKTLAAALQRKEFEVSVERVFMTPAGRRKPDIVARRDGQVYVLDCQIVSGGRPLAVTNRHKREYYANNAALMEAIAGEAGVGVERVKVEAVTISWRGVWAKETDICLRAIGIPYAVLSGITTRVLQGSHLNFARFNQMTAMANGRHGARQGVG

SEQ ID NO: 9693 - protein, 1154 aa, Anoncus sp.
MANRRSDARHRSRQVRHSGDAGARIDVLPEPHVALPRNPVHPSGRGLRDSGSNRRNRSTHTPALLEGAQLAVNVVNLTEERRGEGATAPPRSEQLPNYNHNNNPEADHGGGVGVQGEGVDRPDGELGGAPPGGPDSPPGVIRGGFQCPNCERSFGTKIGLGVHRQALHPVEYNTDINVARRKKQWSDEEIKLLAWEELMAPRNVPVLNVYLAGKFGGRRTVEAVKGMRRRGKYHDALEAVRMTLEAREAPQRVMGRRRRDNGVEEVVDGARGQAEDVVVGENPVHGAEVIGPQESLRRWLRRAASEVGHNVGGRIHLVRAMSLAVDGANPEVELEAWCREQFPLVDQGRQRRRRGERGGESRNQKRRRDYRELQILWRKNQAKAAHKILDGDTEDDQHLPLNTQEAYWREVMESQPEQQGLDRALAAPDDGHHGDVWSPITMAELARNYPPAKSSAGPDGLSVSDWRAKVPDEVKAMVMNVILLSERVPAIWRDSRTILIPKKPGAQEPSLYRPISISSVVLRHLHKILAKRVSVLGLMDPRQRAFIEADGVAENIFVLAAVIRESRARLKPLHVATLDVRKAFDTVNHEAIDYVLRKNGLPEELIRYMAYVYETSTTVIEVGGERTNPIRPARGVRQGDPLSPLLFNLVINEVLDELLPIVGVELGECNVNALAFADDLVLMASTRDGLQRSLDSTARQLKRFGLTLMSAKCSVLSMIPSGRDKKIKVIENSQFVVDGRDVPQVQVMDQWKYLGVTFDRRGLRMSSGDFRVMLDRVKAGPLKPQQRWRVLVTYLLPRATHSLVLGRTTYGELRRLDRQIRGAVRAWLRLPADTPVAFFHAPVKEGGLGIPALESFIPEVKLKRLSGLNASSLPAARAAAATSFVSDTRRWCSRAACRSAEWARRLHGMVDGWELRETVRSGLSSRWFVDDYVRIPSREWIEDIRVRINALPSGMRTSRGARRADREVMCRAGCRRPETTAHVIQECHRTHGGRILRHDAIVKTLAIALQRKGFEVTVERVFITPVGRRKPDIIARRDGQVYVLDCQIVSGGRPLTDTNRHKREYYANNAALMEAIAREAGVGVERVKVEAVTISWRGVWAKETDICLRTIGIPYSVLNGITTRILQGSHLNFARFNQMTTMVNGQQGVRQGVG

SEQ ID NO: 9694 - protein, 1164 aa, Euura saliciscinereae
MSWHAHKSKCKGERKIVQGAFPCQECEFRCTSQRGLATHERHEHPELRNTTRKANAERPVEHKVRQSSVWSEEDTRRLIEYDREFQGDRLINKKIKVFFPNKTLKQISDKRRHLKEKGVRVGEHAIDQDQEGPLLAEIGEEAPVEIENNNPDENQDGVDGSDTEAVSLVIEQHNGHDDNLPGIIIITGDSSNTLTVADEQPGSPMSTDVVQIAEKATGGDNEDTSGESVTDADLQASTDGQLNSSRENTETQTETMPEDPLDAGAVTFWRTSLLEYAEAITLPATGPIREAALNLLEIWREDWIDPVLLRDHVDDWVSRLSTLLLDNKPPADQQNKNKSNRTEKTRGKNDREQEINRPRHNQRGAGPGGPRRPNHAERKRTKYARCQDIFNNCPKKLALAAVSGDLSLINGKEEPPPKESIQALYNPLWGVEGPAQRPQAAPTPRDMPEVFSNTSVDEVKIKIKSIKADSAAGLDQIRKAQLTPTGVPELLTILYNLLIAEEIFPTPWMRNRTTLIPKAGKDLADIKNWRPITIGSMVGRVFTAMIDRKLRSFITQTERQKGFTSANGCQQNTLLLSEAVGTMKADLGGVLTILDVEKAFDTIPHGAIRTSLMRKGTPEPFIRLIEKSYQGCTTVIRAANKETVEIQLKRGVKQGDPPSPLLFNLAIEELLERVSKYSAGISLAGHNLSVMAFADDIVLIAKNRATAQEQLEAVNSHLTNLGMELSIPKCQAFEIVPTNKSWYTKNPNLEVDGERVAHIAPDEVFKYLGAKLSPWNGLEKGGEVTKVNQIIQNVRQLQLKPWQKMELLQTYILPRFIYELTVNMPARGTLKMIDGDIREQVKGIPHLPRATTSGFLYTPKKDGGLGLIRFERTIRYAALKGGISMRNSSDPLLQGAMMRQEGAFKKLATELGLEWPTSAKEHERSKLNAKRSESNEWEKRALQGQGVKDFRGDKIGNKWLAQPSLLKSSRYLDAIRLRTNTYGTRVALSKIKRVENLNCRKCGLKPETLGHILGECTHTKPARIKRHDDIKRLVRDCPAKRHTVFEEATVRDQGELKKPDLVVATSDSVLVMDVTVRYEKQKYLHAAAEEKIAKYANVAESIRARVNKTKAEVIPIVVGSRGTMPRRTVTTLRKLGISSRDLLTISLISLRSSIELANAFIDYD

SEQ ID NO: 9695 - protein, 1220 aa, Potamanaxas melicertes
MRLRSGYKLPQAGTGNGESCPGPSSSGCPTYSGGDTVSQTPAQLQAVAVNKSSTSHTSPHLSSPISSTHSLFRSPSSSPQSYEFHQSSSRSSFTSIMSRDAAQEAIATFPEPTTDITNPTRVLQNNLDNRVYHTTDSSSLNNNTLARSVLQDMLPATTLAGKSRQRMKWSDSINRELLRSYYIVTHNETNLTAWRPLLYQNFIGNYPELNHLSEQRLADQIRVIHRNNRIPASERENIKQLVSTQISNNSNQYSDINTQIINSAPTTPDPEINTNNLSLNSLQHTHVTTPIQVNQSCEHAHTQISEIINNAQDSVGYEKIENTFTEMLIKYTGTDPTLRPTIPKLEISRKVIKSVTATNEIIKKHLQNKENITIGEIHDIIYCGAKTITLIHTNNQEKKQNNTKNMHNNKINTQKKPQWEIRIENKILTLRKEIGQLTQYLSGNLTQKKQQKINKGGKNRDEIIDQLDINKQKLLAYSKRLRRYKTSNQRKFHNKLFNSNQKLFYQKLNTNCINITQPPNIDDIQNYWKNIWSKPAQHNINSMWADIEKQETQNITPMPDILINKDDVIQAIRNTLNWKAPGPDKIQNYWIKYFTATHGHLARLFNNLIKNPQDTPSFLTHGVTYLKPKDNDTTNPAKYRPITCLPTIYKLLTSIITQKLNTHITQNQIIPEEQKGCSRGSRGCKEQLIIDTEIHNQVKHKHRNLFYSYIDYQKAFDSVPHSWLIHILKIYKVDKNLIGFLQYSMNNWVTKLNLRTSDKILCTSSIKILRGIFQGDSLSPLWFCLALTPLSKILNKTEYGYIIDRDNNTKLTHLLYMDDIKLYATSQPQLDHMLKITESFSTDIRMTFGTDKCKINSIIKGQHNEAEGFALNKQEGIIDSMNPSETYKYLGYQQSSSLNHTDIKNTLKAKYKQRLHKVLNTHLSARNKTRAVNSYAIPILTYSFGIIKWSDTELEALNTMTRTVSNKHNTHHIHSAKQRFTLKRKLGGRGFVDIKNLHYTQIENLRTYFFTKAHVSSIHKAIVNLPQSGTALQLNNKEFNPKLKIVTDDLKLENWKKKALHGKFPNILQQEHVDHNASCTWLTKGNIFSETEGFMIAIQDQIIKTRNYSKFILKEAIESDKCRLCHQASENVEHITGGCSILANKEYVHRHDNVAKHIHQQLALKHNLINTYTPYYQYKPKNVIENNIAKLYWDRDIVTDRTVLSNRPDITLTLKSSKTT

SEQ ID NO: 9696 - protein, 1228 aa, Telegonus anausis
MLPATTLAGKSRQRMKWTDEINRELLRCYYVVTHNETNLTAWRPQLHQKFSASFPELNHLSEQRLADQIRVIHRNNRITGAERDQIKQSVSLLLSSLRSTDLTSTNIVEESLNSPHTTNNSEPTTHSHNQTLHPQNTLILNRPYTRHSHMHSQRINTTTQTNDFLQNTEHNQTQNPTTTKQTTSKLLDPIDYNKIENTFAEMLIKYTGTDPTLRPTIPKFQTTRNSIKTVNTINEIVDIHLRTKNSVTLEEIHDVIYCAAQTTVTLHTKHDKIVGNNNNNNSPKELTKQKKPRWETRIEKKIMTLRKEIGQLTQYISGNLSQKKKQKINPNNKSKNDIIEQLDNHKQKLQAYSKRLRRYKVSNQRKLHNKLFNTNQKLFYQKISTEQIQITQTPNIDDVHNYWKNLWSNPVLHNTHHSWNEIEHDETQNIEPMSEIYIDKEDVSQAIKKTLNWKAPGPDKIQNYWLKYLPATHEYIANTFNHLLNNPQDTPSFLTHGITYLKPKDNDTTNPANYRPITCLPTIYKLLTSIISIKLNTHITQNHIIPEEQKGCSKGSRGCKEQLIIDTEIHNQVKHKHRNLYYAYIDYQKAFDSIPHSWLIQILKLYKVNDKLIQFLQDIMKNWTTKLSLRTNNTSICTHPLKISRGIFQGDSLSPLWFCLAINPLSRILNNTGYGYVIDRGSNIRLTHLLYMDDIKLYAASRQQIDHLLKLTEKFSTDIKMSFGTNKCKINSIIKGQQKETHQFELETQGGTIESMEPKETYKYLGYQQSTSISHTHIKNNLKIKYKQRLHKILSTQLSARNKVKAVNTYAMPILTYSFGIIKWSDTELEALNTTTRTASNSHNIHHIHSATQRFTLKRKYGGRGFIDIKNLHYTQIDNLRNYFLIKAKESNLHKAISQLAQSGTSLQLNNSEFDPKLKIFSDNQKIENWKKKALHGKYPHQLEQDHVDRNASCSWLTKGNIFGETEGFLVAIQDQIIKTRNYSKYILKEAIETDKCRLCNQTTETIDHITGGCSVLANKEYTHRHDNVAKHIHQQLALKYKLLNLYTPYYQYKPKNVLENSAAKLYWDRDIITDRTILSNRPDITLTLKSSKTTFLIDIAVPNTHNLKQKHTEKIQKYIPLADEIKQMWHQENVRIIPVIISSTGVIPKTLKTALKLLDLHENTYIPMQKSIVIDTCSIVRRFLNPTTLTLQDSHSNVATHNSSTNNITHNTQTHTQNSSHAHHHSH

SEQ ID NO: 9697 - protein, 1310 aa, Ebrietas anacreon
MTAQPPAVAVDKSHPSNTPVHLSSPTSSSHSLFPSPNSSPQSHKSSFSSNSYSTSPMSCGVVQEAPATLPGPTTDITNHTRASQSNINTRVLHIAHSTSSNNNTPARSVLQDMLPATTLAGKSRQRMKWSDSINRELLRSYYIVTHSETDLTAWRPLLREHIIANFPELNHISEQRFADQIRVIIRNNRIPLAERENIKQLASSQLPATSSHYSDINNTQSITNTASKTTNPQINANIHHNIADSQNTVSIVPTQVDLNWEHDHTQIETLNNAQFSMVYQDIENTFNEMLIKYTGTDPTLRPAIPKLQISRKTIKTVTTVNEIINNYLQNQQTINLVDIHDIIYCAAKTVTLFHTNYRDEKVSAVEDEHSKKINIHRKPQWQMRIDNKISTLRKEIGQLTQYLSGNLTYKKEQKINKNFTSRDNVIEQLDRNKQKLLAYSKRLRRYKISNQRKSHNKLFNANQKLFYQKLDTDGINITQPPHIDDMQNYWKNIWSKPVQHNTNTLWADIEKQETENIIPMPVILIDKDDISQAIRKTLNWKAPGPDKIQNYWIKYFTATHAHIASIFNNLIQNPHETPSFLTHGVTYLKPKDNDTTNPAKYRPITCLPTIYKLLTSIITQKLNTHITLNKIIPEEQKGCSKGSRGCKEQLVIDTEIHHQVKHKHRNLFYSYIDFQKAFDSIPHSWLIYILKIYKVDEILIEFLQHLMNNWNTKINLRTSNKVICTSSIKILRGIFQGDSLSPLWFCLALNPLSKILNKTNYGYIIDRANNIKISHLLYMDDIKIYAASRQELDHLLKITENFSTDIRMALGTEKCKINSIVKGQYSETGGFVLNKQGGTIDGMDPTEAYKYLGYYQSSSLNHTDIKNTLKSKYKQRLNKILSTQLSARNKSKAVNTYAIPILTYSFGIIKWSDTELEALNTTTRTVSNKHNIHHIHSSVHRFTLQRKLGGRGFIDIKNLHYTQVDNLRTYFLAKAQDSSLHKAIVNIHQSGTPLQLNNKQFNPKFKIVTDRQKIENWKKKALHGKFPNVLQQEHVDCDASCTWLTKGNIFGETEGFLIAIQDQIIKTRNYSKFILKEAIDSDKCRLCNQATENIDHITGGCNILANKEYTHRHDNVAKHIHQQLALKYKLINSYTPYYQYKPKNVIENNIAKLYWDRDIITDRTVLSNRPDIVLSLKHSKTTYLIDISIPNTHNLKQKHTEKIQKYINLADEIKQMWHQESVRIVPIIISSTGVVPKTLKSALKLLDLHENTYIPLQKSIVIDTCSIVRRFLNPTTLTLQNNSHPDPNDTTHHSSPPTFTDIHITSNTHP

SEQ ID NO: 9698 - protein, 1358 aa, Zera sp.
MTNGALVPKEYAMRLRNRIIPQAGTREGESRPGPSSSGCPSYSGVGNDSHMTAQSHAVAVNNNNNSSSSSPISSTQSLFQSPPSSPHSYELLSTPQSSTTTTPLSWDVTQVANAEPPASICDNTVPARVLHNDLNNHRAHQHSLSLPSNINTPARSVLQDMLPSTTLAGKSRQRMKWTDQINKDLLRCYYMVTYNETNLTAWRPLLHKKFAEHFPELSHLSEQRLADQIRVIHRNNRIQASEREAIKESLRSSMPNSQNMSNQNTTLNLIPIPNTQVVLQNHNSHNTSSTTQETNTRSQTYQSFINSEHTEAQTLNTINTPLDPPEYQTLENTFTEMLIKYTGTDPCLRPTIPKHQTTRVGIKTVNTVNEIIDRYIRLKEKLPIDEIHNIIYCAAQTVINHTTSKLKLIPNNNNGNTHKQNKPRWERRLENRITSLRKIIGQLTQYLIGNLTYKKQQKINPNNNSITQITEQLDLNKQKLQAYSKRLRRYKISNQRKTHNKLFNNNQRRFYQSLNTEHIQITQPPDIEDIQNYWKSLWSKPVQHNTHITWKEIEERETENIDPMQEIIIEKNDVSEAIRKTLNWKAPGPDKIQNYWIKYFSSTHEHIAMAFDHLMHNPQETPTFLTHGITYLKPKDDDTTNPAKYRPITCLPTIYKLLSSIISHKLQTHITLNQIIPEEQKGCRKGSKGCKEQLVIDTEIHNQVKQKHKNLFYAYIDYQKAFDSIPHSWLIHILKTYKVSNNLIHFLEHTMKHWTTKISLNTNKTSLCTHSIKITRGIFQGDSLSPLWFCLALNPLSKILNNTGDGYVIDRDTNVKITHLLYMDDIKLYATDRQQLDNLLKLTEKFSTDINMSFGTNKCKINSIIRGQHKNTDQFDLSIQGGKIDSMEPNETYKYLGYQQSTSINHTEIKNMLKAKYKQRLHQVLKTQLSARNKTKAINTYAIPILTYSFGIIKWSDTELEALNTSTRTISNKHNIHHIHSAVQRFTLKRKLGGRGVLDIKNLHYTQIENLRSYFLLKANENTLFKAIVKLSQSHTPLQLNNSLYDPKQKILKDEQKIINWKMKALHGKFPHQLDQDHIDRNASLSWLTRGNIFGETEGFIIAIQDQIIKTRNYSKFILKETIASDKCRLCHQNTETIDHITGGCSILAQKEYTHRHDNVAKHIHQQLALKHKLLDTYTPYYQYKPKNVIENSSAKLYWDRDIITDRTILSNRPDITLTLKSTRTTYLIDIAVPNTHNLNQKHSEKIQKYIPLADEIKQMWHQETVRIVPIIISSTGVVPKTLKNALHLLDIHENTYIPLQKSIIIDTCSIVRRFLNPTSLTLQQQNEQHTTPNSIIQNPLTYTSNSNTQPLINHHPL

SEQ ID NO: 9699 - protein, 1379 aa, Cecropterus albociliatus
MRLRNRQIPQAGTREGESRPGPNSSGCPTYSGGGNVSHKTAQSSTVAVDKPLTPSLPSSPISSTHSLFPSPSSSPYSFQLQSSPSSSRSSTITSLSRDVAQEAHADSLVPTTDSTNPTRVTQNKQHNRVTHNTHSSSHTTNTPARSVLQDMLPATTLAGKSRQRMKWTNEINKELLRCYYIVTQNEANLTAWRPQLHRMFVQNVPVLSHLSEQRLADQIRVIHKNNRIPASEREEIKQSVSLLISHSSNSLNNQATVRNNDDDHSNINTTLTTNNLLISDSHSQTLNPQHTLTITHDAIINTHVNQSCESSEHIHVQDSEEINNQSDLVDYKKIQEVFREMLIKYTGTDPTLRPIIPKPQTTRNVIKTVNSINEIIDKYLRTKYFMTLEEIHEVIYCAAQTVIEIHKNRVKTLENSLKSINNNQRKPHWEKRIENKIITLRKEIGQLTQYLNGNLSQKKQKKLNPNNRNQDEIIEQLDNSKQKLQAYTKRLRRYKKSNERKSHNKLFNTNQKLFYQKLNPEQIHITQPPDIIDIQNYWKNIWSIPVRHNTHTSWTEIEEQEMENIDPMPDITINKDDVLLAIKKTLNWKAPGPDKIQNYWIKYLPATHEHLANALNHILCNPQDTPYFLTQGITYLKPKDDDTTNPAKYRPITCLPTIYKLLTSIIAHKLNSHITLNHIIPEEQKGCCKGSKGCKEQLVIDTEIHTQVKQKHRNLYYSYIDYQKAFDSIPHSWLIHILKIYKVDIKLIQFLMHTMNNWTTKLTLHTNNISLTTQKIKILRGIFQGDSLSPLWFCLALNPLSRILNKTDYGYVIDKDTNIKLTHLLYMDDIKLYAGSRIQLDYLLRLTESFSTDIKMTFGTNKCKINSIIKGKHQETDPFHLETLGGTIDSMEFRETYKYLGYQQSTSINHTEIKNTLKTKYKQRLHKIFNTQLSARNKIKAVNTYAIPVLTYSFGIVKWSDTELEALNTATRMISHKHNIHHIHSAVQRFTLKRRLGGRGFIDIKNLHYTQIDNLRSYFLCKSDESPLHKAIVHLHQAGTPLQLNNRQFDPKLKIIKDDEKIEDWKKKALHGKYPHQLEQDHIDYNASCTWLAKGNIFGETEGFLVAIQDQIIKTRNYAKYILKEAIDTDKCRLCQQNTETIDHITGGCSVLANKEYTHRHDNVAKHIHQQLALKHKLLKSYTPYYQYKPKNVLENNTVKLYWDRDIVTDRTILSNRPDITLTLKSSKTTFLIDISVPNTHNLKQKHTEKIQKYIPLADEIKQMWHQESVRIIPIIISSTGVIPKTLKTALKLIDLHENTYIPLQKSIVIDTCSIVRRFLNPTTIALNTHQDTQTGTPTQDSYPRANTQNTQTHTHDVTNTAIITHPNHTNTHESGYLA

SEQ ID NO: 9700 - protein, 1396 aa, Chamunda chamunda
MPREGRTLAALCCRKAYTHTSDQRSYSTSKYAMRLRNRQIPQAGTQQGESRPGPSGSGCPSYSGGGNASHTAQSSTAAVNNTSSHTTHPSSPISSTQSLFPSPNSSLQSYEIQSLSDSPNDTSMSCDVAQEAFANYPEPTTDITNHTRASQNIITNRVNNHPSPLNINTPVRSVLQDMLPATTLSGKSRQRMKWTDEINTELIRCYYLVTQNETNLTNWRPQLHQRFTENYAELSHLSEQRLADQIRVIHKNNRIPVHKREAIKQSISSLLSSLNYSNQQIDIPQTETSHQSNNHQPVLDTLCNRPNTTNLQYTHATTQQINTTSQVHQSIEHIQTQDHETIITPQVSVNYELIENTFTEMLIKYSGTDPTLRPTIPKLQISRNVIRTVHATNELISKHLHNKDIINLEEIHDIIYCAAQTIISITTIHNKHIEVRNTIDKPETNTTIKYQKPQWQRRIETKITLLRKEIGQLIQYINGNLTQKKQQKINPNNKNKDEMIDQLDKNKQKLQAYSKRLRRYKISNERKSHNKLFHTNQKRFYQNLNTEHIHITESPNVEDIEKYWKNLWSKPVEHNTHTSWTEIEEQETQNICPMPKININKNDVTQAIKRTLNWKTPGPDKIQNYWIKYLTATHEPTAKAFNHLIQNPQETPSFMTKGVTYLKPKDNDTTNPSKYRPITCLPTIYKLLTSIISHKLNTHITQNQIIPEEQKGCSKGSRGCKEQLVIDTEIHNQVKQKHRNLFFSYIDYQKAFDSVPHSWLIHILELYKVDNRLIQFLKHTMTNWTTKLNLRTHNKSFNTQPIKILRGIFQGDSLSPLWFCLALNPLSKILNKTGHGYIIDRDKDIKLTHLLYMDDIKLYAANRAQLDHLLKLTEKFSTDIKMSFGTNKCKINSITKGQHKDTNSFDLSIQGGKIDSMEAMDTYKYLGYHQSTSVNHTNIKNTLKIKYKQRLHKILKTQLSAINKIKAINTYAIPILTYSFGVIKWSDTELEALNTATRTACNKHNIHHIHSAVQRFTLKRKLGGRGVIDIKNLHYTQIDNLRTYFLTKASSSTLHKAIVDIPNSGTPLQLNNNLFNPKLKILKDEQKIENWKKKALHGRYPHELEQDHVDRNASCTWLTKGNIFGETEGFLVAIQDKIIKTRNYSKYILKETIDTDKCRLCHHTTETIEHITGGCSILANKEYTHRHDNVAKHIHQQLALKYKLVKSYTPYYQYKPKNVVENNIARIYWDRDIITDRTILSNRPDITLTLKSSKTTYLIDIAVPNTHNLKQKHTEKVQKYMTLADEIKEMWHQESVKIVPIIISSTGVIPKTLKAALKLLDLHDNTYIPMQKSIIIDTCSIVRRFLNPTTLSLQEKQHNVPRHTSTHNLSNTLDTTNTQTSTHPEHTHTQEPGYLA

SEQ ID NO: 9701 - protein, 1206 aa, Bungalotis erythus
MRLRNRQIAGTREGESRPGPSGSGCPAYSGGGNVSHKAAQFHAAAANNSPSHITSHPSSPISSTHSLFQSPSSSPHSYQFRHSSSSSSSRTTTPLSGDVVQEAHANYPVPTTDITNPTRVLQNSLHSRVNNTQSSSPIISTPARSVLQDMLPATTLTGKSRQRMKWTDQINRELLRCYYVVTHNERNLTAWRPQLRQRFAESFPELSHLSEQRLADQIRVIHRNNRIPAQERDYIKQCVSLLLHASSRHGSTITNNVEQQHNLSATPITNNYEPTTDSPNHTLNSQHTLTPIQETSTTTQIHLPIETSEHSQIHGEETINQQSDTIDYNKTESTFTEMLIKYSGTDPTLRPSIPKLQTTRNTIKTVNIVNKVIDKHLSTKTTPTLEEIHEVIYCAAQTVVIIHTKYINKEENGSDNARNIVYTQKKPQWERRIENKIVMLRKEIGQLIQYLNGNLTNKKQQKINPNNRSRDEIIEQLDSNKQKLQAYSKRLRRYKKSNQRKSHNKLFNTNQKRFYQKLNSEEIQITQNPDKNHIQNYWKNLWSKPVQHNTHSSWTDIERQETENIDQMKETIIDKDDVSQAVRKTLNWTAPGPDKIQNYWIKYFSATHEYIANTFNFLINNPQETPAFLSQGITYLKPKDNDMTNPAKYRPITCLPTMYKLLTSIISHKLNIHITQNKIISEEQKGCCKGSRGCKEQLVIDTEIHNQVKQKHRNLYYAYIDYEKAFDSVPHSWLINILKIYKVDHRLIQFLQNTMKNWTTKLSLRTINTELCTQPIKISRGIFQGDSLSPLWFCLAINPLSRILNKTGYGYVIDREFNIKLTHLLYMDDIKLYAASRQQIDHLLKLTEDFSTDIKMSFGINKCKINSIIRGQQKETDSFELEIQGGKIDSMNPKETYKYLGYQQSTSINHTDIKNTLKAKYKHRLHKILNTQLSARNKVKAVNTYAIPILTYSFGIIKWSDTELGALNTTTRTASYGQNIHHIHSAVQRFTLKRKLGGRGFIDIKNLHYTQIDNLRTYFLTKANESDLHKAIVNMSLSGTPLQLNNSQFDPKLKIFKDEQKIENWKMKALHGKYPHQLDQDHVDRNASCAWLTKGNIFGETEGFLVAIQDQIIKTRNYSKYILKEGIETDKCRLCHQTSETIDHITGGCSVLANKEYTHRHDHVAKHIHQQLALKYKLLETYTPYDQYKPKQVLENSTTNYIGTET

SEQ ID NO: 9702 - protein, 1227 aa, Phocides pigmalion
MPREGRTPGSTLLYNPSDQRSYSNKKHAMRLRNRQIPQVGTREGESRPGPSSSGCPAYSGGGNVSHKTTQSRTVVVEKSPSPITSHPSSPISSSSSTHSLFESPSSSHSYQIEHSSPSSSSTNTISLPGDVVQEARANFLVPTTDTINSARVLHSNIHNRVNHNTPSSLPNIDTPARSVLQDMLPATTLAGKSRQRMKWTEEINRELLRCYYIVTDNETNLTAWRPLLHRRFTESFPELGHISEQRLADQIRVIHKNNRIPIHIRDEIKHSASLLTCTPNSCNMSNNTEYQSTLNTTPITKNHEPNKEPSNQIPSPRHTSTSIQEINTITQTYLYLENNEHTQPPNSETINKSLDSIDYKKIENVFTEMLIKYTETDPTLRPTIPKPKITRNIIKTVNTLNEIINIYLKSKPTISLQEIHEIIYCAAQTVATLHIHHINKVENSLNDKGYTAISKQKIPQWERRIENNIAMLRKEIGQLTQFLKGNLTQKKQHKLNPSGKNRDEIIEQLDNNKQKLQAYSKRLRRYKKSNQRKAHNQLFNTNQKLFYQRLNTEEIQITQIPDKNDIQNYWKNLWSTPVQHDTHSSWTEIENQEMENIEPMLEIKIDKDDVSHAVKKTLNWKAPGPDKIQNYWIKYLPATHEYIAKIFNDLINNPQDTPAFLTQGITYLKLKDNDSKNPAKYRPITCLPTIYKILTSIISYKLNTHIIRNKIIPEEQKGCSKGSKGCKEQLVIDTEIHNQVKQKHRNLHYAYIDYQKAFDSIPHSWLIHILKIYKIDDRIIRFLQNTMKNWATKLSLRTNNTSLCTQPIKISRGIFQGDSLSPLWFCLAINPLSRILNKTGYGYVLDKISNLKITHLLYMDDIKLYAASRQEMDHLLKLTENFSADIKMTFGTNKCKINSIVKGKHKETDSFQLETQGGKIDSMDLKETYKYLGYHQSISINHTQIKDTLTSKYKHRLHKILNTQLSARNKVKAVNTYAIPILTYSFGIIKWSDTDLEALNTITRTACNSHNIHHIHSSVHRFTLKRKSGGRGFIDIKNLHYTQIDNLRTYFLTKANESNIHRAIVNINQSGTPLLLNNIQFNPKHKILDDEQKIELWKNKALHGKYPHQLYQDHIDHSASCAWLTKGNIFGETEGFLVAIQDQIIKTRNYSKYILKEGINTDKCRLCHQTTETIDHITGGCSILANKEYTHRHDNVAKHIHQQLALKYKLLETYTPYYQYKPKRVIE

SEQ ID NO: 9703 - protein, 1310 aa, Udranomia kikkawai
MRLRNRQIPQAGTREGESRPGPSSSGCPTYSGGGNVSHETAQSRTVAVDEPQSHPSTPTSSTHSLFQTPSSSPYSFQSSSRSTTPLSFDAAQEIPAPITDITNPARVTQHSLLSRANHHTNTQTPNIDTPARSVLQDMLPATTLAGKSRQRMKWTDQINRTLLRCYYIVTHNETNLTAWRAQLHQRFVTDTPELSHISEQRLADQIRVIHRNNRISASERESIKQSVASLIPITNISINQNIIPLSNNNQSIIDPPLQASNSSYILNTTEHTNSQTNQTPGNTEHIHTHDLRSTNSQISDIDYNKIESTFTEILIKYSGTDPSLRPAIPKLQTSRKAIKTLNSINEIVHNHLSTKETITLEEIHEVIYCAAQTVTTLHTKNISLLEKHNNRNAIRNLNKKKPQWEQRLENKIIILRKEIGQLTQYLNGNLTQKKQQKLNPTNKNREEIVNQLDTSKQKLQAYTKRLRRYKISNQRKSDNKMFYTNEKLFYQKLNTEQILVTQPPNKDEIHKYWKNIWSKPVQHNTHSSWTEIEEQEMENIQLMPEITIDKDDISQAVRKTLNWKAPGPDKIQNYWLKYITATHVHIAKIFNDLIHNPQNTPHFLTQGITYLKPKDTDTTNPAKYRPITCLPTIYKLLTSIITHKLNSHITLNQIIPEEQKGCCKGSRGCKEQLVIDTEIHNQVAQKHRNLFYSYIDYQKAFDSVPHSWLIHILKIYKVDTNLIQFLQHSMNNWTTKLHLHTNNATIQTHPIKILRGIFQGDSLSPLWFCLALNPLSRILNKTGHGYVIDRDSDTKLTHLLYMDDIKIYAANREQLDHLLALTEEFSANIKMSFGIDKCKINSITKGKHTNTHPFELRTEGEKIDSMEAKQTYKYLGYRQSTTINHTEIKTELKMKYKQRLNKILNTQLSARNKIKAINTYAVPILTYSFGIIKWSDTDLEALNILTRTASNKHNIHHIHSSIHRFTLKRKLGGRGVTDIKNLHYTQIDNLRSYFLTKANQSLLHKAIVHLPTSGTPLQLNNSQFEPKVKIIKDEQKIENWKKKALHGKYPHQLEQDHIDYNASCTWLTKGNIFGETEGFIVAIQDQIIKTRNYSKYILKESLETDKCRLCHQTTETIDHIIGGCSILAQKQYTHRHDNVAKHIHQQLALKYNLIETYTPYYQYTPKKVLENSTTKLYWDRDIITDRTILSNRPDITLTLKTSKITYLIDIAVPNTHNIKQKHAEKVQKYLPLADEIKQMWHQDIVKIIPIIISSTGIIPKTLKTALHLLELHENTYIPLQKSIIIDTCSIVRRFLNPITLSLQNSEEVTT

SEQ ID NO: 9704 - protein, 1207 aa, Paramimus stigma
MTNGALVPTKYAMRLRNRTIPQAGTHKGESRPGLSSPGSPTYSGVGNVSHMTAQSETVAINKTSSYTTLNTSSPVSSTHSLFQSPNSSPHSYESHASLSLPSNTTPLSCDASQEGNAYYFVPINDNTNHERVSQNIINNRANHHNHSSPPNINTPARSVVQDMLPATTLAGKCRQRMKWTDHINRELLRCYYIVTHNETDLTAWRSLLQQKFSALFPELRHLSEQRLADQIRVIHRNNRIPHPEREQIKQSTQVLQVAINSSPDITDSNHIIHQTTLNNNNQSNTELSSQSHTLQRMLNGVQQNDITTQTFTDLEHTETQHHNATKMQSSQVDKDKLNNTFIEMQIMYSGTDPTMRPTIPKLHITRNIIKTVNMINEIIEEQLKEKECVNLHEIHDIIYSAAQTITKIHFNYPNKPEHNKTYTRDLSRKNNKAQWEKRLENKILTLRKEIGQLTQYLKGNLTNKKQIKLNPHNKSKIYLQELLDRNIQKLQAYSKRLRRYKISNQRKADNKLFNINEKQFYQKLNNEQIQVTQLPEKDDIQNYWTNLWSKPIQHNSHTSWNTIEEQERTNIKPMHTIIIDQKDVSEAIRKTLNWKTPGPDKIQNYWIKYLSSTHKHLANAFNHVICNPQETPPFLTHGVTYMKPKNKDTADPANYRPITCLPTIYKLLTCIISHKLNTHITQNQIIAEEQKGCRKGSKGCKEQLIIDAEIHTQVKQRHRNLFYAYIDYQKAFDSIPHSWLIHVLKIYKVNHTLIHFLEYTMKNWNSKINLHTNKTSICTQPIKIARGIFQGDSLSPLWFCLAINPLSKILNKSGYGYVVDREKNVKITHLLYMDDIKLYAANRQQLEHLLRLTENFSTDIKMTFGTNKCKINSIIRGQHNETESFNLNIQGGIIDTMEPKETYKYLGYLQSTSINSSEIKSTLKAKYKSRLHKVLNSQLSARNKIRAINSYAIPILTYSFGVIKWSDTDLEALNTTTRTIANKHNIHHIHSAVQRFTLKRKLGGRGVTDIKNLHYSQIDSLRTYFSSKANGNDLYRAIVNLSQAGTPLYLNNSQFEPKLKIQTDEQKLDKWKMKALHGKFPHQLEQDHVDRNASYSWLTKGNIFGETEGFMVAIQDQIIKTRNYSKYILKETIETDKCRLCHKNTETIDHITGGCSTLANKEYTHRHDNVAKHIHQQLAIKYKLLESYTPYYQYKPKNVLENNYVKL

SEQ ID NO: 9705 - protein, 1325 aa, Haemactis sanguinalis
MRLRSRTIPQAGTHKGESRPGPNPGSPAYSGGGNVSHMTTQSETVVVSKTLSHTTSNTPSPISSTHSLFQSPNSSPCSYRSHDSLSRIATITPSSRDAAQEGNAYSLVPITDNTNNARVLQNVSDNCANHNNHSSPPNINTPVTSVLRDMLPATTLSGKCRQRMKWTGQINRELLRCYYIVTQNETDLTAWRPLLRQTFSESFPELSHLSEQRLSDQIRVIHRNNRIPPLEREKIKQSLQPIQVATNSSKDTVEINSALNHSLLNNKDSRINTEPRNETQSVELISNDLYQNNVAIRQPCTDLEHTETQQRNVMKKQSCPIDREKIRNTFIEMQILYSGTDPVMRPIIPKLQITRNIIKTINLINEIIEEQLKETEIVTLQEIHDIIYSAAQTITNIQCNCFDKVEQNKTHTKVHPRKNDRPQWEKRLEYKIGTLRKEIGQLTQYLKGNLTNKKQKKLNPNNKCKNDIQEQLDSNIQKLQAYSKRLRRYKLSNQRKADNKLFNNYEKQFYQRLNADQIQVTEPPDKDDIQKYWKNIWSKPVQHNSHALWNEIKEQENVNIEPMHTIIIDKNDVAEAIAKTLNWKAPGPDKIQNYWIKYLSSTHKHIAIALNHILHHPQETPAFLTHGITYLKPKDKDTANPANYRPITCLPTIYKLLTSIIARKLNIHITQNQIIPEEQKGCRKGSKGCKEQLIIDTEIHTQVKQKHRNLHYAYIDYQKAFDSIPHSWLIHILKIYKIDHILIHFLEHTMKNWNTKLNLHTNKTSICTKPIKIARGIFQGDSLSPLWFCLAINPLSKILAKTGYGYIVDREKNTKITHLLYMDDIKLYAANRQQLEQLLRLTENFSTDIKMTFGTNKCKINSIIKGQYNKTESFKLNVQGGSIDNMEPKETYKYLGYLQSTSISHSEIKNTLKAKYKYRLHKVLNTQLSAINKVKAINTFAIPVLTYSFGVIKWSDTELDALNTATRSICSKHNIHHIHSAVQRFTLKRKLGGRGVIDIKNLHYSQIDDLRTYFLAKANENDLFKAIVSLSQAGTPLQLNNSHFEPKLKIQTDTQKLDAWKMKVLHGKFPHQLEQDHIDRNASYRWLKKGNIFGETEGFMVAIQDQVIKTRNYSKYILKETIETDKCRLCHKNAETIDHITGGCRTLANKEYTHRHDNVAKHIHQQLAIKYKLLESYTPYYEYKPKNVLENSSAKLYWDRDIITDRTILSNRPDITLILKSTKTTFLIDISVPNTHNLQQKHSEKIQKYIRLADEIKEMWHQEKVRIIPIIISSTGVIPKTLKAALKLLDLHENTYIPIQKSIILDTCSIVRRFLNPTSLTITAD

SEQ ID NO: 9706 - protein, 1334 aa, Atarnes sallei
MTNGALVNTKYAMRLRNRTIPQAGTHMGESRPGPSNPGSPTYSGEGNVSHMTAQSKTVVVNNPSSHITSNASSPTSSTHSLFQSPNSSSQSYDSLSRSATNTPMSCDASQEGNAYSLVPITDNTNTNACVLQNITDNRANQNNHSSPPIINTPARSVLQDMLPATTLAGKCRQRMKWTDQINRELLRCYYIVTQNETNLTAWRPLLRQIFSESFPELNHLSEQRLADQIRVIHKNNRIPPPDREQIKQSVQLSQVVTNSIQDPVNSNNTMHQTTLNNNNSWTNTESHNPSHSSQLMCLQENNTETQQPFTDLEHTEIQDHNAIKRHSSPIDREKVQNTFMEMQILYLGTDPGMRPTIPKPQINRNIIKTINTINDIIEEQLKEKESVTLQEIHDIIYSAAQTITKIHTNYFDKSEQQENHAKGYQSKNNKPQWEKRLVNKICTLRKEIGQLTQYLKGNLTDKKQKKLNPNNKSKNYLQEELDSNVQKLQAYSKRLRRYKLSNQRKADNRLFNNNQKQFYQKLNNEQIQVIQPPDKDDIKNYWKNLWSKPVEHSTHTSWSEIEEQEKINIEPMHTIIIDKSDVSEAIKKTLNWKAPGPDKIHNYWIKYLSSTHKHIATAFNHILQYPQETPAFLTHGITYLKPKDKDTANPANYRPITCLPTIYKLLTSIITHKLNIHITQNQIIPEEQKGCRKGSKGCKEQLIIDTEIHTHVKQKHRNLFYAYIDYQKAFDSIPHSWLIHILKIYKINHTLIHFLEHTMRNWSTKLNLHTNKTSICTQPIKIARGIFQGDSLSPLWFCLAINPLSKILAKTGYGYVVDREKDIKITHLLYMDDIKLFATNRQQLEYLLRLTENFSRDIKMTFGTNKCKINSIIRGRYSKTESFKLNIQGGIIDNMEPKETYKYLGYLQSTAISHSEIKNTLKDKYKYRLHKILRTQLSAINKIKAINTYAIPALTYSFGVIKWSDTELEALNTTTRTMCSKHNIHHIHSAVQRFTLKRKLGGRGVTDIKNLHYSQIDDLRTYFLTKANENDLFKAIVTLSQAGTPLQLNNSQFEPKLKIQTDTQKLDTWKMKALHGKFPHQLEQDHIDRNASYSWLTKGNIFGETEGFMVAIQDQIIKTRNYSKYVLKETIETDKCRLCYKNSETIDHITGGCSILANKEYTHRHDNAAKHIHQQLAIKYKLLESYTPYYEYKPKNVLENSSAKLYWDRDIRTDRTILSNRPDITLILKSTKTTFLIDISVPNTHNLKQKHAEKIQKYIRLADEIKEMWHQEKVRIVPIIISSTGVIPKTLKSALKLLDLYENTYIPMQKSIIIDTCSIVRRFLNPTSLTLSAD

SEQ ID NO: 9707 - protein, 1305 aa, Charidia lucaria
MTNGALVLTKYAMRLRNRTIPQAGTHKGESRPGPSSPGSPTYSGVGNVSHMTAQSETVAINNKPSSHITSNTSSPVSSTHSLFQSPNSSPHSYQSHDSLSHSPTITPLSCDASQEGNTYSSVPINDNTNHVRVLENTIDNRTIHHNHSSPPNINTPARSAVQDMLPATTLAGKCRQRMKWTDHINRELLRCYYVVTHNETDLTAWRSLLQQKFAELFPELKHLSEQRLADQIRVIHRNNRIPHPEREQIKQSTQLLLQVTINSSQDIVDSNHTIHQITLNNQSNIEPSRQLHTVQSMLNSVQQNNIPTQPLTDLEHTETQNHTVIKRQSCQIDREKLHNTFIEMQIMYSGTDPAMRPAIQKLQITRNIIKTVNMMNEIIEEQLKEKESVGLLEIHDIIYSAAQTITKIHSNYPNIPEYNNTHTKDHWRKNNKPQWKKRLENKICTLRKEVGQLTQYLKGNLTNKKQIKLNPHNKSKNYLQELLDSNIQKLQAYSKRLRRYKISNQRKADNKLFNNNQKQFYQKLNNEQIQVTQPPNKDEIQNYWKNLWSKPMKHNSHTSWNKIEEQETTNITPMHTINIDQKDVSEAIRKTLNWKTPGPDKIQNYWIKYLSSTHKHLAKAFNHIIYNPQETPPFLTHGITYLKPKNNDTTDPANYRPITCLPTIYKLLTSIISDKLNIHIMQNQIIAEEQKGCRKGSKGCKEQLIIDTEIHTQVKQRHRNLFYAYIDYQKAFDSIPHSWLIHVLKIYKVNHTLIQFLEYTMKNWNTKINLHTNKTSLCTQPIQVARGIFQGDSLSPLWFCLAMNPLSKILDKTGYGYVVDREKNVKITHLLYMDDIKLYAANRQQLEHLLRLTENFSTDIKMTFGISKCKINSIIKGQYNQTESFNLNIQGGIIDTLGPKETYKYLGYLQSTSISNSEIKNTLKAKYKSRLHKVLNSQLSAINKIRAINSYAIPILTYSFGVIKWSDTDLEALNTATRTIANKHNIHHIHSAVQRFTLKRKLGGRGVIDIKNLHYSQIDSLRTYFLSKANGNDLFKAIVNISQAGTPLQLNNNQFEPKLKIQTDEQKLDNWKMKALHGKFPHQLEQDHIDRNASYSWLTKGNIFGETEGFMVAIQDQIIKTRNYSKYILKETIGTDKCRLCHKNTETIDHITGGCSTLANKEYTHRHDNVAKHIHQQLAIKYKLLETYTPYYQYKPKNILENHSVKLYWDRDIITDRTILSNRPDITLILKSTKITYLIDIAVPNTHNLKQKHTEKIQKYIGLADEIKEMWRQKVVRIIPIIISSTGVVPKTLKTALQQLDLHEN

SEQ ID NO: 9708 - protein, 1221 aa, Favria cribrellum
MRLRSRKLPQAGTRKGESRPGSSGSGCPTYSGEGNASHKTTQPHTVVVEKPHNTSGSISPMSSTHSLFQSPSSSSFSSEYDHSPSLSTNITPLSCDVAGEASAISPLPIPVITNHTRVQQNITDNRVNHNTPIHSPHNNTPVRSVLQEMLPATTLAGKNRQRMKWTDQINRELLRCYYIVTHLETNLTAWRPLLKQKFTNSFPELSHLSEQRLADQVRVIHKNNRIPVSERENIKLSVSLLLSSLNDTNQITDTNNTARLIEMDASLAGNNYKSQSNTDSQPSPHHHQSLSHHSDVNQHNTQLNNTVMQSNEQFINTEHFERQIPIELNRPLGPVDYEKVKNTFTETLIKYSGTDPTLRPIIPKLKITRNVIKTVNATNELVGKHLQTKESITIEEIHEVIYCAAQTITTIHNRNASISEDITTNNNKAKDKKPKWEERLGKKITTLRKEIGQLTQYLKGNLTQKKQRKLKISNRSNEEAIEQLDKSKQKLQAYSKRLSRYKISIQRKSHNKLFNTNQKRFYQTLNEEHINITEPPAKDTIEKYWKNLWSKPVQHNKNSSWMDIEEQEISNIDPMPEITIIKEDVVTAVRKTLNWKAPGPDKIQNYWIKYLSSTHEYISNAFNYLIHNPHETPTFLTQGITYLKPKDNDTTNPEKYRPITCLPTIYKLLTSIISHKLETHVTRNQIILEEQKGCRKGSKGCKEQLIIDTEIHTQVKQKHTNLYYSYIDYKKAFDSIPHSWLIQILKIYKVHDKLIQFLQHTTKNWSTNLHLRTNKITLVTQAIKISRGIFQGDSLSPLWFCLALNPLSRILNNTGYGYIVDRNSDTKISHLLYMDDIKLYAANRQQLDYLLRITESFSTDIKMNFGISKCKINSIIKGQYNKTDSFELYLQDGQIDSMEPKETYKYLGYQQSTSINHTEIKNTLKTKYKQRLHKILNTQLCARNMVKAVNTYAIPILTYSFGVIKWTDTELEALNTLTRTASYKHNIHHIHSAVQRFTLKRKLGGRGFIDIKNLHYTQVDNIRKYFTLKSKENALFKVISNLRQSGTPLQLNNNEFNPNLKINTDEQKIHSWKKKALHGRYPHQLEQDHIDQDASCTWLTKGNLFGETEGFMIAIQDQIIKTRNYAKYILKEPLETDKCRLCHQTTETIDHITGGCNVLANKEYTHRHDNVAKHIHQTLALKYKLLESYTPYYQYQPKKVLENSITKLYWDRDIITDRTIL

SEQ ID NO: 9709 - protein, 1361 aa, Pellicia arina
MRLRSRQLPQAGTRMGESRPESSGSGCPSYSGEGNASHKTTQPCAVVVEQPYTTSGLTSPTSSTHSLFQSLSSSPHSYEFEHSSPRSSNITPVSCDVAKEAHATSPAPITDITNPTRALQNNTEKRVDQYTYNQSPNTHPPERSVLQEMLPATTLAGKCRQRMKWTDQINRELLRCYYLVTHIETNLTAWRPLLKQKFTASFPELIHLSEQRLADQVRVIHKNNILTSSEREAIKLSVSSLLSTLNSPNQIIDTNYIQTINNHESQLNYESHSRRETLAPEHIQCTIQPIQSRQPYIRVHSEHAEPYNPIRIDKPLGSVDYEKIETIFTEMFIKYSGTDPTLRPTIPKLQITRNTIKTVNATNEIIGKHLQMKQPKTLEEIHDVIYCAAQTIIRIHSKCANNEGNTTKTNSKTKQNKPQWENRLENKIMILRKEIGQLTQYLKGNLTQKKQQKLNLNSRSKQEVIEYLDNCKQRLQANSKRLRRYKISNQRKSQNKLFNNNQKFFYQTLNEEHIKITELPEKDNLEKYWKNIWSKPVQHNTHSSWTKTEELKVLNINPMPEIKIHKEDVSAAIRKTLNWKTPGPDKIQNYWIKYLSSTHEYITDIFNHLIHNPQHTPSFLTQGITYLKPKDDDTTNPAKYRPITCLPTIYKLLTSIISYKLNTHITCNQIIPEEQKGCRKGSKGCKEQLVIDTEIHTHVKQKHANLFYAYIDYQKAFDSVPHSWLIQVLKTYKIDNTLVHFLEHIIKSWSTKIHIHANNTSLTTQPIKISRGIFQGDSLSPLWFCLALNPLSNILNNTNYGYVIDKESNTKISHLLYMDDIKLFAANREQLDNLLKLTESFSTDIKMSFGTNKCKINSIIKGQYKQTEAFDLNLQGEKIDSMDPKETYKYLGYQQGTSINHTDIKNTLKTKYRQRLHRILSTQLSARNIVKAVNSYAIPILTYSFGIIKWSDTELEALNTLTRTASYKHNIHHIHSAVQRFTLKRKLGGRGFIDIKNLHYTQVENLRTYFTTKSNESTLLKAILKFHQAGTPLQLQSKEFDPKLKIYKDDQKINLWKTKALHGRYPHQLDQDHVDRNASCSWLTNGNLFGETEGFMIAIQDQIIKTRNYSKYILKETIETDKCRLCNQTTETIDHITGGCSVLANKEYTHRHDNVAKHIHQTLALKYKLLESYTPYYQYKPKNVIENKNVKLYWNRDIITDRTILSNRPDITLNLKSCKTTYLIDIAVPNTHNLKQKHTEKVQKYIPLADEIKQMWHQETVEIIPIIISSTGVVPKILRTALNSLDLHENTYIPLQKSIILDTCSIVRRFLNPTTLTFQQEKQNTHRNSIIHNITSHSHTTLPTLSHTAHNIPYTTNTSVT

SEQ ID NO: 9710 - protein, 1364 aa, Venada nevada
MRLRNRQIPQAGTREGESRPGSSGSGCPTYSGGGNVSHKTTQLSTAVEEQSPLHINSHSSSPISSTHSLFPSPSSSPHSYQFQHSSSRSTTTTPLSCDVAQEAHANSPVPTTDITNPTRVSQSNSYNRVNHNTQTLSLTTNTPARSVLQDMLPATTLAGKSRQRMKWTDQINRELLRCYYVVTSNETNLTAWRPQLHQKFAESFPELSHLPEQRLADQIRVIYRNNRISVPDRENIKQSVHLLLSTLNRVNDCTLTNNTEFALNTPSTTNNSEPATDSPNQVLNSQHTLSPTQEIHTITQTYHSLDNNEHIQMHDSETTNKQLDLIDHRIIENTFDEMLIKYTGTDPTLRPTIPKLQTTRNTIKTVNAVNKIVGLFLKTKNTIDLEKIHEVIYCAAQTIITLHTKYTKQSEKHKKTNSGITIIKENKPQWEMRIEKHIMTLRKEIGQLTQYLNGNLAHKKQQKLNPNNRSRNEIVEQLDNNKQKLQAYSKRLRRYKKSNQRKSHNKLFTTNQKLFYQKLNTEQIQITQTPSKDEIQNYWKNIWSNTILHNTHTPWIEIENEEIEHIEPMPEMLINKDDVSLAIKKTLNWKSPGPDKIQNYWIKYLPATHQYIANIFNHLMNNPQDTPVFLTQGITYLKPKDNDTTNPAKYRPITCLPTIYKLLTSIISYKLNTHITKNQIIPEEQKGCSIGSRGCKEQLIIDTEIHNQVKQKHRNLFYAYIDYQKAFDSIPHSWLIQILKIYKVDIKLVDFLRDTMKNWTTKLSLNTNNTSICTQPIKISRGIFQGDSLSPLWFCLAINPLSRILNKTGYGYAIDRESNIKLSHLLYMDDIKLYAANRQEIDNLLKLTENFSADIKMTFGTNKCKINSIIKGQQNETNSFELETQGGTIDSMEQKETYKYLGYQQSTFINHTHIKNTLKTKYKQRLHKILNTELSARNKVKAVNTYAIPILTYSFGIIKWSDTELEALNTMTRTASSSHNIHHIHSAVQRFTLRRKLGGRGFIDIKNLHYIQIDNLRTYFLSKAKESDLHKAIVHLVQSGTPLQLNNSQFDPKVKIVNEEQKIENWKKKALHGKYPHQLQQDHIDHNASCSWLTKGNIFGETEGFLIAIQDQIVKTRNYSKYILKESIETDKCRLCHQSTETIDHITGGCSVLANKEYTHRHDNVAKHIHQQLALKYKLLETYTPYYQYKPKQVLENSTAKLYWDRDIITDRTILSNRPDITLTLKRYKTTYLIDIAVPNTHNLKQKHTEKIQKYIPLADEIKQMWHQESVRIIPIIISSTGVIPKALKTALKLLDLHENSYIPMQKSVVIDTCSIVRRFLNPTTLTLQNHQDTHSNTATQNTSTHTHITRTRTLSAPNTPINT

SEQ ID NO: 9711 - protein, 1349 aa, Muschampia leuzeae
MRLRSRQLPQAGTREGESCPGSSDLGCPTYSGEGNASHKTTQPHTVVVEKPHNTSGSTSPMSSTHSLFPSPSSSPHSYEFEHSLSLSTNTTSLSCDVAEEAFAKSPLPIPDNTNNMRAIQNITYNRVNRNTNISFLDNNTPVRSVLQEMLPATTLAGKSRQRMKWTDQINRELLRCYYIVTNLETNLTAWRPLLHQKFTNSFPELSHLPEQRLADQVRVIHKNNRIPSSEREEIKVSVSLLLSSSNDLHQISDTNNTTKQIDIDTIPTSNNPKSQPHIDFQPSTHSHQFSSHHSDVNQHITNNTFTQLNQQFMNIEQFETQNPIELDRPIGPVDYEKVQNTFQEMLLKYSGTDPTLRPIIPKLQITRDALKTVNATNELIGKHLQNKESISIAEIHEVIYCAAKTITTIHNRNATKFEDITENKNIAKDNKPKWEKRLENKIMTLRKEIGQLTQYLKGNLTHKKQRKLNTYNRSKEEVIEQLDKCKQKLQAHSKRLRRYKISMQRKTHNRLFNTNQKRFYQTLNEEHINITEPPAKDKIEKYWKNLWSKPVQHNIHSSWMDIEEQEISKIDPMPEVTIVKEDVSTAVRKTLNWKAPGPDKIQNYWIKHLTSTHEYISNAFNHLIHNPHETPSFLTEGITYLKPKDNDTTNPEKYRPITCLPTIYKLLTSIISQKLDTHITRNQIILDEQKGCRKGSKGCKEQLIIDTEIHNQVKQKHTNLFYSYIDYQKAFDSVPHSWLIQILKIYKVNDKLVQFLQHTTKNWTTKLHLHTNKTSLVTQAIKISRGIFQGDSLSPLWFCLALNPLSRILNNTGYGYIVDRNNNTKITHLLYMDDIKLYAANRQQLEYLLRLTESFSADIKMSFGINKCKINSITKGQHNKTDSFDLSLQGGKIDSMDPKEIYKYLGYQQSTSINHTEIKNALKIRYKQRLHKILNTQLSARNIVKAVNTFAIPILTYSFGVIKWSNTELDALNTLTRTASYKHNIHHIHSAVQRFTLKRKLGGRGFIDIKNLHYTQVDNLRTYFTRKSKENTLFEAISKLHQSGTPLQLNNDEFNPKLKILTDEQKLYSWKKKALHGRYPHQLEQDHIEQNASCTWLTKGNLFGETEGFMIAIQDQIVKTRNYAKYILKEPLDTDKCRLCHQTTETIDHITGGCSVLANKEYTHRHDNVAKHIHQTLALKYKLLESYTPYYQYQPQKVLENNTAKLYWDRDIITDRTILSNRPDITLTLKNTKTTYLIDVAVPNTHNLKQKHTEKVQKYIPLADEIKQMWHQETVKIIPIIISSTGLIPKTLKIALKLLDLRENTYIPLQKSIIIDTCSIVRRFLNPTTLTLQLENSHSHAGNHHTANT

SEQ ID NO: 9712 - protein, 1260 aa, Gindanes brontinus
MRLRSRVLPQAGTCEGESRPRPSSPGCPAYSGEGNVSHMTAQSCIVAVNNTNKNTKTPSRNNLSSSSPISSIHSFFQSPLSSPHSVEDQNISSRSNTTTPLSYDVIHEASSSVSISDNTLNTRDTLQKNIDDRVNQHTSSLTSNINTPARSVLQDMLPATTLAGKSRQRMKWTDQINKELLRCYYIVTYNETNLTTWRPLLHKKFTEMIPELSHLSEQRLADQIRVIHKNNRINALERDDIKKSVSISLTTQNNPNPINNPDNTTNHLTPPTIHAAGTHSNSQHISPIALETNTSPQSYEHLINSENSETESLRTVNSSTKTPDYKNIENTFTEMLIKYSGTDPTLRPIIPRLQITRNSVKTVQMMNEIIKRYLETKKNITIEELQEHIYCAAHTIIIHTTNKPSNNISEKTDIISKPSKPKWEKRLENKIATLRVVIGQLTQYLKGNLSFKKQQKLNPNNKSNNDILDELDNSKQKLQAYSKRLRRYKISSHRKSHNKLFNINQKRFYQTLNSEQIQIKEAPDKEDIENYWKNLWSRPEHHNTRISWNKIVEQDAEIIHSMPEIIINKEDVTEAIKKTLNWKAPGPDKIQNYWIKYLSSTHEHIANAFNHLIHNPHDTPYYLTQGITYLKPKEKETTNPANYRPITCLPTTYKLLTSIISHKLSTHITQNKIISEEQKGSSRGSKGCKEQLIIDTAIHNQVKQKHRNLYYAYIDYQKAFDSVPHSWLTHILKVYKVDNKLINFLEHTMKNWNTKVNLRTMNTSLSTNPIKIKRGIFQGDSLSPLWFCLALNPLSKILNQTGYGYVIDRNTNTKISHMLYMDDIKLYASNRQQLDHLLRLTEEFSTDIKMTLGTNKCRINSIIKGQHKDTYQFDLNIQGGKINNMGPRETYKYLGYHQSISISHTEIKNTLQARYKQRLNKVLNTQLCARNKIKAINTYAMPILTYSFGVIKWSDTELEALNTVTRTVSNKHNIHHIHSSVQRFTLKRKLGGRGLIDIKNLHYTQIDNLRAYFLLKAQENELIKAVVNLTQTGTPLQLNNSQFDPKQKICKDEQKLDNWKMKALHGKYPHQLDQNHIDRDASLSWLTKGNIFAETEGFIVAIQDQIIKTRNYSKFILKKTLESDKCRLCHQYTETIDHITGGCGILANKEYTHRHDNVAKHIHQQLALKHKLLESYTPYYQYKPKKVIENNSVKLYWDRDIVTDRTILSNRPDITLTLKLVKTTYLIDIAVPNTHNLQQKHSEKIQKYIPLADEIKQMWH

SEQ ID NO: 9713 - protein, 1358 aa, Heliopetes ericetorum
MRLRNRQIPQVGTREGESRPGPSGSGSPAYSGGGNALHMTTQSSTVVVPISTSHMTSESTSPISSTHSLFPSPSSSPYSCQLHQSSSRSSTISPTSCDVAQEAHATTLAPTTDITHLTRAEQYKQSQRVNYNTHTSLTNINTPTRSVLQDMLPATTLAGKSRQRMKWTDDINKELLRCYYIVTHNETNLTAWRPLLHQKFCGNLPELSHLSEQRLADQIRVIHRNNRISALEREQIKQSISTITPTTTCTNEHNLVNMEDQHTTHNTTTSSTNQLNTRLSNYTRQNNVTHNRSNNINAPSAECIITECSQTNNTVELIDYKKIENTFNEMLIKYQGTDPTLRPTIPKLHICHSAIKIVNTTNEIIGKFLDSRDSLTLVEIHEILYCAAQTVTTLHNPPRNNLASNTNCINKNKTHKQTKLKPKWEIRIENNIARLRKEIGQLTQYLNGNLSPKKQQEINPSNINRDGMIEILDKHKQKLQAYSKRLRRYKISNQRKTDNRLFKVNQKHFYQKLNSEQIQVVEPPNKEDVQNFWTKLWSTSVQHKTHIPWTQIEEEEIEDIDTMTEIIISKEDVSQAIKKTLNWKAPGPDNIQNYWIKYMSTTHKHLANTFNYLLNNPHETPSFLTQGITYLKPKDSDTTNPEKYRPITCLPTIYKLLTSIFTQKLNTHITQNHIIPEEQKGCSKGSRGCKEQLIIDTEIHNQVRHKHHNLFFSYIDYQKAFDSVPHSWLIQILKIYKVSNSLIYFLEQIMKNWTTKINLRTNHTTISTAPIKIKRGIFQGDSLSPLWFCLAINPLSKILIRSGCGYVIDKNNNTILSHLLYMDDLKIYAANRQQIDHLLKLTENFSTDIKMTFGTNKCKISSIIKGQYQETHPYCLNIPGGSIDSMAPSETYKYLGYLQSTSINHTDIKNTLKTKYKQRLHKILNTQLSGKNTIKAINTYAVPILTYSFGIIKWSETELEALNTATRTASYKHNIHHIHSATQRFTLKRKLGGRGCIDIKNLHYNQIENLRTYFLTTAETSIIHKAIVNLPKSGTPLQLNNSQYNPKNKIVSDEQKLQNWKMKALHGKYPHQIEQEHVDRNASFSWLTKGNIFGETEGFIVAIQDQIIKTRNYSKYILKEQIETDKCRLCHQTTETIDHITGGCSILANKEYTHRHDNVAKYIHQQLALKQKLLKTSTPYYQYKPANVLENSSAKLYWDRDVVTDRTILSNRPDITLTLKSSKTTFLIDIAVPNTHNLKQKHTEKIQKYLPLAEEIKQMWHQECVRIVPIIISSTGIVPKSLKNSLQSLDLHENTHIPLQRSIILDTCSIVRRFLNPLTLMLQNEHHTTHTSQNTLHTVTNIANLDTQNHPHSFNTIT

SEQ ID NO: 9714 - protein, 1211 aa, Mylon lassia
MRLRSGYRLPQAGTGANRTGESGPESSNSGSPTYSGGDTASQTSAQSQTVAVTKSPSSNTSTHPSSPISSTQSLFQSPASSPQSYENNNSLSHSSSSSMSDNVAQEAINAFFLEPITDITNPTRASQYNLNIRVHNTNSSSSPFSNTPARSVLQDMLPATTLAGKSRQRMKWTDQINTELLRCYYVVTRNETDLTGWRPLLHKKFAESFPELSHLSEQRLADQIRIIHKNNRIPASEREVLKRSIALLLTPRNSLLQDIDTNITHVDNRTSSNNILNDQTLINHTMTTIQEYPTSQPYNDTEHIPTQVAEITDRPQEPVRYDRIENIFTEMLIKYTDTDPTLRPTIPKLQVSRNVIKTISDINKILKTRLQNKETSIEEIHTNIYCAAQTITVIHKINIEFGNKTNNKSNTITRKPQWEQRILNKITTLRKEIGQLTQYKDGNLTQKKQWKLNPNSKSMDEIIDQLDKNKQKLQAYSKRLRRYKLSNKRKSDNKLFSTNQKLFYQKLHTENIHNTNPPNIEDVESFWKDIWSKPVHHNTLTSLTEDEEIANIDPMPAIIIDKDDVSQAIRKTLNWKAPGPDKIQNYWIKYFTATHEPLANAFNYLIQHPQDTPSFLTQGITYLKPKDNDTTNPAKYRPITCLPTTYKLLTSIISFKLNTHITRNHIIPEEQKGCSKGSRGCKEQLVIDTEIHHHVRIKQRNLFYSYIDYQKAFDSVPHSWLLYVLKLYKVDNILIEFLQRTMKNWTTKLNLRTQHTSHCTQPIKILRGIFQGDSLSPLWFCLSLNPLSKILNKSGYGYVIDSDNNTKITHLLYMDDIKLYAANREQLECLLQLTEKYSTDIKMSFGINKCKVNSIIKGRHNETNFFNLNLQGGTIEPMELKETYKYLGYQQNTSLNHTEIKNCLKTKYKQRLNKILSTQLSARNKIRAINTYAVPVLTYSFGIIKWSDTELEGLNMATRKASNKHNIHHIHSAVQRFTLKRKLGGRGCIDIKNLHYTQIDNLRTYFQTKANTSALHKAIVNLPQSGTPLRLHSNIFDPRLKITKDDQKIENWKAKALHGKYPHQLDQDHVDREASCTWLTKGNIFGETEGFLLAIQDQIIKTRNYAKYILKEAIQSDKCRLCHQTTETIDHITGGCSILATKEYTHRHDNVAKHIHQQLALKYNLIQQYTPYYQYKPKNVIENSTAKLYWDRDIITDRTVLSNRPDITLTL

SEQ ID NO: 9715 - protein, 1379 aa, Myrinia binoculus
MRLRNRVIPQAGTHQGESGPGPSRTGSPTYSGGGNASHMATQSHTVVADKTPPNITSHSSSPISSIHSLFQTPSSSPQSYELQHYTSRSTSNSPLSCDVAQEVQASSPVPITDITNPTRASQNNTNIRVNNNSHSLSPNTNTAARSVLQEMLPATTLAGKSRQRMKWTDQINKELLRCYYIVTQNETNLTAWRPLLHQRFSERIPELSHLSEQRLADQIRVIHRNNRIPASERNEIKHTVSQILSNSNSTNQIIISNNTIHQSTNNSNNQQSYIHSPNQTLNSPQTTTQILPTTPPINITTHAHQSYEYIENIQTQSLAAINKPSYPTKYDIIENTFNEMLIKYTGTDPTLRPTIPKLQTTRCFIKTVNTTNEIIGKYLQTKDITTLEEIHEVIYCAAQTIATIHYPRYINNLNDTNSNGAKQKKPQWEKRLENKIILLRKEIGQLTQYLRGNLTQKKQQKLNPNNKNTDEITEQLDIKKQKLQAHSKRLHRYKISNQRKSHNKLFNNNQKLFYQKLNEEHIQIIQPPEKDDVQNYWTNLWSKPVTHNTHSSWIEIEEQEMAKIDSMTEMTIDKEDIYQAIRKTLNWKAPGPDKIQNYWIKYLSATHEHIAKIFNRLLHNPKETPSFLTQGVTYLKPKDNDTTNPAKYRPITCLPTIYKLLTSIISHKLNTHIIKNQIISEEQKGCRRGTKGCKEQLIIDTELHNQIRQQHRNLFYSYIDYQKAFDSVPHSWLLHVLKIYKVDNTLIQFLEHTIKNWSTKLNIHTSKTTICTNPIKISRGIFQGDSLSPLWFCLALNPLSNILNKSGYGYVVDRVNNIKITHLLYMDDIKLYAANRQQLDHLLRLTENFSSDIKMTFGINKCKINCITKGYYKETDPFDLKIFEDKIDSMEPKETYKYLGYHQSTFINHTDIKTTLKTKYKQRLHKILNTQLSARNKTKAVNTYAVPILTYSFGVIKWSDTELDALNTATRTACRRHNIHHIHSAVQRFTLKRKLGGRGFIDIKNLHYNQIYSLRTYFLLKSNENSLIKAIVNLPQSGTPLHLSNSQFDPKSKILNDDQKMDIWKKKALHGKYPHQLEQDHIDRNASCSWLTKGNIFGETEGFMVAIQDQIINTRNYTKYILKQTIETDKCRLCHQTTETMDHITGGCSTLANKEYTHRHNNVAKHIHQQLALKHKLLESYTPYYQYKPKNVIENSIAKLYWDRDIITDRTILSNRPDITLTLKSSRTTYLIDISVPNTHNLKQKHTEKIQKYIPLADEIKQMWHQETVRIIPIIISSTGIIPKTLKNALKLLDLHENTYVPMQKSIILDTCSIVRRFLNPTSLTLQQSEHDIFHNAMTQSSSTHDITTNTHKNTHNTTNTHITSHTIHADTHELGYLA

SEQ ID NO: 9716 - protein, 1232 aa, Sarmientola browni
MLPATTLAGKRRQRMKWTDQINRELLRCYYIVTQNEANLTAWRPLLHRRFAETIPELNHISEQRLADQIRVIHRNNRIPASEREQMKQSVSLQIASLNNSNNNIDTRDIEIDQSNINPTPTKNIHQTIIDTQNQTLQHSLTLTQQSNTTTHALHQPLENSEHIQTQDFEITNRPLDSIEYEKIENSFKEMLIKYAGINPTLRPTIPKLQITRNAIKTINTINEIITQYLQTKDTITIEEIHEVIYCAAQTVTKIHTKSTEKLENSNNNNNNHTIVRQKKPQWEKRIENKITLLRKEIGQLTQYLNGNLTQKKQQKLNPNNINRDEILDKLDNSKQKLQAYSKRLRRYRKSNERKSHNKLFNTNQKHFYQKLCTQQIQITQPPDKEHIEDYWKNMWSKPVQHNIHTSWTEIEKQEMEKIEPMPEITINKDDVSQAIKKTLNWKAPGPDKIQNYWIKYLTATHEYIANTLNRLLCNPIETPSFLTEGITYLKPKDNDTTNPANYRPITCLPTIYKLLTSIISYKLNAHITQNQIIPEEQKGCRKGSRGCKEQLVLDIEIHTQVKQKHRNLYYSYIDYQKAFDSVPHSWLIEILKIYKVDNKLIQFLQHTMNNWTTKLSLRTNNASLCTHKIKISRGIFQGDSLSPIWFCLAINPLSRILNKTDCGYVIDRNTNTKITHLLYMDDIKLYAASKQQLDHLLRLTEKFSTDIKMTFGANKCKINSIIKGKQNYTDRFELETQEGTIDSMEPKETYKYLGYQQSTSINHTDIKNALKTKYKQRLNKILNSQLSAKNKVKAVNTFAIPILTYSFGVIRWSDTELEALNTATRTASYKHNIHHIHSAVQRFTLKRRLGGRGFIDIKNLHYTQIDNLRTYFLTKAKESALHKAIVHLSPSGTPLQLNNSEFDPKNKIIKDDQKIENWKKKALHGKYPHQLEQDHIDWNASCSWLTSGNIFGETEGFLIAIQDQIIKTRNYAKYILKESIDTDKCRLCHQATETIDHITGGCGVLANKEYTHRHDNVAKHIHQQLALKHKLLESYTPYYQYKPKNVIENNTAKLYWDRDIITDRTILSNRPDITLTLKQSKTTYLIDIAVPNTHNLKQKHIEKIQKYIPLADEIKQMWHQETVKIVPIIISSTGVIPKILKSSLKLLDLHEKTYIPMQKSIVIDTCSIVRRFLNSTTLSLQNSQDTNANTITHNPCIHNISSNTQRHTHSTPNTLIIPQSTNADAHETGYLA

SEQ ID NO: 9717 - protein, 1393 aa, Celaenorrhinus opalinus
MRLRSGNTLPQAGTTCGESRPEPTGSGCPAYSGEGTVSLQSAQFSTVADNHENTIQTQNTPSHQLSPISSTHSLFQSPSSSPHSFQFASSSRSTSTSPLSRVVVREAYANYPVPITDNITSANTCEITSSSIYADRNTPTHNIDINTPARSVLQEMLPATTRAGKSRQRMKWTDDINRELLRCYYIVTNCEENLTGYRPLLHQKFIERFPELSHLTEQRLADQIRVIHRNNRISALERENIKQSIPVITNTERSNTPTNHLETTLTNSDQFIYNQDNDTQRTYTPEQTNNSLHIQAATQQTSMTSTSIGSQLTAQDHQTQEPEIITIPEQLINYKKIEDTFAEMLIKYTDTDPTLRPTIQKLQISRKTINTVNTINEIIKKHLQTKEVVTIVEIHDAIYCAAVTVTTIHSKQDKKTNHNIIDTTVNKNTENTQRVPQWRRRLDSKITLLRKKIGQLTQYLNGNLNQKNSRKINPHNKSRDEIIDELDNDKQKLQAYSKRLRRYKVSNQRKSDNSLFNTNQKLFYRNLNKDHTEITEPPNITDVQQYWEKLWSKPLQHNPHSSWATIEEQEVANIELMPEIAINKDDVTQAIKNTLNWKAPGPDKIQNYWLKYFTSTHQYIANSFDHLLANPQNIPQYLTQGITYMKPKDNDTTNPTKYRPITCLPTLYKLLTSIISHKLNSHLTLNKIIPEEQKGCSKGSKGCKEQLVIDTEIHNHVRRKHRNLFYSYIDYQKAYDSVPHSWLLHVLKMYKIDNKLIQFLQHTMTNWSTKLNIRTNNTTLSTPTIKISRGIFQGDSLSPLWFCLALNPLSRILNKTGYGYKIDQENNIKLTHLLYMDDIKLYAANRQELEHLIRLTEEFSKDIRMKFGTDKCKVNSIMKGQHKTTDSYNLELQDGTIDSMQPKETYKYLGYQQSSSINHTEIKNTLKTKYKQRLNKVLNTQLSARNKTKAINTYAIPILTYSFGIIKWSDTELEALNTTTRRACNKHNIHHIHSAVQRFTLKRKLGGRGFIDIKNLHYTQIENLRTYFHTKANESNLHKAIVNLPHSGTPLQLNNNQFDPKHKITKDEQKLENWKKKALHGKFPYQLEQEHVDRIASCAWLTNGNLFGETEGFLIAIQDQTIKTRNYAKYILKETIETDKCRLCHQTTETTDHITGGCSTLANKEYTHRHDNVAKHIHQLLALKHKLLETYTPYYKYKPKNVIENSKVKLYWDRDIRTDRTILSNRPDITLTIKATKTTYLIDIAVPNTHNLKSKHTEKIQKYIALADEVKQMWHQETVKIIPIIISSTGVIPKALKTALSILDLPEKTYIPLQKSIVIDTCSIVRRFLNPTSLPLHNVHEATHTNITSQNHLVHTSSSITQSTTNTQLDIHTPHTLTHTHAQTNTTESGYLA

SEQ ID NO: 9718 - protein, 661 aa, Adoxophyes honmai
MPEITITKEDVTQATKKTLNWKAPGPDKVQNYWLKYFTSTHEYIAKALNHLIHNPQDIPPFLTQGITYLKPKDNDTTNPAKYRPITCLPTTYKLLTSIITHKITTHITENKIISEEQKGCSKGSRGCKEQLVIDTEIHNQAKQNHRNLYYAYIDYQKAFDSVPHSWLIHILKIYKIDPILIEFLQCTMTKWTTRLNIQTDGPRLTTTLIKIARGIFQGDSLSPLWFCLALNPLSRILNKTDYGYTIDRQNNTKLTHLLYMDDIKLYAPNRQNIEQLLKHTEEFSTDIKMIFGTDKCKINCMIKGHHRQTEPHQLELQGGIIDRMEEKDTYKYLGYLQSTSINHTDLKNTLKFKFKQRLNKILKTQLSARNKTKAINTYAIPILTYSFGILKWSDTELDALNTATRTACYRHNIHHIHSAVQRFTLSRDQGGRGFIDIKKLHYTQVDSLRSYFLTKANNSTLHHAIANLPKSGTPLQLSNRQFHPKHKICTDEQKIEQWKSKALHGKYPHQLAQQHVDQKASCTWLTKGNIFGETEGFLVAIQDQTIKTRNYTKYILKQTIETDKCRLCHQTTETIDHITGGCSFLALKEYTHRHNNVAKHIHQQLALKHHLLTESTPYYKYKPKNVLENRTAKLYWDRDIITDRTILSNRPDITLTLKSTN

SEQ ID NO: 9719 - protein, 1421 aa, Adoxophyes honmai
MRLRNGRKLPQAGTGANHNGESRPEHVSSGSPTYSGGDAVSRNSAQSRTAADHHDSEAVVTHTHSLNTSPTSSTQSLFQSPSSSPHFYSRTNSFASSSTTTSPMSIDVAQEALANTPEPTTGITNTRIPLLNTANYCVNTTHTQSTHTNTPARSVLQEMRPATTLAGKSRQRMKWTDHINRELLRCYYIVTHCETDLTAYRSLLHQKFTQDFPELRHIPEQRLSDQIRVIHRNNRIPAHERERIKQLILQNSSSLTDPNLDLETNDPQINNPTPITNTTNNNNNTPIPTHTCEQTEHMQEAITQSTISTEAAEHYISPETQEHQPNTTTTPIHQDTLTYQHIEETFKAMLLKYADTDPTLRPSIPKLQTTRKLIHLVSTVNGIIDQYLKNIQTITLEEVHTFIYCAAVTVTTILIKQEKAKAPHHTQQHTRNRNHPHHTPPTNNLQQQNNTNNITRNCNNIEIQNNLPHNLARRNNSTPNTDHNTIQKKQKKQEWEIRLENQITALRKEIGLITQYLHGNFSQRKQIKLNLHDKSRDQVIDQLDNKKQKLQAYSKRLRRYKISNQRKNDNSLFNTNQKLFYRNLNSEHIAITQSPDITTVQNYWENIWSIPTQHNTHATWAAMEEEEVRDINVMPEITITKEDVTQATKKTLNWKAPGPDKIQNYWLKYFTSTHEYIAKALNHLIHNPQDIPPFLTQGITYLKPKDNDTTNPAKYRPITCLPTTYKLLTSIITHKITSHITENKIISEEQKGCSKGSRGCKEQLVIDTEIHNQAKQNHRNLYYAYIDYQKAFDSVPHSWLIHILKIYKIDPILIEFLQSTMAKWTTRLNIQTDKSKLTTTLIKIARGIFQGDSLSPLWFCLALNPLSRILNKTDYGYTIDRQNNTKLTHLLYMDDIKLYAPNRQNIEQLLKHTEEFSTDIKMIFGTEKCKINCMVKGHHRQTEPHPLEQQGGIIDRMEAKDTYKYLGYLQSTSINHTDLKNTLKSKFKQRLNKILKTQLSARNKTKAINTYAIPILTYSFGILKWSDTELDALNTATRTACYRHNIHHIHSAVQRFTLSRDQGGRGFIDIKKLHYTQVDSLRSYFLTKANNSALHYAIANLPKSGTPLQLSNRQFDPKLKICTDEQKIEQWKSKALHGKYPHQLSQQHVDQKASCTWLTKGNIFGETEGFLVAIQDQTIKTRNYTKYILKQAIETDKCRLCHQTTETIDHITGGCSFLALKEYTHRHNNVAKHIHQQLALKHHLLTDSTPYYQYKPKNVLENRIAKLYWDRDIITDRTILSNRPDITLTVKSTNTTFLIDIAVPNTHNLKQKHTEKIQKYIPLADEIKQMWHQETVKIVPIIISATGVVPKSLTAALKTIDLHENTYIPLQKSIVLDTCSIVRRFLNPTSLPIYENPEIIHTNTSTQHDNHTNTNTQHGNT

SEQ ID NO: 9720 - protein, 1376 aa, Pyrgus malvae
MQLRNRRLPQAGTREGESRPGPSGSGSPSYSGEGNSSHMTAQSRAVAANNTNHSPSHIHPHSSASNSSSPISSTQSLFPSPSSSPHSYQLQPSSRSTTTSPQSCNVAQEAYANRPMPIDDYTDPTRESENSPENRVNHNTHSLYFNPNTPARSALQDMLPATTLAGKSRQRMKWTDEINKELLRCYYIITQKETNLSAWRPQLHQNFTKTFPELSHLSEQRLSDQIRVIHRNNRISPDERERLKQSIPDTITSHLTSEHNNISTNNEQETTINNHTPRVNDDHPDINTIHDTPISRHAANTTQHSHTTLHYIDTEHIQTKDADDINKKSDKIDYEKIENIFTEMLIKYSGTDPIHRPTIPKIQITRNVIKTVNTTNEIVDKYLHTEDTTNLEQIHEIIYCAAQTIATLHNTHFNKSNNHINNTSSNNSNKLVEVRKPRWEKRLENKISSFRKDIGQHTQYLNGNLSLKKQQKLNPKNLGKDKIIEQLDYYKQKLQAYSKRLRRYKKSNERKSHNKLFNTNQKLFYQKLTSEPIHINQPPDKEELHNYWKNLWSNSVQHNIHKPWTEIEEEEIEKIDPMLEIEINKDDVSQATKKTLNWKAPGPDKIQNYWIKYLSSTHEYIAKSFSHLIHHPQDTPSFLTQGITYLKPKGNDTSNPANYRPITCLPTIYKLLTSIITHKLETHITRNQIISEEQKGCTKGSKGCKEQLIIDTEIHNQVKKKHRNLFFSYIDYQKAFDSIPHTWLIHILKIYKVDNRLIHFLQHTMSNWSTKLHLRILNATLTTQPIKILRGIFQGDSLSPLWFCLAINPLSKILNKTGYGYLIDRDRNIKLTHLLYMDDIKIYATNRTQLDQLLTLTENFSSDIKMSLGTDKCKVNSIIKGQYEETHPFLLHKQEGTIDRMGAIETYKYLGYQQSTCFNHTEIKNTLKSNYKQRLHKIFKTQLSARNIVKAVNTYAIPILTYSFGVIKWSDTELDALNTLTRTIGNKYNFHHIHSALQRFTLKRKLGGRGFIDIKNLHYSQIDNLRNYFLTKANVSPLHKAIVNIPQSGTPLHLNNNEFDPKLKILKDDKKIETWKTKALHGKYPHQLDQEHIDHAASCTWLTKGNIFGETEGFLIAIQDQIIKTRNYAKYILKESINTDRCRLCQQSIETIDHITGGCSILANKDYTHRHNNVAKHIHQQLALKYKLLETYTPYYQYKPKNVLENSVAKLYWDRDIITDRTILSNRPDITLTLKSSKITYLIDVAVPNTHNLKQKHTKKIQKYIPLADEIKQMWHQEVVRIIPIIISSTGVIPKTLKTALKLLDLPENTFVPLQKSIIIDTCSIVRRFLNPTSLTIQEDKNHSTNIITQNTQNNTTDTQTSSQTHFETQESGYLA

SEQ ID NO: 9721 - protein, 824 aa, Urbanus sp.
MSEILINKDDVSQAIRKTLNWKAPGPDKIQNYWIKYLPATHTYIANTFNYLISNPQDTPTFLTHGITYLKPKDSDTANPSKYRPITCLPTIYKLLTSIISYKLNTHITQNHIIPEEQKGCSKGSRGCKEQLIIDTEIHNQVKHKHRNLYYAYIDYQKAFDSIPHSWLIQILKTYKVDIRLIEFLQNTMKNWTTKLSLRTSNTTINTYPIKIARGIFQGDSLSPLWFCLAINPLSKILNKTDYGYTIDRESNIRITHLLYMDDIKLYAANRQQLDHLLKLTENFSKDIKMSFGTNKCRINSIIKGQQKETHTFELETQGGTIDSMDPKETYKYLGYQQSTCINHTEIKHILKTKYKQRLHKILNTQLSARNKVKAVNTYAIPILTYSFGIIKWSDTELEALNTITRTASNKHNIHHIHSAIQRFTLKRKLGGRGFIDIKNLHYTQIDNLRTYFITKAHESNLHKAIVHISQSGTSLQLNNSQFDPKFKIVKDDQKIENWKRKALHGKYPHQLEQDHIDGLASCSWLTKGNIFAETEGFLIAIQDQIIKTRNYSKYILKETIDTDKCRLCHQTTETIDHITGGCSILANKEYTHRHDNVAKHIHQQLAIKHNLLESYTPYYQYKPKNVLENKNAKLYWDRDIITDRTILSNRPDITLTLKSSKTTFLIDISVPNTHNLKQKHAEKIQKYIPLADEIKQMWHQEHVRIIPIIISSTGLIPKTLKTSLKILDLHENTYIPMQKSIVIDTCSIVRRFLNPTSLTLQPYQDTHSNVLTQDSFSYAHNTQAHNTTNTQTHNTPNTQTHNTPNTLIITNPNHTNSHEPGYLA

SEQ ID NO: 9722 - protein, 1326 aa, Pyrgus malvae
MTAQSRAVAANNLSSHISSTPPSPISSTYSLFQSPSSSPQSYEFSTRSSASRSATITPTSTEVVQEAYGNSSVPFNDIPDPARALVYNPNNRANHFTDSLPHDPNTPVRRALQEMLPATTLAGKSRQRMKWTDLVNKELLRCYYVVTHKETNLTAWRPLLHKKFTECVPELSHLSEQRLSDQIRVIHRNNRIPLAERERIKQSINLITTTECNENTTNDHENTIGITYRRNSDILPKNTPDSQETQAATQPQIITAQTHISLNNSKHIQTLEPETINTAIEPINYEKIEEKFHELLIKYTGTDATLRPTIPKPHFSRNLIKTTNTMNEILGKYLDIKDKVTLEHIHEVIYCAAQTITSFHTKFATKSENAMNNVIINKTMKQKPRWELRIQNKINTLRKEIGQLTQYLRENLTQKKKQKLNPNNKSRNEIMEILDTSKQKLQAYSKRLRRYKKSNTRKSQNKLFSNNQKRFYQTLSKEPTQTIQPPDKNDIHNYWKKIWANPVQHNTHVPWSEIEEDETANVEPMLQLKIDKDDVSQAIRKTLNWKAPGPDKIQNYWIKYLSATHKHIAESFNHLIHNPKETPHFLTQGVTYLKPKDNDTANPAKYRPITCLPTIYKLLTSIISHKLNTHITKNQIIPEEQKGCSKGSRGCKEQVIIDSEIHNHVKQKHRNLFYSYIDYQKAFDSVPHSWLIHVLKMYKVDFRLILFLEETMKNWTTKLNIRINNTTHCSQAIKIQRGIFQGDSLSPLWFCLAINPLSSILNKTGYGYMINKENNTKITHLLYMDDIKIYASDRTHLDHLLKATEKFSTDIKMTFGTDKCKINSIIKGHYSETQPFELTLQEGKIDSMDSIETYKYLGYQQSTNINHTEIKNTLKSKYKHRLHKIFNTQLSARNMVKAVNTYAVPILTYSFGIIKWSDIELEALNTITRTVSSKHNFHHIHSATQRFTLKRKLGGRGFIDIKNLHYTQIDNLRNYFMSKANVSPIHNAIVNLTHTRSPLQLSNSQFDAKQKILNDEQKIENWKNKALHGKYPHQLEQDHIDHRASCTWLTKGNIFGETEGFLIAIQDQIIKTRNYAKYILKEVIETDKCRLCNTTTETIDHITGGCSVLANKEYTHRHDNVAKHIHQQLALKHKSLQSYTPYYQYKPKNVLENHLAKLYWDRDVITDRTVLSNRPDITLILKYSKTTYLIDISVPNTHNLKQKHNEKIQKYIPLADEIKQMWHQEVVRIVPIIISATGAVPKSLKNALKLLDLNEYTFVPLQKSIIIDTCSIVRRFLNPSSLTLQDEQNTNREIAQNRRHTLNTSNIQTTTRSNLLTNTQELGYLA

SEQ ID NO: 9723 - protein, 1202 aa, Ypsolopha scabrella
MRLRSRNILPQAGTSNGESRPEPTSSGSPTYSGEGNVSLHPAQSSTVAGQENNTPSPDMLSYASSPISSTHSLFQSPSSSPYDFQLTSTSRSTTISPMSCGVVQEALAICPAPITGIMNPTRTSETNSHSNRVDTNTERHTTDTNTPARSVLQDMLPATTLAGKSRQRMRCTNQINHELLRCYYMVTNCEENLTAYRPLLHQKFTETFPELSHLTEQRLADQIRVIYRNNRIPASEREIIKQAVLQTITTLDNPNTNNFETQVNTNNNDVIYNQFQNSHTLEQTDNTQHTIASTPQPIIMTLSDNEITTESASVAFQETYEHTQSQGPEIDITSEESINYQKIEDTFTEILIKYTGTDPTQRPIISKIQTTRKVIKTIKTVNEIINKHLQNKEDVTIVEIHEIIYCAALTVTTYTNSTNKGKKKEHDKTNTNINQTNKKKTPQWQKRLENKIAILRKEIGRLTQYLNGNLTQKKQQKLNPNNKSRDEIVNELDNYKQKLQAYSKRLRRYKISNQRKSDNNLFNTNQKLFYRNLNSDQIEITEPPNIDEVKHYWENLWSNPLQHNSNSSWAKIEEQEVDNIDPMPEININIDDVTYAIKNTLNWKAPGPDKIQNYWLKYLTSTHKYIASTLNHLLHNPQDIPPFLTQGITYLKPKDNDTTNPAKYRPITCLPTIYKLLTSIISHKINSHLTSNKIIPEEQKGCSKGSRGCKEQLVIDTEIHNQVKKKHRNLYYSYIDYQKAFDSVPYSWLLHVLKMYKIDNRLIQLLEYAMTNWKTKLNIRTNNTTLSTPSIKIARGIFQGDSLSPLWFCLALNPLSRILNKTGYGYNIDTGNDIKLTHLLYMDDIKLFAANRQQINHLIRLTEEFSRDIKMTFGTDKCKINSMIKGQHKETDPYILEQQTGTIDSMEPKETYKYLGYQQSTSIDHTEIKNSLKTKYKQRLSKILKTQLSARNKTKAINTYAIPILTYSFGIVKWSDTELEALNTTTRTTCNKHNIHHIHSAIQRFTLKRKLGGRGFIDIKNLHYTQIINLRSYFHTKANESAIHKAVVNLPQPGTPLQLNNSQFEPKHKITTDEQKLENWKKKALHGRFPHQLDQEHIDRTASCTWLTKNNIFGETEGFLIAIQDQIIKTRNYSKYILKETIETDKCRLCNLASETIDHITGGCSTLANKEYTHRHDNVAKHIHQQLALKYKLLQSYTPYYQ

SEQ ID NO: 9724 - protein, 986 aa, Tagiades gana
MRPYIPKQKSCTKLAKIVKYINTDILPKFISLEQDFLDTQTLVYCAAYTTAICNGSKIKNKDCRENREEKQKKRIPAWQMRIQKKIDMLRSNIGRLTQFIRGIRSPKLIMHVESIKHKYKIHTQHEEPNITDEQFLDTLKQKLNAAASRLKRYTNCTQRKAQNKLFINNEKQFYRVINFSSQNIQTPNHTPAPSVKDMHQFWSNIWANPINHNHTAKWIQADSYELHEVANMNFDHVPIEIFLKVLKKTHNWKAPGSDNIHNYWYKKLTCIHPLIHNHINDFINTPKNMPTYITQGTTFMIPKDNDLTNPAKYRPITCLQTIYKIITACIAELIYQHVTENNILSEEQKGCRKNSQGCKEQLIIDSVAMHQVYKSKQDVSTMYVDYRKAFDSVPHSWLTHILHRYKISPVLALFLEESMRHWETKLKIMGNMDIESSPIPIRRGIFQGDALSPLWFCLAMNPLSRMLNRSEQGLSLSGHNNHISLTHLLYMDDIKLFSNTPESLHQLADITQTFSNDIRMEFGIDKCKTFTVKNGSIIDNNYMLKSGQCVESLGEDSSYKYLGFQQAHLIDQKLTKTQFKKKFKHRLNILLRSQLNSRNLVKAINSYVISTLTYSFGIITWSQSDLLSIQRLINTSMTAHRKHHPRSCVQRLTLSRKDGGRGIIDIVNLHNTQISNLRKYFHERSNASSIHNIIVHLDKRFTPLNLFDHNKQRNEQVTDVKDKITTWEQKSLHGRHPQDLKQPHVDKAASNIWLQRGELFPETDAFMLAIQDQVIETRNHQKYITRKSNQISDICRHCHSGSETIQHIIGACKSIAQTDYRHRHDQVAAIIHQNLAHQHKFVVEKIPYYKYKPPAVLENSNFKIYWDRTIITDKTIHFNRPDITVLDKIDKTVLLIDIAICNTHNMYATHTNKITKYTDLAIEIKKQWEVKSVKTIPIIISSTGVIPNTLHTSLDILKMHPSTLTLLQKAVILNTCRLVRKFLGTQ

SEQ ID NO: 9725 - protein, 1407 aa, Tagiades gana
MKMVLTRSRLPQAGTSNGESRSELPSSGCPTYSGGGNISQSVQISSAADQENSPDFITLNPSSPISSTQSLFQSPNSSPHSFEISSNSRSSTVTPLLVDVELKAKAINLAPTTGTTRRTRMSWSEDMNRLIWRTYLIATNMQQKKKGYIDKVHREFSEKYSEIKISKQRIGTQIRAITKNSVLPTDIMIKIRNEVAKTFKVEETQQNTLNKPSCSTPSNSTQCNETQSPAISDKNANTNVQNTLTNMKPLTTKAGKLRQRLNWTDDVNRDLLKCYYVVTNNERNLTGYRPSLLLKFLEIHPELNFLSQQRLSDQLRSIINNNRIPVEERDLLKSETEINTCTSQKINNLNINTYIQSDTSNFCAPNLNENECNVNNTTENLNITHKNRSNVYEKISLDEDKIRKQFSDLWTKYKHTDPTTRPYLPKQKSSKKLAKIVQLINSNILPTYISIDQNFEDTQTMVYCAAYTASLFNGTQIKDKDYVDNRAVKHLKSIPAWQKRLHNRIEILRRNIGRLTQFIRGTRTQKLTTHVELIRHNYRIHSKHEEPNVTDEQILDTLKQKLNATANRLKRYLNCTQRKTQNKLFINNEKQFYRNLTSDSQNFQISRPIQAPLVDVMHQFWSNIWANPIDHNHSAEWLRADSEELSQVSNMEFDHVPVEIFFKVLKKAHNWKAPGSDNIHNYWYKKLTSIHPLIHNHINNFISSPESMPIYITQGTTFMVPKDNDHQDPAKYRPITCLQTIYKIITACIGELIYQHITDNNILAEEQKGCRKNSQGCKEQLIIDSVAMHQAYKFKQDISTMYVDYRKAFDSVPHSWLIYILQHYKINSILISFLEKSMRHWKTKLKIMGSMNTVTPFIPIRRGIFQGDALSPLWFCLALNPLSYLLNRSHQGLPLSSQNNHILLSHLMYMDDIKLFSSTSQSLHRLADITQTFSRDIHMEFGIDKCKTFSVIKGSILDNNYSLDSGSHVESLGENDYYKYLGFQQSRLIDQKLTKIDLKKKFKHRLNILLRSQLTSRNLIKGINTYAIPTLTYSFGIITWSQSDLLSLQRMINTSMTLHRKHHPRSCVQRLTLPRKEGGRGIIDVINLHNTQINNLRQYFHLRSEESSLHKVIVDMDKRFTPLNLLNRKQQRNEQITNVKNKIAAWEQKSLHGRHLHDLKQPHVDKDASNIWLQRGELFPETEAFMLAIQDQIIETRNHQKYITRKSNQTSDICRHCHSNSETIQHITSACKSLAQTDYKHRHDQVATIIHQNLAYQHNFVTEKIPYYKYKPSAVLENSNFKIYWDRTIITDKTVHCNRPDITVLDKINKTVLLIDIAVCNTHNINLTYTDKVTKYTDLSIEIKKQWQVNSVKTIPIIISSTGVIPISIHKSLKILNMNPSTLNLLQKAVILNTCRIVRKFLSLESH

SEQ ID NO: 9726 - protein, 1445 aa, Tuta absoluta
MRLRNRLIPQVGPHQQVGESHPVPSGSGSPIVYEGGNMSHSAQSQAVADQENVPSDKPTTSLPSSPISSTLSLFPSPSSSPNPFEYHHQSRSSTVTPSLSVDVELEAEALELVPTTSSSKKRHTKKSWSEDMYKFIWRTYLLATNMQQKKKGYLDKVHKQFNEKFPELQITKQRIGEQVRAITRNNLLPVKTLEEIRTEVLLTLQTQKYEHTSTIPSRTTHAHNNESTNITSNTQGSSHNSSISNDDIILNDIRPLTTKAGKIRQRLHWTETVNKDLLRCYYIATNNESNCTGYRPTVHAHFLETHPDLHFLSQQRLSDQIRSIINNNLVSVEERNLIKADLVKQHLTTTNSSQSSYHSRHRNLATTQTHSQNLTASTPDLTQPHSLNENTVVFENEPSDLLTSSSQTGTESQNHIHSTHTHPSHRSSRTKTIILDKEKIFQKFENLLNIYQNTNPTKRPYIPKQNSSKRLAEIVRVLDTEILPKYIDREQDFSTTQTLVYCAAYTAAECNGTKVKNIVTTEIRYTHKTPAWQIRLENKINLLRRNIGRMTQYNQGNRSLKLITHVQQIKHKYRIHSIHEEPNLTDEQFLDTLKQKLNAANSRLKRYINCTKRKQQNAVFANNEKQFYRNLAAGTQNTQNPNSDLPPPSSDNMHRYWSNIWANSVQHNEEAEWLKKDSETTGSISEMTFEHIPIEVFIKVLKKTHNWKAPGSDHIHNFWYKKFTTIQPLIHNSINEFIQDPNQMPSYITEGITIMIPKDSDRQNPAKYRPITCLQTIYKILTACIAELIYEHVTTNKVLAEEQKGCRRHSKGCKEQLIIDSVAMRQALKRKQDISTMYVDYRKAFDSVPHSWLIHVLQHYKINSTIITFLKESMSQWKTKLKIIDCTNFETPEIPIKRGIFQGDALSPLWFCLALNPLSQMLNNSCHGLSIANQNNTNNYFLTHLMYMDDIKLYSNTTQSLHILADITERFSKDIQMEFGIDKCKTFTIKNGTITDNNYTLESGSSIESLDENSLYKYLGFQQSRQIKQNQTKLDLKKKFKHRLNILLRSQLNSRNLIKSINTFAIPILTYSFGIITWSQTDLLKLQRLINTSLTASRKHHPKSCVQRLTLARKEGGRGVIDIVNLHNNQIKSLRKYFHSRSQDTMLHQNISLADKKITPLNLNDLNEQRNERTTEVKDKIAAWEMKSLHGRHRHDLEQPHVDKAASNLWLQRGELFPETEGFMLAIQDQIIDTRNYKRYILKSPNLPTDNCRHCHSSSETIQHITGACKSIAQTDYKHRHDQVAAIIHQNLAFQYKFVTEKLPYYKYQPAAILENSNYKIYWDRTIITDKTIHCNRPDITILDKINKIVFFIDIAICNTHNLLSTHTEKIAKYTDLSIEIKKQWQVSSVRTIPIILSSTGVIPKNLNTSLQSLNMHKSTIALLQKAVILNTCRIVRKFLSLDSQ

SEQ ID NO: 9727 - protein, 1012 aa, Homarus americanus
MHKGTYNQTLEPARRVAYSTQEMLLVAEEEVKLLQSGRGVSKINQVLIGSLPEGTIRLERLRAMRKTQKYRNIVRSGLQETEDPGSSPRSTNGAGGGTRALIQDQLPEGVNDPDPSDPDDSGSDPERDIAPELGARVKLWEHLRALSEEEEEGDALVVSLNSVLRAIPSPDGLTEHHVEMALNGLEAALRAHKPRLFSGRTPRQGVNRVSPSYRHLPRRVRKRMEYAQTQRAYKRSPKEIANKIINDVEFGGERPSVDEFVAEFRPRFAAESPPDYEHVEVRTNDRMLTILDPIAGKEVVGALRGPETAVGPENPELDTGALRRLGPRVLLRIFNTWLYLARVPQWTKNSRMSMLPKKSPLGTPSNWRPITIGSHILRAYCKILAFRMVESANTSIIQKAFRSVDGCGENLAFVEGLIRHARREKRNIYITFVDVAKAFDTVSHTSLDRALRRLDTPNHLLDVVKDLYSHVGTSICVPGGESDPIPMTRGVKQGCPLSPFLFCAVVDEYLESLGPVVGYRLDDVTSVAVTGFADDLVIVSESRLGMQRSLNQLDRFLGARGLAAQPTKCATLGLERAARGRYGVKLRVVTEECFTMLNSTTGLAEYLPRIEPDEYVRYLGLQVGPSGLERPGSRVDGEKQKLQNIMEKIGGSSLKPLQKIKILKSQIIPRLQYRYVKGSCSMNLLRALDRTLRDRTRQWLHLPRTLNTAAIGLPMRDGGVASDDPAVRFIASGGLWGREVGAMARHFRVGHVDNNTLSQLKRSLLRKKREEWSTSWHGKGAENFFGSRASNTILRNDLGPGRKAIDLLRLRSQTINCRVSRAIGRVPNEDLGRLTCRQCGEGQEDILHLLQRCPAAQNHRVTRHDRILLKLKQWLQGEGFHVLLEPRVQSGHTFVKPDLILQKNGQYSVLDVCVPFESDINTLRLAEQHKIDKYRAHEVDIRRFIANNSSLPPVAAVNFLGVAFGARGGIRPATIKLLSRLGIRRAGIEILVTMAIEGSINILRSLRLQADG

SEQ ID NO: 9728 - protein, 1110 aa, Homarus americanus
MEYKGAGSFDKIRCGICDAPFRSAKAYANHTRSSHRATLQIRCGKCQVPLSDPKVCAVHFKSCSLEEQQVCAGPQHHTCGECGRTFPTPVGLTQHTRHMHKGTYNQTLEPARRVAYSTQEMLLVAEEEVKLLQSGRGVSKINQVLIGSLPEGTIRLERLRAMRKTQKYRNIVRSGLQETEDPGSSPRSTNGAGGGTRALIQDQLPEGVNDPDPSDPDDSGSDPERDIAPELGARVKLWEHLRALSEEEEEGDALVVSLNSVLRAIPSPDGLTEHHVEMALNGLEAALRAHKPRLFSGRTPRQGVNRVSPSYRHLPRRVRKRMEYAQTQRAYKRSPKEIANKIINDVEFEGERPSVDEFVAEFRPRFAAESPPDYEHVEVRTNDRMLTILDPIAGKEVVGALRGPETAVGPENPELDTGALRRLGPRVLLRIFNTWLYLARVPQWTKNSRTSMLPKKSPLGTPSNWRPITIGSHILRAYCKILAFRMVESANTSISQKAFRSVDGCGENLALVEGLIRHARREKRNIYITFVDVAKAFDTVSHTSLDRALRRLDTPNHLLDVVKDLYSHVGTSICVPGGESDPIPMTRGVKQGCPLSPFLFCAVVDEYLESLGPVVGYRLDDVTSVAVTGFADDLVIVSESRLGMQRSLNQLDRFLGARGLAAQPTKCATLGLERAARGRYGVKLRVVTEECFTMLNSTTGLAEYLPRIEPDEYVRYLGLQVGPSGLERPGSRVDGEKQKLQNIMEKIGGSSLKPLQKIKILKSQIIPRLQYRYVKGSCSMNLLRALDRTLRDRTRQWLHLPRTLNTAAIGLPMRDGGVASDDPAVRFIASGGLWGREVGAMARHFRVGHVDNNTLSQLKRSLLRKKREEWSTSWHGKGAENFFGSRASNTILRNDLGPGRKAIDLLRLRSQTINCRVSRAIGRVPNEDLGRLTCRQCGEGQEDILHLLQRCPAAQNHRVTRHDRILLKLKQWLQGEGFHVLLEPRVQSGHTFVKPDLILQKNGQYSVLDVCVPFESDINTLRLAEQHKIDKYRAHEVDIRRFIANNSSLPPVAAVNFLGVAFGARGGIRPATIKLLSRLGIRRAGIEILVTMAIEGSINILRSLRLQADG

SEQ ID NO: 9729 - protein, 1259 aa, Homarus americanus
MFNATTEPCPPSVEPSASKTGESRAFSLAVRQKRVKSKVRSVDAGAPRVPPPSRERQCSGEATPQSKVAPSGGVSLAEDGIPGEPPGPLSPRTATAAGKSAAEDTITTDRPSISGPGATPKTTNIIVTMEYKGAGSFDKIRCGICDAPFRSARAYANHTRSSHRATLQIRCGKCQVPLSDPKVCAVHFKSCSLEEQQVCAGPQHHTCGECGRTFPTPVGLTQHTRHMHKGTYNQTLEPARRVAYSTQEMLLVAEEEVKLLQSGRGVSKINQVLIGSLPEGTIRLERLRAMRKTQKYRNIVRSGLQETEDPGSSPRSTNGAGGGTRALIQDQLPEGVNDPDPSDPDDSGSDPERDIAPELGARVKLWEHLRALSEEEEEGDALVVSLNSVLRAIPSPDGLTEHHVEMALNGLEAALRAHKPRLFSGRTPRQGVNRVSPSYRHLPRRVRKRMEYAQTQRAYKRSPKEIANKIINDVEFEGERPSVDEFVAEFRPRFAAESPPDYEHVEVCTNDRMLTILDPIAGKEVVGALRGPETAVGPENPELDTGALRRLGPRVLLRIFNTWLYLARVPQWTKNSRTSMLPKKSPLGTPSNWRPITIGSHILRAYCKILAFRMVESADTSISQKAFRSVDGCGENLALVEGLIRHARREKRNIYITFVDVAKAFDTVSHTSLDRALRRLDTPNHLLDVVKDLYSHVGTSICVPGGESDPIPMTRGVKQGCPLSPFLFCAVVDEYLESLGPVVGYRLDDVTSVAVTGFADDLVIVSESRLGMQRSLNQLDRFLGARGLAAQPTKCATLGLERAARGRYGVKLRVVTEECFTMLNSTTGLAEYLPRIEPDEYVRYLGLQVGPSGLERPGSRVDGEKQKLQNIMEKIGGSSLKPLQKIKILKSQIIPRLQYRYVKGSCSMNLLRALDRTLRDRTRQWLHLPRTLNTAAIGLPMRDGGVGVPSLLETVAQQKMGLLRRLEASDDPAVRFIASGGLWGREVGAMARHFRVGHVDNNTLSQLKRSLLRKKREEWSTSWHGKGAENFFGSRASNTILRNDLGPGRKAIDLLRLRSQTINCRVSRAIGRVPNEDLGRLTCRQCGEGQEDILHLLQRCPAAQNHRVTRHDRILLKLKQWLQGEGFHVLLEPRVQSGHTFVKPDLILQKNGQYSVLDVCVPFESDINTLRLAEQHKIDKYRAHEVDIRRFIANNSSLPPVAAVNFLGVAFGARGGIRPATIKLLSRLGIRRAGIEILVTMAIEGSINILRSLRLQADG

SEQ ID NO: 9730 - protein, 1060 aa, Homarus americanus
MRGSPTPHMWRVWKDIPNSGGTYPTHSSYAQGDLQLNPRACQAGCLLHTGNAPSGGGGETPPVRKGGFQNQPSVDWKPPGGDNPAGTLEAMGKTQKYRNIVRSGLQETEDPGSSPRSTNGAGGGTRALIQDELPEGVNDPDPSHPDDSGSDPERDIAPELGARVKLWEHLRAISEEEEEGDALVVSLNSVLRAIPSPDGLTEHHVEMALNGLEAALRAHKPRLFSGRTPRQGVNRVSPSYSHLPRRVRKRMEYAQTQRAYKRSPKKIANKIINDVEFEGERPSVDEFVAEFRPRFAAESPPDDEHVEVRTNDRMLTILDPIAGKEVVGALRGPETAVGPENPELDTGSLRRLGPRVLLRILNTWLYLARVPQWTKNSRTSMLPKKSPLGTPSNWRPITIGSHIVRAYCKILAFRMVESANTSISQKAFRSVDGCGENLALVEGLIRHARREKRNIYITFVDVAKAFDTVSHTSLDRALRRLDTPNHLLDVVKDLYSHVGTSICVPGGESDPIPMTRGVKQGCPLSPFLFCAVVDEYLESLGPAVGYRLDDVTSVAVTGFADDLVIVSESRLGMQRSLNQLDRFLGARGLAAQPTKCATLGLERAARGRYGVKLRVVTEECFTMLNSTTGLAEYLPRIEPDEYVRYLGLQVGPSGLERPGSRVDGEKQKLQNIMEKIGGSSLKPLQKIKILKSQIIPRLQYRYVKGSCSMNLLRALDGTLRDRTRQWLHLPRTLNTAAIGLPMRDGGVGVPSLLETISHQKMGLLRRLEASDDPAVRFIASGGLWGREVGAMARHFRVGHIDNNTLSQLKRSLLRKKREEWSTSWHGKGAENFFGSRASNAILRNDLGPGRKAIDLLRLRSQTIDCRVSRAIGRVPNEDLGRMTCRQCGEGQEDILHLLQRCPAAQNHRVTRHDRILLKLKQWLQGEGFHVLLEPRVQSGHTFVKPDLILQKNGQCSVLDVCVPFESDINTLRLAEQHKIDKYRAHEVDIRRFIANNSSLPPVAAVNFLGVAFGARGGIRPATIKLLSRLGIRRAGIEILVTMAIEGSINILRSLRLQADG

SEQ ID NO: 9731 - protein, 1259 aa, Homarus americanus
MFNATTEPCPPSVEPSASKTGESRAFSLAVRQKRVKSKVRSVDAGAPRVPPPSRERQCSGEATPQSKVAPSGGVSLAEDGIPGEPPGPLSPRTATAAGKSAAEDTITTDRPSISGPGATPKTTNIIVTMEYKGAGSFDKIRCGICDAPFRSARAYANHTRSSHRATLQIRCGKCQVPLSDPKVCAVHFKSCSLEEQQVCAGPQHHTCGECGRTFPTPVGLTQHTRHMHKGTYNQTLEPARRVAYSTQEMLLVAEEEVKLLQSGRGVSKINQVLIGSLPEGTIRLERLRAMRKTQKYRNIVRSGLQETEDPGSSPRSTNGAGGGTRALIQDQLPEGVNDPDPSDPDDSGSDPERDIAPELGARVKLWEHLRALSEEEEEGDALVVSLNSVLRAIPSPDGLTEHHVEMALNGLEAALRAHKPRLFSGRTPRQGVNRVSPSYRHLPRRVRKRMEYAQTQRAYKRSPKEIANKIINDVEFEGERPSVDEFVAEFRPRFAAESPPDYEHVEVRTNDRMLTILDPIAGKEVVGALRGPETAVGPENPELATGALRRLGPRVLLRIFNTWLYLARVPQWTKNSRTSMLPKKSPLGTPSNWRPITIGSHILRAYCKILAFRMVESANTSISQKAFRSVDGCGENLALVEGLIRHARREKRNIYITFVDVAKAFDTVSHTSLDRALRRLDTPNHLLDVVKDLYSHVGTSICVPGGESDPIPMTRGVKQGCPLSPFLFCAVVDEYLESLGPVVGYRLDDVRSVAVTGFADDLVIVSESRLRMQRSLNQLDRFLGARGLAAQPTKCATLGLERAARGRYGVKLRVVTEECFTMLNSTTGLAEYLPRIEPDEYVRYLGLQVGPSGLERPGSRVDGEKQKLQNIMEKIGGSSLKPLQKIKILKSQIIPRLQYRYVKGSCSMNLLRALDRTLRDRTRQWLHLPRTLNTAAIGLPMRDGGVGVPSLLETVAQQKMGLLRRLEASDDPAVRFIASGGLWGREVGAMARHFRVGHVDNNTLSQLKRSLLRKKREEWSTSWHGKGAENFFGSRASNTILRNDLGPGRKAIDLLRLRSQTINCRVSRAIGRVPNEDLGRLTCRQCGEGQEDILHLLQRCPAAQNHRVTRHDRILLKLKQWLQGEGFHVLLEPRVQSGHTFVKPDLILQKNGQYSVLDVCVPFESDINTLRLAEQHKIDKYRAHEVDIRRFIANNSSLPPVAAVNFLGVAFGARGGIRPATIKLLSRLGIRRAGIEILVTMAIEGSINILRSLRLQADG

SEQ ID NO: 9732 - protein, 1033 aa, Homarus americanus
MHKGTYNQTLEPARRVAYSTQEMLLVAEEEVKLLQSGRGVSKINQVLIGSLPEGTIRLERLRAMRKTQKYRNIVRSGLQETEDPGSSPRSTNGAGGGTRALIQDELPEGVNDPDPSDPDDSGSDPERDIAPELGARVKLWEHLRALSEEEEEGDALVVSLNSVLRAIPSPDGLTEHHVETALNGLEAALRAHKPRLFSGRTPRQGVNRVLPSYRHLPRRVRKRMEYAQTQRAYKRSPKEIANKIINDVEFEGERPSVDEFVAEFRPRFAAESPPDDEHVEVRTNDRMLTILDPIAGKEVVGALRGPETAVGPENPELDTGALRRLGPRVLLRIFNTWLYLARVPQWTKNSRTSMLPKKSPLGTPSNWRPITIGSHILRAYCKILAFRMVESANTSISQKAFRSVDGCGENLALVEGLIRHARREKRNIYITFVDVAKAIDTVSHTSLDRALRRLDTPNHLLDVVKDLYSHVGTSICVPGGESDPIPMTRGVKQGCPLSPFLFCAVVDEYLESLGPVVGYRLDDVTSVAVTGFADDLVIVSESRLGMQRSLNQLDRFLGARGLAAQPTKCATLGLERAARGRYGVKLRVVTEECFTMLNSTTGLAEYLPRIEPDEYVRYLGLQVGPSGLERPGSRVDGEKQKLLNILEKIGGSSLKPLQKIKILKSQIIPRLQYRYVKGSCSMNLLRALDRTLRDRTRQWLHLPRTLNTAAIGLPMRDGGVGVPSLLETVAQQKMGLLRRLEASDDPAVRFIASGGLWGREVGAMARHFRVGHVDNNTLSQLKRSLLRKKREEWSTSWHGKGAENFFGSRGSNAILRNDLGPGRKAIDLLRLRSQTINCRVSRAIGRVPNEDLGRLTCHQCGEGQEDILHLLQRCPAAQNHRVTRHDRILLKLKQWLQGEGFHVLLEPRVQSGHTFVKPDLILQKNGQYSVLDVCVPFESDINTLRLAEQHKIDKYRAHEVDIRRFIDNNSSLPPVAAVNFLGVAFGARGGIRPATIRLLSQLGIRRAGIEILVTMAIEGSINILRSLRLQADG

SEQ ID NO: 9733 - protein, 1259 aa, Homarus americanus
MFNATIEPCPPSVEPSASQTGESRAFSLTVRQKRVQKKVRSVVAGAPCVPPPSRERHCSGEETSQSKVAPSGGVSLAEDGIPSEPPGPLSPRIATAADKSAAEDTLTTDRPSISGPGATPKMTNLIVTMEYKGAGSFDKIRCGICGASLRSAKAYVNHSRSSHRATLEIRCGKCQVPLSDPKVCAVHFKSCSLEEQQVCAGPQHHTCGECGRTFPTPVGLTQHTRHMHKGTYNQTLEPARRVAYSTQEMLLVAEEEVKLLQSGRGGSKINQVLIGSLPEGTIRLERLRAMRKTQKYRNIVRSGLQETEDPGSSPRSTNGAGGGTRALIPDELPEGVNDPDPSDPDDSGSDPERDIAPELGARVKLWEHLRALSEEEEEGDALVVSLNSVLRAIPSPDGLTEHHVETALNGLEAALRAHKPRLFSGRTPRQGVNRVSPSYRHLPRRVRKRMEYAQTQRAYKRSPKEIANKIINDVEFEGERPSVDEFVAEFRPRFAAESPPDDEHVEVRTNDRMLTILDPIAGKEVVGALRGPETAVGPENPELDTGALRRLGPRVLLRIFNTWLYLARVPQWTKNSRTSMLPKKSPLGTPSNWRPITIGSHILRAYCKILAFRMVESANTSISQKAFRSVDGCGENLALVEGLIRHARREKRNIYITFVDVAKAFDTVSHTSLDRALRRLDTPNHLLDVVKDLYSHVGTSICVPGGESDPIPMTRGVKQGCPLSPFLFCAVVDEYLESLGPVVGYRLDDVTSVAVTGFADDLVIVSESRLGMQRSLNQLDRFLGARGLAAQPTKCATLGLERAARGRYGVKLRVVTEECFTMLNSTTGLAEYLPRIEPDEYVRYLGLQVGPSGLERPGSRVDGEKQKLLNILEKIGGSSLKPLQKIKILKSQIIPRLQYRYVKGSCSMNLLRALDRTLRDRTRQWLHLPRTLNTAAIGLPMRDGGVGVPSLLETVAQQKMGLLRRLEASDDPAVRFIASGGLWGREVGAMARHFRVGHVDNNTLSQLKRSLLRKKREEWSTSWHGKGAENFFGSRASNAILRNDLGPGRKAIDLLRLRSQTINCRVSRAIGRVPNEDLGRLTCRQCGEGQEDILHLLQRCPAAQNHRVTRHDRILLRLKQWLQGEGFHVLLEPRVQSGHTFVKPDLILQKNGQYSVLDVCVPFESDINTLRLAEQHKIDKYRAHEVDIRRFIDNNSSLPPVAAVNFLGVAFGARGGIRPATIRLLSRLGIRRAGIEILVTMAIEGSINILRSLRLQADG

SEQ ID NO: 9734 - protein, 970 aa, Homarus americanus
MRKTQKYRNIVRSGLQETEDPGSSPRSTNGAGGGTRALIQDELPEGVNDPDPSDPDDSGSDPERDIAPELGARVKLWEHLRALSEEEEEGDALVVSLNSVLRAIPSPDGLTKHHVETALNGLEAALRAHKPRLFSGRTPRQGVNRVSPSYRHLPRRVRKRMEYAQTQRAYKRSPKEIANKIINDVEFEGERPSVDEFVAEFRPRFAAESPPDDEHVEVRTNDRMLTILDPIAGKEVVGALRGPETAVGPENPELDTGALRRLGPRVLLRIFNTWLYLARVPQWTKNSRTSMLPKKSPLGTPSNWRPITIGSHILRAYCKILAFRMVESANTSISQKAFRSVDGCGENLALVEGLIRHARREKRNIYITFVDVAKAFDTVSHTSLDRALRRLDTPNHLLDVVKDLYSHVGTSICVPGGESDPIPMTRGVKQGCPLSPFLFCAVVDEYLESLGPVVGYRLDDVTSVAVTGFADDLVIVSESRLGMQRSLNQLDRFLGARGLAAQPTKCATLGLERAARGRYGVKLRVVTEECFTMLNSTTGLAEYLPRIEPDEYVRYLGLQVGPSGLERPGSRVDGEKQKLLNILEKIGGSSLKPLQKIKILKSQIIPRLQYRYVKGSCSMNLLRALDRTLRDRTRQWLHLPRTLNTAAIGLPMRDGGVGVPSLLETVAQQKMGLLRRLEASDDPAVRFIASGGLWGREVGAMARHFRVGHVDNNTLSQLKRSLLRKKREEWSTSWHGKGAENFFGSRASNAILRNDLGPGRKAIDLLRLRSQTINCRVSRAIGRVPNEDLGRLTCRQCGEGQEDILHLLQRCPAAQNHRVTRHDRILLRLKQWLQGEGFHVLLEPRVQSGHTFVKPDLILQKNGQYSVLDVCVPFESDINTLRLAEQHKIDKYRAHEVDIRRFIDNNSSLPPVAAVNFLGVAFGARGGIRPATIRLLSRLGIRRAGIEILVTMAIEGSINILRSLRLQADG

SEQ ID NO: 9735 - protein, 1033 aa, Homarus americanus
MHKGTYNQTLEPARRVAYSTQEMLLVAEEEVKLLQSGRGVSKINQVLIGSLPEGTIRLERWRAMRKTQKYRNIVRSGLQETEDPGSSPRSTNGAGGGTRALIQDELPEGVNDPDPSDPDDSGSDPERDIAPELGARVKLWEHLRALSEEEEEGDALVVSLNSVLRAIPSPDGLTEHHVETALNGLEAALRAHKPRLFSGRTPRQGVNRVLPSYRHLPRRVRKRMEYAQTQRAYKRSPKEIANKIINDVEFEGERPSVDEFVAEFRPRFAAESPPDDEHVEVRTNDRMLTILDPIAGKEVVGALRGPETAVGPENPELDTGALRRLGPRVLLRIFNTWLYLARVPQWTKNSRTSMLPKKSPLGTPSNWRPITIGSHILRAYCKILAFRMVESANTSISQKAFRSVDGCGENLALVEGLIRHARREKRNIYITFVDVAKAFDTVSHTSLDRALRRLDTPNHLLDVVKDLYSHVGTSICVPGGESDPIPMTRGVKQGCPLSPFLFCAVVDEYLESLGPVVGYRLDDVTSVAVTGFADDLVIVSESRLGMQRSLNQLDRFLGARGLAAQPTKCATLGLERAARGRYGVKLRVVTEECFTMLNSTTGLAEYLPRIEPDEYVRYLGLQVGPSGLERPGSRVDGEKQKLLNILEKIGGSSLKPLQKIKILKSQIIPRLQYRYVKGSCSMNLLRALDRTLRDRTRQWLHLPRTLNTAAIGLPMRDGGVGVPSLLETVAQQKMGLLRRLEASDDPAVRFIASGGLWGREVGAMARHFRVGHVDNNTLSQLKRSLLRKKREEWSTSWHGKGAENFFGSRGSNAILRNDLGPGRKAIDLLRLRSQTINCRVSRAIGRVPNEDLGRLTCHQCGEGQEDILHLLQRCPAAQNHRVTRHDRILLKLKQWLQGEGFHVLLEPRVQSGHTFVKPDLILQKNGQYSVLDVCVPFESDINTLRLAEQHKIDKYRAHEVDIRRFIDNNSSLPPVAAVNFLGVAFGARGGIRPATIRLLSQLGIRRAGIEILVTMAIEGSINILRSLRLQADG

SEQ ID NO: 9736 - protein, 1060 aa, Homarus americanus
MRGSPTPHMWRVWKDIPNSGGTYPTHSSYAQGDLQLNPRACQAGCLLHTGNAPSGGGGETPPVRKGGFQNQPSVDWKPPGGDNPAGTLEAMGKTQKYRNIVRSGLQETEDPGSSPRSTNGAGGGTRALIQDELPEGVNDPDPSHPDDSGSDPERDIAPELGARVKLWEHLRAISEEEEEGDALVVSLNSVLRAIPSPDGLTEHHVEMALNGLEAALRAHKPRLFSGRTPRQGVNRVSPSYSHLPRRVRKRMEYAQTQRAYKRSPKKIANKIINDVEFEGERPSVDEFVAEFRPRFAAESPPDDEHVEVRTNDRMLTILDPIAGKEVVGALRGPETAVGPENPELDTGSLRRLGPRVLLRILNTWLYLARVPQWTKNSRTSMLPKKSPLGTPSNWRPITIGSHIVRAYCKILAFRMVESANTSISQKAFRSVDGWSENLALVEGLIRHARREKRNIYITFVDVAKAFDTVSHTSLDRALRRLDTPNHLLDVVKDLYSHVGTSICVPGGESDPISMTRGVKQGCPLSPFLFCAMVDEYLESLGPAVGYRLDDVTSVAVTGFADDLVIVSESRLGMQRSLNQLDRFLGARGLAVQPTKCATLGLERAARGRYGMKLRVVTEECFTMLNSTTGLAEYLPRIEPDEYVRYLGLQVGPSGLERPGSRVDGEKQKLQNIMEKIGGSSLKPLQKIKILKSQIIPRLQYRYVKGSYSMNLLRALDRTLRDRTRQWLHLPRTLNTAAIGLPMRDGGVGVPSLLETVAQQKMGLLRRLEASDDPAVRFIASGGLWGREVGAMARHTRVGHINNNTLSQLKRSLLRKKREEWSTSWHGKGAENFFGSRASNAILRNDLGPGRKAIDLLRLRSQTINCRVSRAIGRVPNEDLGRMTCRQCGEGQEDILHLLQRCPAAQNHRVTRHDRILLKLKQWLQGEGFHVLLEPRVQSGHTFVKPNLILQKNGQYSVLDVCVPFESDINTLRLAEQHKIDKYRAHEVDIRRFIANNSSLPPVAAVNFLGVAFGARGGIRPATIKLLSRLGIRRAGIEILVTMAIEGSISILRSLRLQADG

SEQ ID NO: 9737 - protein, 970 aa, Homarus americanus
MRKTQKYRNIVRSGLQETEDPGSSPRSTNGAGGGTRALIQDELPEGVNDPDPSDPDDSGSDPERDIAPELGARVKLWEHLRALSEEEEEGDALVVSLNSVLRAIPSPDGLTKHHVETALNGLEAALRAHKPRLFSGRTPRQGVNRVSPSYRHLPRRVRKRMEYAQTQRAYKRSPKEIANKIINDVEFEGERPSVDEFVAEFRPRFAAESPPDYEHVEVCTNDRMLTILDPIAGKEVVGALRGPETAVGPENPELDTGALRRLGPRVLLRIFNTWLYLARVPQWTKNSRTSMLPKKSPLGTPSNWRPITIGSHILRAYCKILAFRMVESANTSISQKAFRSVDGCGENLALVEGLIRHARREKRNIYITFVDVAKAFDTVSHTSLDRALRRLDTPNHLLDVVKDLYSHVGTSICVPGGESDPIPMTRGVKQGCPLSPFLFCAVVDEYQESLGPVVGYRLDDVTSVAVTGFADDLVIVSESRLGMQRSLNQLDWFLGARGLAAQPTKCATLGLERAARGRYGVKLRVVTEECFTMLNSTTGLAEYLPRIEPDEYVRYLGLQVGPSGLERPGSRVDGEKQKLLNILEKIGGSSLKPLQKIKILKSQIIPRLQYRYVKGSCSMNLLRALDRTLRDRTRQWLHLPRTLNTAAIGLPMRDGGVGVPSLLETVAQQKMGLLRRLEASDDPAVRFIASGGLWGREVGAMARHFRVGHVDNNTLSQLKRSLLRKKREEWSTSWHGKGAENFFGSRGSNAILRNDLGPGRKAIDLLRLRSQTINCRVSRAIGRVPNEDLGRLTCHQCGEGQEDILHLLQRCPAAQNHRVTRHDRILLKLKQWLQGEGFHVLLEPRVQSGHTFVKPDLILQKNGQYSVLDVCVPFESDINTLRLAEQHKIDKYRAHEVDIRRFIDNNSSLPPVAAVNFLGVAFGARGGIRPATIRLLSRLGIRRAGIEILVTMAIEGSINILRSLRLQADG

SEQ ID NO: 9738 - protein, 1259 aa, Homarus americanus
MFNATIEPCPPSVEPSASKTGESRAFSLAVRHKRVNSKVRSVVAGAPRVPPLSRERQCSGEETPQSKVAPSGGVSLAEDGIPGEPPGPLSPRIATAADKSAAEDTLTTDRPSISGPGATPETTNLIVTMEYKGVGSFDKIRCGICGTSVRSAKAYTNHTRSSHRATLEIRCGKCQVPLSDPKVCAVHFKSCSPEEQQVCAGPQHHTCGECGRTFPTPVGLTQHTRHMHKGTYNQTLEPARRVAYSTQEMLLVVEEEVKLLRSGRGVSKINQVLIGSLPEGTIRLERLRAMRKTQKYRNIVRSGLQETEDPGSSPRSTNGAGGGTRALIPDELPEGVNDPDPSDPDDSGSDPERDIAPELGERVKLWEHLRALSEEEEEGDALVVSLNSVLRAIPSPDGLTEHHVEMALNGLEAALRAHKPRLFSGRTPRQGVNRVSPSYSHLPRRVRKRMEYAQTQRAYKRSPKEIANKIINDVEFEGERPSVDEFVAEFRPRFAAESPPDDEHVEVRTNDRMLTILDPIAGKEVVGALRGPETAVGPENPELDTGALRRLGPRVLLRIFNTWLYLARVPQWKKNSRTSMLPKKSRLGTPSNWRPITIGSHILRAYCKILAFRMVESTNTSISQKAFRSVDGCGENLALVEELIRHAWREKRNIYITFVDVAKAFDTVSHTSLDRALRRLDTPNHLLDVVRDLYSHVGTSICVPGGESDPIPMTRGVKQGCPLSPFLLCAVVDEYLESLGPAVGYRLDDVTSVAVTGFADDLVIVSESTLGMQRSLNQLDRFVGARGLAAQPTKCATLGLERAARGRYGVKLRVVTEECFTMLNSTTGLAEYLPRIEPDEYVRYLGLQVGPSGLERPGSRVDGEKQKLQNIMEKIGGSSLKPLLKIKILKSQIIPRLQYRYMKGSCSMNLLRALDRTLCDRTRQWLHLPRTLNTAAIGLPMRDGGVGVPSLLETVSHQKMGLLRRLEASDDPAVRFIASVGLWGREVGAMARHFRVGHIDNNTLSQLKRSLLRKKREEWSTSWHGKGAENFFGSRASNAILRNDLGPGRKAIDLLRLRSQTINCRVSRAIGRVPNEDLGRMTCRQCGEGQEDILHLLQRCPAAQNHRVTRHDRIFLKLKQWLQGEGFHVLLEPRVQSGHTFVKPDLILQKNGQYSVLDVCVPFESDINTLRLAEQHKIDKYRAHEVDIRRFIANNSSLPPVAAVNFLGVAFGARGGIIPATIKLLSRLGIRRAGIEILVTMAIEGSINILRSLRLQADG

SEQ ID NO: 9739 - protein, 1258 aa, Homarus americanus
MFNATTEPCPPSVEPSASKTGESRAFSLAVRQKRVKSKVRSVDAGAPRVPPPSRERQCSGEATPQSKVAPSGGVSLAEDGIPGEPPGPLSPRTATAAGKSAAEDTITTDRPSISGPGATPKTTNIIVTMEYKGAGSFDKIRCGICDAPFRSARAYANHTRSSHRATLQIRCGKCQVPLSDPKVCAVHFKSCSLEEQQVCAGPQHHTCGECGRTFPTPVGLTQHTRHMHKGTYNQTLEPARRVAYSTQEMLLVAEEEVKLLQSGRGVSKINQVLIGSLPEGTIRLERLRAMRKTQKYRNIVRSGLQETEDPGSSPRSTNGAGGGTRALIQDQLPEGVNDPDPSDPDDSGSDPERDIAPELGARVKLWEHLRALSEEEEGDALVVSLNSVLRAIPSPDGLTEHHVEMALNGLEAALRAHKPRLFSGRTPRQGVNRVSPSYRHLPRRVRKRMEYAQTQRAYKRSPKEIANKIINDVEFEGERPSVDEFVAEFRPRFAAESPPDYEHVEVRTNDRMLTILDPIAGKEVVGALRGPETAVGPENPELDTGALRRLGPRVLLRIFNTWLYLARVPQWTKNSRTSMLPKKSPLGTPSNWRPITIGSHILRAYCKILAFRMVESANTSISQKAFRSVDGCGENLALVEGLIRHARREKRNIYITFVDVAKAFDTVSHTSLDRALRRLDTPNHLLDVVKDLYSHVGTSICVPGGESDPIPMTRGVKQGCPLSPFLFCAVVDEYLESLGPVVGYRLDDVTSVAVTGFADDLVIVSESRLGMQRSLNQLDRFLGARGLAAQPTKCATLGLERAARGRYGVKLRVVTEECFTMLNSTTGLAEYLPRIEPDEYVRYLGLQVGPSGLERPGSRVDGEKQKLQNIMEKIGGSSLKPLQKIKILKSQIIPRLQYRYVKGSCSMNLLRALDRTLRDRTRQWLHLPRTLNTAAIGLPMRDGGVGVPSLLETVAQQKMGLLRRLEASDDPAVRFIASGGLWGREVGAMARHFRVGHVDNNTLSQLKRSLLRKKREEWSTSWHGKGAENFFGSRASNTILRNDLGPGRKAIDLLRLRSQTINCRVSRAIGRVPNEDLGRLTCRQCGEGQEDILHLLQRCPAAQNHRVTRHDRILLKLKQWLQGEGFHVLLEPRVQSGHTFVKPDLILQKNGQYSVLDVCVPFESDINTLRLAEQHKIDKYRAHEVDIRRFIANNSSLPPVAAVNFLGVAFGARGGIRPATIKLLSRLGIRRAGIEILVTMAIEGSINILRSLRLQADG

SEQ ID NO: 9740 - protein, 1171 aa, Homarus americanus
MFNATTEPCPPSVEPSASKTGESRAFSLAVRQKRVNSKVRSVVAGAPRVPPPSRERQCSGEETPQSKVAPSGGVSLAEDGIPGEPPGPLSPRIATAADKSAAEDTITIDRPSISGPGATPKTTNIIVTMEYKGAGSFDKICCGICGAFFRSAKAYANHTRSSHRATLEIRCGKCQVPLSDPKVCAVHFKSCSLEEQQVCAGPQHHTCGECGRTFPTPVGLTQHTRHMHKGTYNQTLEPARRVAYSTQEMLLVAEEEVKLLRSGRGASKINQVLIGSLPEGAIRLERLRAMRKTQKYRNIVRSGLQETEDPGSSPRSTNGAGGGTRALIQDELPEGVNDPDPSDPDDSGSDPERDIAPELGARVKLWEHLRALSEEEEEGDALVVSLNSVLRAIPSPDGLTEHHVEMALNGLEASLRAHKPRLFSGRTPMQGVNRVSPSYRHLPRRVRKRMEYAQTQRAYKRSPKEIANKIINDVEFEGERPSVDEFIAEFRPRFAAESPPDDEHVEVRTNDRMLTILDPIAGKEVVGALRGPETAVGPENPELDTGALRRLGPRVLLRIFNTWLYLARLPQWTKNSRTSMLPKKSPLGTPSNWRPITIGSHILRAYCKILAFRMVESADTSISQKAFRSVDGCGENLALVEGLIRHARREKRNIYITFVDVAKAFDTVSHTSLERALRRLDTPNHLLDVVKDLYSHVGTSICVPGGESDPIPMTRGVKQGCPLSPFLFCAVVDEYLESLGPVVGYRLDDVTSVAVTGFADDLVIVSESRLGMQRSLNQLDWFLGARGLAAQPTKCATLGLERAARGRYGVKLRVVTEECFTMLNSTTGLAEYLPRIEPDEYVRYLGLQVGPSGLERPGSRVDDEKQKLQNIMEKIGGSSLKPLQKIKILKSQIIARLQYRYVKGSCSMNLLRALDRTLRDRTRQWLHLPRTLNTAAIGLPMRDGGVGVPSLLETVAQQKMGLLRRLEASDDPAVRFIASGGLWGREVGAMARHFRVGHIDNNTLSQLKRSLLRKKREEWSTSWHGKGAENFFGSRASNAILRNDLGPGRKAIDLLRLRSQTINCRVSRAIGRVPNEDLGRMTCRQCGEGQEDILHLLQRCPAAQNHRVTRHDRILLKLKQWLQGEGFHVLLEPRVQSGHTFVKPDLILQKMASTRCSTSVCPSKAILTPFA

SEQ ID NO: 9741 - protein, 1258 aa, Meloidogyne luci
MLSNNIEGAVEDPSHSIRADPNVEVQGVVELRVDNTSDSASLVIQTAACGVTEENPDVSNLAMPNTASIPRVPTARRIGGNKQLLWSEKDTETLVKLVQDIKLNQGNLRLWSKVLVSWNKIRTQEHPLYRLDNDVERSQSALNAKYRAVQAKKGDPQLPASQEGNPDLLGIEVEPTSTFPLESSEKKDIQEGEIEGLNRIKQLYKHAMSKTLRKPLFKPKCPISQSSISEFNNLFDQFISGKPDNWINLERLNGLVYATGVMMLKQSPEELCKKKAASRKTESELVQKEKRLRINLAIIQAEIQRRESHTKISKTGLQKIKKLRKEFKGLTNLNDFRNLKETLVVRTRLVHQTLCTIRDERIRNRVRNMAPKCAIAASSPCAKSGLGQIPLNKIYSYWKDIIGVEKQFQICPALEEWRKSISTTTLTMNIENSRLMWEEVCKSSRPWKATGPDGIPNWLWKNLPRAKEELYKIIFKLISSRRKIPTWLAKGRAISLYKKGDKNDPGNYRTIVCLNTCYKLCSGLIEKWVRQQAEICLPAEQLACRKGIWGCTEAHILDATVTRDAINQKARDLSMAWIDFSKAFDSIPHKYVRWVLASVGLSDSLRNLVRRLMREWSIYYEQKTPLGTRRSQLLKVRNGVLQGDSLSPLLFCLCIAPISHWLRNRIPKYETSFRRGSSESLRLGHLYFMDDLKLYTPNEEDLFAVLKELEILLSKIGCHMNKTKCGVTHMIKRTDLPDNDFIREFPIIGNNDTYKYLGIEQNTRICSKDVWGRVSTTLTERSEQIFSSKMNIRQMISAYNCMVPAVIRFIFTNVIIGRGKFSTDRSNCLNLDQKVRGILAKCKLRFISQNTYRIYAKPIDGGLGIKSLADALDDSIVYAYSYLTCIPRLQTSLRFMESLDNRGKRSLISDFKRVIERNGINCITVISLLPNKPGLLIEGKPIEHPTLAARAIIQLMCKVNNEKDQIALGRKGGGALPGLTMMALITDYKRWSLDPLRTWNWLIKGCISPLVLRNVTSAQENNIPFTSTGMEGRMSTCRWKCKDFRRPLNLAQETVAHIVSNCDNWAGTIYIERHNFVANRIYYELCLKFGLPFNLDNQRKPPVIENENAKLYWDRPLDCVKVMFNRPDIVCFIKKPGSINDYSEIWVIEVTVAWYQNLLQKEQRKLDKYALNSMEISSLPGPNLRNELSKLYKCCVKVIPVVIGVFGEVNINLINQISLLSLPKRRAEGLVERMSRSAVLGTHWVIKAHMSRSPIQTI

SEQ ID NO: 9742 - protein, 832 aa, Ophraella communa
MDLLRQKLKAKSKRLFCYVKCTKNKQQNHLFNTNEKLFYRQLSSAGTNNYHNLPSKDELFDYWSSIWSNPQKHNEGAAWIESEAGKSNIAPMMFDNITTADVNQAIGQINSWKAPGIDNIQNFWYKKFSSLQEVLASKFTHILQHPEDIPAFLTYGLTHMLPKTANTQDPSQYRQITCLPTLYKILTSCITNRIYRHVDQNNILAEEQKGCKRGHQGCKEQLIIDSVILRQAQKQCRNISTAFVDYRKAFDIVPHSWLISVLNIYKINPTIVSFLKASMKQWRTSLQVNINGQYIKTNDISIRRGIFQGDSLSPLWFCLAMNPLSTMLNNTKLGFNLKINKNTNCTVSHLLYMDDIKIFASNQQQIQHLLDVTERFSRDVRMQFGLNKCRTLNIEKGKIINGDLALPNGEIIAAMQNGETYKYLGFQQARLLDQKQSKSKIRNEFSQRVSSILKSELNAGNLNRAINTYAVSVLTYSFGILQWTKTELEDIQRTTRTMMTKYRCHHPTSSVLRTTLPRKEEGRALCDIINLHNKQINRLRDFFVTKSLSSNLHKSVIGADKKYSPLNLADPNMDLEITTDAEKQVKWAQKALHGRHHHDLNQSHIDKIASNRWLADGTLFPETEGFMMAIQDQVISTNNYKKFVIRDPTIISDKCRWCQQTSETIQHITSGCSTIANTDYLRRHNQLCNIIHQKLANKYGLLNTYTPYYKYNPQAVLENADFRLYYDRSIITDRQVTNNRPDIVVVDKKAKSVLLVDVAVPNNNNVLDKYNEKMAKYTDLAIEVGQMWHAEKVEVVPIIVSSTGLIPKSLEDSLKNSIFIKTLLLTCKKRQF

SEQ ID NO: 9743 - protein, 1261 aa, Ophraella communa
MSNFKTKLPQVGRALRSQSHTAGVPGMSTVCSTDSGGSNNSIVTDTLSLRNRQVNRHCNTYNSCRVQVDDRRACSKNDASSSSVSGMRSVTPSMATAITQEENITDSPPPVSAVSGVSQDGTSMTTKAGKPRKRMKWTTEMNSFIIRSYFKITKIETDLTTYRYALHRAFIEQYPEFQHVTEQRIADQHRTIIKNNLLPGPLLQQIRSEVLLELQTEIDHNVIQHTNDQLDNVRLDDHTGEDTPNIDQDKNPNTDSNTQPDEHEDAVTELSKAILEFDGSNPLHRPILPKLKSNKNTNRIIAVINSLLKDRAKDYRTLEEIHTLIYCGAVAVVRSHNQKVRFPNRKCTEKQKPYKPWWQQRLEKSINDIRKELGQLTEFNNNAKPSRRLTNRVKKIFKKIKTNTGHPRYKEHLCSYMDLLRQKLKAKSKRLARYVKCTKKKQQNHLFNTNEKLFYRQISSAGTNNYHNLPSKDELFDYWSSIWSNPQKHNEGAAWIESEAGKSNIAPMMFDNITTADVNQAIRQINSWKAPGIDNIQNFWYKKFSSLHEVLASKFTHVLQHPEDIPAFLTHGLTHMLPKTANTQDPSQYRPITCLPTLYKILTSCITNRIYKHVDQNNILAEEQKGCKRGHQGCKEQLIIDSVMLRQAQKQCRNISTAFVDYRKAFDSVPHSWLISVLNIYKINPTIVSFLEASMKQWRTSLQVNINGQYIKTNDISIRRGIFQGDSLSPLWFCLAMNPLSTMLNNTKLGFNLKINKNTNCTVSHLLYMDDIKIFASNQQQIQHLLDVTERFSRDVRMQFGLDKCRTLNIEKGKIINGDLALPNGEIIAAMQNGETYKYLGFQQARLLDQKQSKSKIRNEFSQRVSSILKSKLNAGNLNRAINTYAVPVLTYSFGILQWTKTELEDIQRTTRTMMTKYRCHHPTSSVLRTTLPRKEGGRALCDIINLHNKQINKLRDFFVTKSLSSNLHKSVIGADKKYSPLNLADPNMDLEITTDAEKHVKWAQKALHGRHHHDLNQPHIDKIASNRWLADGTLFPETEGFMMAIQDQVINTNNYKKCVIRDPTITTDKCRRCQQTSETIQHITSGCSTIANTDYLRRHNQLCNIIHQKLANKYGLLNTYTPYYKYNPQAVLENADFRLYYDRSIITDRQVTNNRPDIVVVDKKAKSVLLVDVAVPNNNNVLDKYTEKMAKYTDLAIEVGQMWHAEKVEVVPIIVSSTGLFPKSLGDSLKKLDLHKNTFIDLQKAAILNTCHTVRKFLNM

SEQ ID NO: 9744 - protein, 845 aa, Ophraella communa
MDLLRQKLKAKSKRLARYVKCTKKKQQNHLFNTNEKLFYRQLSSAGTNNYHNLPSKDELFDYWSSIWSYPQKHNEGAAWIESEAGKSNIAPMMFDNITTADVNQAIGQINSWKAPGIDNIQNFWYKKFSSLHEVLASKFTHILQHPEDIPAFLTHGLTHMLPKTANTQDPSQYRPITCLPTLYKILTSCITNRIYRHVDQNNILAEEQKGCKRGHQGCKEQLIIDSVILRQAQKQCRNISTAFVDYRKAFDSVPHSWLISVLNIYKINPTIVSFLEASMKQWRTSLQVNINGQYIKTNDISIRRGIFQGDSLSPLWFCLAMNPLFTMLNNTKLGFNLKINKNTNCTVSHLLYMDDIKIFASNQQQIQHLLDVTERFSRDVRMQFGLDKCRTLNIEKGKIINGDLALPNGEIIAAMQNGETYKYLGFQQARLLDQKQSKSKIRNEFSQRVSSILKSELNAGNLNRAINTYAVPVLTYSFGILQWTKTELEDIQRTTRTMMTKYRCHHPTSSVLRTTLPRKEGGRALCDIINLHNKQINKLRDFFVTKSLSSNLHKSVIGADKKYSPLNLADPNMDLEITTDAEKHVKWAQKALHGRHHHDLNQPHIDKIASNRWLADGTLFPETEGFLMAIQDQVINTNNYKKCVIRDPTITTDKCRRCQQTSETIQHITSGCSTIANTDYLRRHNQLCNIVHQKLANKYGLLNTYTPYYKYNPKAVLENADFRLYYDRSIITDRQVTNNRPDIVVVDKKAKSVLLVDVAVPNNNNVLDKYNEKMAKYTDLAIEVGQMWHAEKVEVVPIIVSSTGLIPKSLEDSLKKLDLHKNTFIDLQKAAILNTCHTVRKFLNM

SEQ ID NO: 9745 - protein, 845 aa, Ophraella communa
MDLLKQKLKAKSKRLSRYVKCTKKKQQNHLFNTNEKLFDRQLSSAGTNNYHNLPSKDELFDYWSSIWSNPQKHNEGAAWIESEVGKSNIAPMMFDNITTADVNQAIRQINSWKAPGIDNIQNFWYKKFSSLHEVLASKFTHILQHPEDIPAFLTHSLTHMLPKTANTQDPSQYRPITCFPTLYKILTSCITNRIYRHVDQNNILAEEQKGCKRGHQGCKEQLIIDSVILRQAQKQCRNISTAFVDYRKAFDSVPHSWLISVLNIYKINPTIVSFLEASMKQWRTSLQVNINGQYIKTNDISIRRGIFQGDSLSPLWFCLAMNPLSTMLNNTKLGFNLKINKNTNCTVSHLLYMDDIKIFASNQQQIQHLLDVTERFSRDVRMQFGLDKCRTLNIEKGKIINGDLALPNGEIIAAMQNGETYKYLGFQQARLLDQKQSKSKIRNEFSQRVSSILKSELNAGNLNRAINTYAVPVLTYSFGILQWTKTELEDIQRTTRTMMTKYRCHHPTSSVLRTTLPRKEGGRALCDIINLHNKQINELRDFFVTKSLSSNLHKSVIGADKKYSPLNLADPNMDLEITTDAEKHVKWAQKALHGRHHHDLNQPHIDKIALNRWLADGTLFPETEGFMMAIQDQVINTNNYKKCVIRDPTITTDKCRRCQQTSETIQHITSGCSTIANTDYLRRHNQLCNIIHQKLANKYGLLNTYTPYYKYNPQAVLENADFRLYYDRSIITDRQVTINRPDIVVVDKKAKSVLLVDVAVPNNNNVLDKYNEKMAKYTDLAIEVGQMWHAEKVEVVPIIVSLTGLIPKSLEDSLKKLDLHKKTFIDLQKAAILNTCHTVRKFLNM

SEQ ID NO: 9746 - protein, 1261 aa, Ophraella communa
MSSFKTKLPQVGRVLRSQSHTAGVPSMSAVCSTDSGGSNNSIITDTLTLRNRQVNRHGNTYNSCRVQVDDRRTCSKNDASSSSVSGMRSVTSSMATATTQEETITEDPPPVSAVSGVSQDGTFMTTKAGKPRKRMKWTTEMNSFIIRSYFRITKNETDLTTYRFALHRGFTQQYPEFQHVTEQRIADQRRTIIKNNLLPGPIMQQIRSEVLLELQTEIDHNVIQHTNDQLDNVRLDDHTGEDKPNIDQDENPNTDSNTQPDEHENAVTELSKAILEFDGSNPLHRPILPKLKSNRNTNGILALFNLLLKDRAKNCRTLEEIHTLIYCGAVAVIRSHNQVRFSNQKSIEHHKQHKPWWQQLLEKSINDIRKELGQLTEFKNSIKPSRRLTNRVRKIFKKIKTHTGHPKYKEHLCSYMDLLRQKLKAKSKRLSRYVKCTKKKQQNHLFNNNEKLFYRQLSSAGGTNNNSNLPTKNEFTDYWSSIWSNPQKHNEGAAWIESEMDKSNIAPMMFDKITTAEVNQAIGETNSWKAPGIDNIQNFWYKKFDSLHELLASKFTHILQHPEDIPAFFTHGLTHMLPKTANTQDPSQYRPITCLPTLYKILTSCITNRIYRHVDQNNILAEEQKGCKRGHQGCKEQLIIDSVILKQAQKQSRNISTAFVDYRKAFDSVPHTWLISILKIYKVHPSIVNFLETSMKQWRTNLQFNINGQYLKTDEIAIRRGIFQGDSLSPLWFCLAMNPLSALLNNTKYGFNLKTNRNTNCTVSHLLYMDDIKIFAANQQQVQHLLDITERFSSDIHMEFGLDKCRTLNIEKGKIVNGDVALPNGDIIAAMQNGETYKYLGFQQARLLDQKQSKSKIKDQYTQRVSSLLKSELNAGNLNRAINTYAVPVLTYSFGILRWTKTELEDIQRTTRTMMTKYRYHHPISSVFRTTLPRKEGGRALCDIINLHNKQINKLRDFFITKSTSSNLHKFIVGADKNYSPLNLAGPNVDLEVTTDTEKHVKWAQKALHGRHHHDLNQPHIDKIASNRWLADGTLFPETEGFMMAIQDQVINTNNYKKFVIRDQTITSDKCRRCQQTSETIQHITSGCSTIANTDYLRRHNQLCNIIHQKLANKYGLLNTYTPYYKYNPQAVLENADFRLYYDRSIITDRQVTNNRPDIVVVDKKANSVLLVDVAVPNNNNILDKYNEKIAKYTDLAIEVGQMWHAEKVEVVPIIVSSTGLIPKSLEDSLKKLDLHKNTFIDLQKAAILNTCHTVRKFLNM

SEQ ID NO: 9747 - protein, 845 aa, Galerucella pusilla
MDSLRQKLKAKSKRLSRYVKCTKRKQQNYLFNNNQKLFYRQLSGTENNQNQGPPNKDELTEYWSSLWSKPVEHKSNAHWIRTEEEKINIEPMSFVDLTTSEVAEAIKSTSNWKTPGVDHVQNFWYKKFDSLHEAMATSFSHILQHPEDTPPFLTLGSTHLLPKTHQTHDPSQYRPITCLPTIYKILTACITNRIYRHVDQNNILSEEQKGCRRDHQGCKEQLIIDSVILKQAQKEKRNIHTAFVDYRKAFDSVPHSWLVKVLQIYKVHPTVVTFLESAMKHWRTNLHLQINGQYLQTDEISIRRGIFQGDSLSPLWFCLAMNPLSNLLNDTDYGYKLKANRNTSCTVSHLLYMDDIKIYASNQRQIQHLLNITEKFSSEIQMGFGLDKCKTLNIEKGKIVNGDVLLPNGNIITAMQNGKTYKYLGFQQAKLLDQKQAKIKIRSQFTQRVTTLLKSQLNAGKLAKAINTYAIPILTYSFGILKWTKTELEDIQRTTRTMMTKHKCHHPTSSVIRTTLPRREGGRGLVDIVNLHNKQISRLQEFFIAKAETSELHEMVAKADKNYSPLNLVSPDIRLEIVTDSDKQVEWAQKALHGRHHHDLNQPHIDKEASNKWLSDGTLFPETEGFMTAIQDQVINTNNYKKFVMKDPNIATDKCRRCQQTTETIQHITSGCSALANIDYLRRHNQLCNIIHQKLANKFGLVNTYTPYYKYHPNSVLENADFRLYYDRSIITDRRVTNNRPDIVVVDKKANSVYLVDVAVPNNNNILDKYNEKIAKYTDLAIEVRQMWHAEKIEVVPIIVSSTGLIPKTLQDSLTKLGLHKNTYIDLQKAAILNTCHTVRKFLNM

SEQ ID NO: 9748 - protein, 845 aa, Galerucella calmariensis
MDSLRQKLKAKSKRLSRYVKCTKRKQQNYLFNNNQKLFYRQLSGTVNNQNQSPPNKDELTEYWSSLWSKPVEHKSNAHWIRTEEEKINIEPMSFVDLTTSEVTEAIKSTSNWKTPGVDHVQNFWYKKFDSLHEAMATSFSHILQHPEDTPPFLTLGSTHLLPKTHQTHDPSQYRPITCLPTIYKILTACITNRIYRHVDQNNILSEEQKGCRRDHQGCKEQLIIDSVILKQAQKEKRNIHTAFVDYRKAFDSVPHSWLVKVLQIYKVHPTIVTFLESAMKHWRTNLHLQINGQYLQTDEISIRRGIFQGDSLSPLWFCLAMNPLSNLLNDTDYGYKLKANRNTSCTVSHLLYMDDIKIYASNQRQIQHLLNITEKFSSDIQMGFGLDKCKTLNIEKGKIVNGDVLLPNGNIITAMQNGETYKYLGFQQAKLLDQKQAKNKIRSQFTQRVTTLLKSQLNAGNLAKAINTYAIPTLAYSFGILKWTKTELEDIQRTTRTMMTKHKCHHPTSSVIRTTLPRREGGRGLVDIVNLHNKQISRLQEFFIAKAETSELHEMVAKADKNYSPLNLVSPDMRLGIVTDSDKQMEWAQKALHGRHHHDLNQPHIDKEASNKWLSDGTLFPETEGFMMAIQDQVINTNNYKKFVMKDPNIATDKCRRCQQTTETIQHITSGCSALANIDYLRRHNQLCNIIHQKLANKFGLVNTYTPYYKYHPNSVLENADFRLYYDRSIITDRRVTNNRPDIVVVDKKANSVYLVDVAVPNNNNILDKYNEKIAKYTDLAIEVRQMWHAEKIEVVPIIVSSTGLIPKTLQDSLTKLGLHKNTYIDLQKAAILNTCHTVRKFLNM

SEQ ID NO: 9749 - protein, 816 aa, Ophraella communa
MGHPRYKEHLCSYIDLLRQKLKAKSKRLARYVKCTKKKQQNHLFNTNEKLFYRQLSSARTNNYHNLPSKDELFDYWSSIWSYSQKHNEGAAWIESEAGKSNIAPMMFDNITTANVNQAIGQINSWKAPGIDNIQNFWYKKFSSLHEVLASKFTHILQHPEDIPAFLTHGLTHMLPKTANTQDPSQYRPITCLPTLYKILTSCITSRIYRHVDQNNILAEEQKGCKRGHQGCKEQLIIDSVILRQAQKQCRNISTAFVDYRKAFDSVPHSWLISVLNIYKINPTIVSFLEASMKQWRTSLQVNINGQYIKTNDISIRRGIFQGDSLSPLWFFLAMNPLSTMLNNTKLGFNLKINKNTNCTVSHLLYMDDIKIFTSNQQQIQHLLDVTERFSRDVRMQFGLDKCRTLNIEKGKIINGDLALPNGEIIAAMQNGETYKYLGFQQASLLDRKQSKSKIRNEFSQRLISLLKSELNAGNLNRAINTCAVPVLTYSLGILQWTKTELEDIQRTTRTMMTKYRCHHPTSSVLRTTLPRKEGGRALCDIVNLHNKQINRLRDFFITKSLSSNLHKSVIGADKKYSPLNLADPNMDLEITTDAEKQVKWAQKALHGRHHHDLNQSHIDKIASNRWLADSTLFPETERFMMAIQDQVISTNNYKKFVIRDPTIISNKCRRCQQTSETIQHITSGCSCIANTDYLHRHNQLCNIIHQKLANKYGLLNTYTPYYKYNPQAVLENADFRLYYDRSIITDRQVTNNRPDIVVVDKKAKSVLLVDIAVPNNNNVLDKYNEKMAKYTDLAIEVGQMWHAEKVKVVPIIVLST

SEQ ID NO: 9750 - protein, 1253 aa, Galerucella pusilla
MSNCKTRLPQVGRAKCSESHTASVPSTSAVCSTDSGGSNNSIVNSGTLNLRNRQVKRHCNTLNSCRVQAGVRGACSKNDESTSSSVSGRRSVTPSRATVTHTHEENNVNPHPPASAVSGVTQVGTSTTTKAGKPRKRMKWTIELNSFIMRSYFKITKMETDMTTYRYALHRAFIEHFPEFQHLTEQRIADQRRSIVKNNLLPDPTLQQIRGEVLLDLQNEENDIITDHDTHEPENAQEDNNGVEKTNIDCDKTPDNDYNTKLCKALVEFNGTNPIHRPKLPKLRTNKSTNSIIAAVNLLLQNHAKDCKALEQLHTLIYCGAVTVLRIHNQPIQFPGNNQSKDYKQLKPWWQRRLESSIDDIRRELGQLTEFKNSLKPSRRLTNRVRKIYRKIKTYTGHPQHEQHVFEYMDSLRQKLKAKSKRLSRYVKCTKRKQQNYLFNNNQKLFYRQLSGTVNNQNQSPPNKDELTEYWSSLWSKPVEHKSNAHWIRTEEEKINIEPMPFVNLTTTEVTEAIKSTSNWKTPGVDHVQNFWYKKFDSLHEAMATSFSHILQHPEDTPPFLTLGSTQLLPKTHQTHDPSQYRPITCLPTIYKILTACITNRIYRHVDQNNILSEEQKGCRRDHQGCKEQLIIDSVILKQAQKEKRNIHTAFVDYRKAFDSVPHSWLVKVLQIYKVHPTVVTFLESAMKHWRTNLHLQINGQYLQTDEISIRRGIFQGDSLSPLWFCLAMNPLSNLLNDTDYGYKLKANRNTSCTVSHLLYMDDIKIYASNQRQIQHLLNITEKFSSDIQMGFGLDKCKTLNIEKGKIVNGDVLLPNGNIITAIQNGETYKYLGFQQAKLLDQKQAKIKIRSQFTQRVTTLLKSQLNAGNLAKAINTHAIPILIYSFGILKWTKTELEDIQRTTRTMMTKHKCHHPTSSVIRTTLPRREGGRGLVDIVNLHNKQISRLQEFFIAKAETSELHEMVAKADKNYSPLNLVSPDMRLEIVTDSDKQVEWAQKALHGRHHHDLNQPHIDKEASNKWLSDGTLFPETEGFMMAIQDQVINTNNYKKFVMKDPNIDTDKCRRCQQTTETIQHITSGCSALANIDYLRRHNQLCNIIHQKLANKFGLVNTYTPYYKYHPNSVLENADFRLYYDRSIITDRRVTNNRPDIVVVDKKANSVYLVDVAVPNNNNILDKYNEKIAKYTDLAIEVRQMWHAEKIEVVPIIVSSTGLIPKTLQDSLTKLGLHKNTYIDLQKAAILNTCHTVRKFLNM

SEQ ID NO: 9751 - protein, 754 aa, Galerucella calmariensis
MSFVDLTTSEVTEAIKSTSNWKTPGVDHVQNFWYKKFDSLHEAMATSFSHILQHPEDTPPFLTLGSTHLLPKTHQTHDPSQYRPITRLPTIYKILTACITNRIYRHVDQNNILSEEQKGCRRDHQGCKEQLIIDSVILKQAQKEKRNIHTAFVDYRKAFDSVPHSWLVKVLQIYKVHPTVVTFLESAMKHWRTNLHLQINGQYLQTDEISIRRGIFQGDSLSPLWFCLAMNPLSNLLNDTDYGYKLKANRNTSCTVSHLLYMDDIKIYASNQRQIQHLLNITEKFSSDIQMGFGLDKCKTLNIEKGKIVNGDVLLPNGNIITAMQNGETYKYLGFQQAKLLDQKQAKIKIRSQFTQRVTTLLKSQLNAGNLAKAINTYAIPILTYSFGILKWTKTELEDIQRTTRTMMTKHKCHHPASSVIRTTLPRREGGRGLVDIVNLHNKQISRLQEFFIAKAETSELHEMVAKADNNYSPLNLVSPDMRFGIVTDSDKQVEWAQKALHGRHHHDLNQPHIDKEASNKWLSDGTLFPKTEGFMMAIQDQVINTNNYKKFVMKDPNIATDKCRRCQQTTETIQHITSGCSALANIDYLRRHNQLCNIIHQKLANKFGLVNTYTPYYKYHPNSVLENADFRLYYDRSIITDRRVTNNRPDIVVVDKKANSVYLVDVAVPNNNNILDKYNEKIAKYTDLAIEVRQMWHAEKIEVVPIIVSSTGLILKALQDSLTKLGLHKNTYIDLQKAAILNTCHTVRKFLNM

SEQ ID NO: 9752 - protein, 1259 aa, Ophraella communa
MSSFKTKLPQVGRVLRSQSHTAGVPGMSAVCSTDSGGSSNSIVTDTLTLRNRPVNRHGNTYNSYRVQVDDRRACSKSDASSSSVSGMRSVTPSMATATTEEENNTKSPPPVSAVSGVSQDGTSMTTKAGKPRKRMKWTTEMNSFIIRSYFKITKIETDLTTYRFALHRAFIEQYPEFQHVTEQRIADQRRTIIKNNLLPGPLMQQIRSEVLLELQTEDDHNVIQHTNDQMDNIRLDDHTSEDTPNMDQNENIDNDTQTDEHENAVAELSKAIAEFDGTNPIQRPILPKLRSNKNTNRILALFNLLLNDRAKDCQTLKEIHTLIYCGAVAVLRSHNQQIRFPNKNCSEKKKQHKPWWQQRLEKSINDIRKELGQLTEFKTSTKPSRRLTNRVKKILKKIKTNTEHPRHKEHLCSYMDLLRQKLKAKSKRLSRYVKCTKKKQQNHLFDNNEKLFYRQLSSVGTNSNDNLPSKHELTDYWSSIWSNPQKHNEGAEWIQSEKDKSNIAPMLFNNITTAEVNQAVGETNSWKAPGIDNIQNFWYKKFDSLHEIIASKFTHILQHPEDIPAFLTHGLTHMLPKTANTQDPSQYRPITCLPTLYKILTSCITNRIYRHVDQNNILAEEQKGCKRGHQGCKEQLVIDSVILRQAQKQCRNISTAFVDYRKAFDIVPHSWLLCVLNIYKVHPTIVTFLETSMKQWRTSLQVNINGQYIKTNEIVIRRGIFQGDSLSPLCFCLAMNPLSTMLNDTKYGFNLKTNRNTNCTVSHLLYMDDIKIFAANQQQIQHLLDITERFSSDIHMEFGLDKCRTLNIEKGKIVNGDVALPNGDIIAAMQNGETYKYLGFQQARLLDQKQSKSKIKDQYTQRVSSLLKSELNAGNLNRAINTYAVPVLTYSFGILKWTKTELEDIQRTTRTMMTKYKYHHPISSVFRTTLLRKEGGRALCDIINLHNKQINKLRDFFITKSTSSNLHKFIVGADKNYSPLNLAGPNVDLEVTTDAEKHVKWAQKALHGRHHHDLNQPHIDKIALNRWLADGTLFPETEGFMMAIQDQVINTNNYKKFVIRDQTITSDKCRRCQQTSETIQHITSGCSTIANTDYLRRHNQLCNIIHQKLANKYGLLNTYTPYYKYNPQAVLENADFRLYYDRSIITDRQVTNNRPDIVVVDKKSNSVLLVDVAVPNNNNILDKYNEKIAKYTDLAIEVGQMWHAEKVEVIPIIVSSTGLIPKSLEDSLKKLDLHKNTFIDLQKAAILNTCHTVRKFLNM

SEQ ID NO: 9753 - protein, 1253 aa, Galerucella calmariensis
MSNCKTRLPQVGRAKCSESHTASVPSTSAVCSTDSGGSNNSIVNSGTLNLRNRQVNRHCNTLNSCRVQAGARRACSKNDESTSSSVSGRRSVTPSRATVTHTHEENNINPHPPAFAVSGVTQVGISTTTKAGKPRKRMKWTIELNSFIMRSYFKITKMETDMTTYRYALHCAFIEHFPEFQHLTEQRIADQRRSIVKNNLLPDPTLQQIRGEVLLDLQNEENDILTDHDTHEPENAQEDNNGVEKTNIDCDKTPDNDYNTELCKALAEFNGTNPIHRPKLPKLRTNKSTNSIIAAVNLLLQNHAKDCKALEQLHTLIYCGAVVVLRIHNQRIQFPENNQSKDYKQLKPWWQRRLESSIDDIRRELGQLTEFKNNLKPSRRLTNRVRKIYRKIKTYAGHPQHEQHVSEYMDLLRQKLKAKSKRLSRYVKCTKRKQQNYLFNNNQKLFYRQLSGTVNNQNQSPPNKDELTEYWSSLWSKPVEHKSNAHWIRTEEEKINIEPMPFVNLTTTEVTEAMRNTSNWKTPGVDHVQNFWYKKFDSLHEALATSFSLILQHPEDTPPFLTLGSTHLLPKTHQTHDPSQYRPITCLPTIYKILTACITNRIYRHVDQNNILSEEQKGCRRDHQGCKEQLIIDSVILKQAQKEKRNIHTAFVDYRKAFDSVPHSWLVKVLQIYKVHPTIVTFLESSMKHWRTNLHLQINGQYLQTDEISIRRGIFQGDSLSPLWFCLAMNPLSNLLNDTDYGYKLKANRNTSCTVSHLLYMDDIKIYASNQRQIQHLLNITEKFSSDIQMGFGLDKCKTLNIEKGKIVNGDVLLPNGNIITAMQNGETYKYLGFQQAKLLDQKQAKIKIRSQFTQRVTTLLKSQLNAGNLAKAINTYAIPILTYSFGILKWTKTELEDIQRTTRTMMTKHKCHHPTSSVIRTTLPRREGGRGLVDIVNLHNKQISRLQEFFIAKAETSELHEMVAKADKNYSPLNLVSPDMRLGIVTDSDKQVEWAQKALHGRHHHDLNQPYIDKEASNKWLSDGTLFPETEGFMMAIQDQVINTNNYKKFVMKDPNIATDKCRRCQQTTETIQHITSGCSALANIDYLRRHNQLCNIIHQKLANKFGLVNTYTPYYKYHPNSVLENADFRLYHDRSIITDRRVTNNRPDIVVVDKKANSVYLVDVAVPNNNNIMDKYNEKIAKYTDLAIEVRQMWHANKIEVVPIIVSSTGLIPKTLQDNLTKLGLHKNTYIDLQKAAILNTCHTVRKFLNM

SEQ ID NO: 9754 - protein, 1259 aa, Ophraella communa
MSNFKTKLPQVGRVLRSQSHTAGVPGMSAVCSTDSGGSNNSIVTDTLTLRNRQVNRHCNTYNSCRVQVDDRRACSKNDASSSSVSGMRSVTPSMATAITQEENITDSPSPVSAVSGVSQDGTPMTTKAGKPRKRMKWTTEMNSFIIRSYFKITKIETDLTTYRYALHRAFIEQYPEFQHVTEQRIADQRRTIIKNNLLPGPLLQQIRSEVLLELQTEIDHNVIQHTKDQLDNIILDDHASEDTPNMDQNENIDNDTQTDEHENAVAELSKAIAEFDGTNPIQRPILPKLRSNKNTNRILALFNLLLNDRAKDCQTLGEIHTLIYCGAVAVLRSHNQQIRFPNKRSTEKQKPFKPWWQQRLEKSINDIRKELGQLTEFNNNTKPSRRLINRVKKILKKIKTNTGHPRYKEHLCSYMDLLRQKLKAKSKRLSRYVKCTKKKQQNHLFNTNEKLFYRQLSSAGTNNYHNLPSKDELTDYWSSIWSNPQKHNEGAAWIESETDKSNIASMVFDNITTAEVNQVVGETNSWKAPGIDNIQNFWYKKFDSLHEVMASKFTHILQHPEEIPAFLTHGLTHMLPKTANTQDPSQYRPITCLPTLYKILTSCITNRIYRHVDQNNILAEEQKGCKRGHQGCKEQLVIDSVILRQAQKQCRNISTAFVDYRKAFDSVPHSWLIRILNIYKVHPTIVTFLEASMKQWRTNLQLNINGQHFKTDEIAIRRGIFQGDSLSPLWFCLAMNPLSHLLNDTKYGFNLKTNRNTNYTVSHLLYMDDIKIFASNQQQIQHLLDITERFSSDIHMEFGLDKCRTLNIEKGKIVNGDVALPNGDIIAAMQNGKTYKYLGFQQARFLDQKQSKAKIRDEFSQRVSSLLKSELNAGNLNRAINTYAVPVLTYSFGILQWTKTELEDIQRTTRTMMTKYRCHHPTSSVLRTTLPRKEGGRALCDIVNLHNKQINRLRDFFITKSLSSNLHKSVIGADKKYSPLNLADPHMDLEITTDAEKQVKWAQKALHGRHHHDLNQPHIDKIASNRWLADGTLFPETEGFMMAVQDQVINTNNYKKCVIRDPTITTDKCRRCQQTSETIQHITSGCSTIANTDYLRRHNQLCNIIHQKLANKYGLLNTYTPYYKYNPQAVLENADFRLYYDRSIITDRQVTNNRPDIVVVDKKAKSVLLVDVAVPNNNNVLDKYNEKMAKYTDLAIEVGQMWHAEKVEVVPIIVSSTGLIPKSLEDSLKKLDLHKNTFMDLQKAAILNTCHTVRKFLNM

SEQ ID NO: 9755 - protein, 1261 aa, Ophraella communa
MSSFKTKLPQVGRVLRSQSHTAGVPGMSAVCSTDSGGSNNSIVTDTLSLRNRQVNRHCNTYNSCRVQVDDRRACSKNDASSSSVSGMRSVTPSMATATTQEENNTKSPQTVSAVSGVSQDGTSTTTKAGKPRKRMKWTIEMNSFIIRSYFKITKIETDLTSYRFALHRAFIEQYPEFQHVTEQRIADQRRTILKNNLLPGPLMQQIRSEVLLELQTEDNHNVIQHTNDQLDNVRLDDHTSDDTPNIDQDENPNTDSNTQPDEHENAVAELSKAILEFDGSSPIHRPILPKLKTNKNTNRILAVINLLLNDRAKNYRTLEEIHTLIYCGAVAVLRCHNQHVRVPNKKYTEKQKSYKPWWQQRLEKSINDIRKELGQLTEFNNNAKPSRRLINRVKKILKKTKTNTGHPRYKEHLCSYMDLLRQKLKAKSKRLSRYVKCTKKKQQNHLFNTNEKLFYRQLSSAGTNNYHNLPSKDELTDYWSSIWSNPQNHNEGAAWIESETDKSNIAAMVFDNITTAEVNQAVGETNSWKAPGIDNIQNFWYKKFDSLHEVMASKFTHILQHPEDIPAFLTHGLTHMLPKTANTQDPSQYRPITCLPTLYKILTSCITNRIYRHVDQNNILAEEQKGCKRGHQGCKEQLVIDSVILRQAQKQCRNISTAFVDYRKAFDSVPHSWLIRVLNIYKVHPTIVTFLEASMKQWRTNLQLNINGQHFKTDEIAIRRGIFQGDSLSPLWFCLAMNPLSHMLNDTKYGFNLKTNRNTNCTVSHLLYMDDIKIFASNQQQIQHLLDITERFSSDIRMEFGLDKCRTLNIEKGKIVNGDVALPNGDIIAAMQNGETYKYLGFQQARLLDQKQSKSKIKDQYTQRVCSLLKSELNAGNLNRAINTYAVPVLTYSFGILRWTKTELEDIRRTTRTMMTKYRYHHPTSSVLRTTLPRKEGGRALCDIINLHNKQINKLRDFFITKSTSSNLHKFIVGADKNYSPLNLAGPNVDLEITTDAEKHVKWAQKALHGRHHHDLNQPHIDKLASNRWLADGTLFPETEGFMMAIQDQVINTNNYKKFVIRDPTITSDKCRRCQQTSETIQHITSGCSTIANTDYLRRHNQLCNIIHQKLANKYGLLNTYTPYYKYNPQAVLENADFRLYYDRSIITDRQVTNNRPDIVVVDKKANSVLLVDVAVPNNNNVLDKYNEKIAKYTDLAIEVGQMWHAEKVEVVPIIVSSTGLIPRSLEDSLKKLSLHKNTFIDLQKAAILNTCHTVRKFLNM

SEQ ID NO: 9756 - protein, 1259 aa, Ophraella communa
MSSFKTKLPQVGRVLRSQSHTAGVPGMSAVCSTDSGGSSNSIVTDTLTLRNRLVNRHGNTYNSCRVQVDDRRACSKNDASSSSVSGMRSVTPSMATATTEEENNTKSPPPVSAVSGVSQDGTSMTTKAGKPRKRMKWTTEMNSFIIRSYFKITKIETDLTTYRFALHRAFIEQYPEFQHVTEQRIADQRRTILKNNLLPGPLLQQIRSEVLLELQTEDDHNVIQHTNDQLDNIRLDDHTSEDTPNMDQNENIDNDTETDEHKNAVAELSKAIVEFDGTNPIQRPILPKLRSNKNTNRILALFNLLLNDRAKDCQTLEEIHTLIYCGAVAVLRSHNQQIRFPNKNCSEKKKQHKPWWQQRLEKSINDIRKELGQLTEFKTSTKPSRRLTNRVKKIFKKIKTNTEHPRHKEHLCSYMDLLRQKLKAKSKRLSRYVKCTKKKQQNHLFDNNEKLFYRQLSSVGTNSNDNLPSKHELTDYWSSIWSNPQKHNEGAEWIQSEKDKSNIAPMLFNNITTAEVNQAVGETNSWKAPGIDNIQNFWYKKFDSLHEIIASKFTHILQHPEDIPAFLTHGLTHMLPKTANTQDPSQYRPITCLPTLYKILTSCITNRIYRHVDQNNILAEEQKGCKRGHQGCKEQLVIDSVILRQAQKQCRNISTAFVDYRKAFDSVPHSWLLSVLNIYKVHPTIVTFLETSMKQWRTSLQVNINGQYIKTNEIVIRRGIFQGDSLSPLWFCLAMNPLSTMLNDTKYGFNLKTNRNTNCTVSHLLYMDDIKIFAANQQQIEHLLDITERFSSDIHMEFGLDKCRTLNIEKGKIVNGDVALPNGDIIAAMQNGETYKYLGFQQARLLDQKQSKSKIKDQYTQRVSSLLKSELNAGNLNRAINTYAVPVLTYSFGILRWTKTELEDIQRTTRTMMTKYRYHHPISSVFRTTLPRKEGGRALCDIINLHNKQINKLRDFFITKSTSSNLHKFIVGADKNYSPLNLAGPNVDLEVTTDAEKHVKWAQKALHGRHHHDLNQPHIDKIASNRWLADGTLFPETEGFMMAIQDQVINTNNYKKFVIRDQTITSDKCRRCQQTSETIQHITSGCSTIANTDYLRRHNQLCNIIHQKLANKYGLLNTYTPYYKYNPQAVLENADFRLYYDRSIITDRQVTNNRPDIVVVDKKFNSVLLVDVAVPNNNNILDKYNEKIAKYTDLAIEVGQMWHAEKVEVVPIIVSSTGLIPKSLEDSLKKLDLHKNTFIDLQKAAILNTCHTVRKFLNM

SEQ ID NO: 9757 - protein, 959 aa, Galerucella pusilla
MIHMNHEPENAQEDNNGVEKTNIDCDKTPDNDYNTELCKALAEFNGTNPIHRPKLPKLRTNKSTNSIIAEVNLLLQNHAKDCKALEQLHTLIYCGAVAVLRIHNQRIQFPENNQSKNYKQLKPWWQRRLESSIDNIRRELGQLTEFKNNLKPSRRLTNRVRKIYRKIKTYTGHPQHEQHVSEYMDLLRQKLKAKSKRLSRYVKCTKRKQQNYLFNNNQKLFYRQLSGTVNNQNQSPPNKDELTEYWSSLWSKPVEHKSNAHWIRTEEEKINIEPMPFVNLTTTEVTEAIKSTSNWKTPGVDHVQNFWYKKFDSLHEAMATSFSHILQHPEDTPPFLTLGSTHLLPKTHQTHDPSQYRPITCLPTIYKILTACITNRIYRHVDQNNILSEEQKGCRRDHQGCKEQLIIDSVILKQAQKEKRNIHTAFVDYRKAFDSVPHSWLVKVLQIYKVHPTVITFLESAMKNWRTNLHLQINGQYLQTDEISIRRGIFQGDSLSPLWFCLAMNPLSNLLNDTDYGYKLKANRNTSCTVSHLLYMDDIKIYASNLRQIQHLLNITEKFSSDIQMEFGLDKCKTLNIEKGKIVNGDVLLPNGNIITAMQNGETYKYLGFQQAKLLDQKQAKIKIRNQFTQRVTTLLKSQLNAGNLAKAINTYAIPILTYSFGILKWTKTELEDIQRTTRTMMTKHKCHHPTSSVIRTTLPRKEGGRGLVDIVNLHNKQISRLQESFIAKAETSELHEMVAKADKSFSPLNLVSPDMRLGIVTDSDKQVEWAQKALHGRHHHDLNQPHIDKEASNKWLSDGTLFPETEGFMTAIQDQVINTNNYKKFVMKDPNIATDKCRRCQQTTETIQHITSGCSALANIDYLRRHNQLCNIIHQKLANKFGLVNTYTPYYKYHPNSVLENADFRLYYDRSIITDRRVTNNRPDIVVVDKKANSVYLVDVAVPNNNNILDKYNEKIAK

SEQ ID NO: 9758 - protein, 1253 aa, Galerucella calmariensis
MSNCKTRLPQVGRAKCSESHTASVPSTSAVCSTDSGGSNNSIVNSGTLNLRNRQVNRHCNTLNSCRVQAGARRACSKNDESTSSSVSGRRSVTPSRATVTHTHEENNINPHPPASAVSGVTQVGISTTTKAGKPRKRMKWTIELNSFIMRSYFKITKMETDMTTYRYALHRAFIEHFPEFQHLTEQRIADQRRSIVKNNLLPDPTLQQIRGEVLLDLQNEENDIITDHDTHEPENAQEDNNGVEKTNIDCDKTPDNDYNTELSKALAEFNGTNPIHRPKLPKLRTNKSTNSIIAAVNLLLQNHAKDCKALEQLHTLIYCGAVAVLRIHNQRIQFPGNNQSKDYKQLKPWWQRRLESSIDDIRRELGQLAEFKNNLKPSRRLTNRVRKIYRKIKTYTGHPQHEQHVFEYMDSLRQKLKAKSKRLSRYVKCTKRKQQNYLFNNNQELFYRQLSGTVNNQNQSPPNKDELTEYWSSLWSKPVEHKSNAHWIRTEEEKINIEPMSFVDLTTSEVTEAIKSTSNWKTPGVDHVQNFWYKKFDSLHEAMATSFSHILQHPEDTPPFLTLGSTHLLPKTHQTHDPSQYRPITCLPTIYKILTACITNRIYRHVDQNNILSEEQKGCRRDHQGCKEQLIIDSVILKQAQKEKRNIHTAFVDYRKAFDSVPHSWLVKVLQIYKVHPTVVTFLESAMKHWRTNLHLQINGQYLQTDEISIRRGIFQGDSLSPLWFCLAMNPLSNLLNDTDYGYKLKANRNTSCTVSHLLYMDDIKIYASKQRQIQHLLNITEKFSSDIQMGFGLDKCKTLNIEKGKIVNGDVLLPNGNIITAMQNGETYKYLGFQQAKLLDQKQAKIKIRSQFTQRVTTLLKSQLNAGNLAKAINTYAIPILTYSFGILKWTRTELEDIQRTTRTMMTKHKCHHPTSSVIRTTLPRREGGRGLVDIVNLHNKQISRLQEFFIAKGETSELHEMVAKADKNYSPLNLVSPDMRLEIVTDSDKQVEWAQKALHGRHHHDLNQPHIDKEASNKWLSDGTLFPETEGFMTAIQDQVINTNNYKKFVMKDPNIATDKCRRCQQTTETIQHITSGCSALANIDYLRRHNQLCNIIHQKLANKFGLVNTYTPYYKYHPNSVLENADFRLNYDRSIITDRRVTNNRPDIVVVDKKANSVYLVDVAVPNNNNIMDKYNEKIAKYTDLAIEVRQMWHAEKIEVVPIIVSSTGLIPKTLQDSLTKLGLHKNTYIDLQKAAILNTCHTVRKFLNM

SEQ ID NO: 9759 - protein, 1261 aa, Ophraella communa
MSNFKTILPQVGRALRSQSHTAGVPGMSAVCSTDSGGSNNSIVTDTLSLRNRQVNRHCNTYNSCRVQVDDRRACSKSDASSSSVSGLRSVTPSMATATTQQENNTKSPPPVSAVSGVSQDGTSMTTKAGKPRKRMKWTTEMNSFIIRSYFKITKIETDLTTYRFALHRAFIEQYPDFQHVTEQRIADQRRTIIKNNLLPGPLMKQIRSEVLLELQTEDDHNEIQLTNDQLDNVRLDDHTSDETPNIDQDENPNTDSNTQPDEHENAGAELSKAILEFDGSNPIHRPILPKLKTNKNTNRILAIINLLLKDRAKDYRTLEEIHTLIYCGAVAVVRSHNQQVRFPNKKCTEKKKPYKPWWQQRLEKSINDIRKELGQLTEFNNNAKPSRRLTNRVKKILRKIETNTGHPRYKEHLCSYMDLLRQKLKAKSKRLSRYVKCTKKKQQNHLFNTNEKLFYRQLSSAGTNNYRNLPSKDDLTDYWSSIWSNPQKHNEGAAWIEYETDKLNIAPMLFNNITTAEVNQAVGETNSWKAPGIDNIQNFWYKKFDSLHEVMASKFTHILQHPEDIPAFLTHGLTHMLPKTANTQDPSKYRPITCLPTLYKILTSCITIRIYRHVDQNNILAEEQKGCKRGHQGCKEQLVIDSVTLRQAQKQCHNISTAFVDYRKAFDSVPHSWLIRILNIYKVHPTIVTFLEASMKQWRTNLQLNINGQHFKTDEIAIRRGIFQGDSLSPLWFCLAMNPLSHLLNDTKYGFNLKTNRNTNCTVSHLLYMDDIKIFASNQQQLQHLLDITERFSSDIHMEFGLDKCRTLNIEKGKIVNGDVALPNGDIIAAMQNGETYKYLGFQQARLLDQKQSKSKIKDQYIQRVTSLLRSELNAGNLNRAINTYAVPVLTYSFGILQWTKTELEDIQRTTRTMMTKYRCHHPTSSVLRTTLPRKEGGRALRDIVNLHNNQINRLRDFFITKSLSSNLHKSVIGADKKYSPLNLADPHMDLEITTDAEKHVKWAQKALHGRHHHDLNQPHIDKIASNRWLADGTLFPETEGFMMAIQDQVINTNNYKKCVIRDQTITSDKCRRCQQTSETIQHITSGCSTIANTDYLRRHNQLCNIIHQKLANKYGLLNTYTPYYKYNPQAVLENADFRLYYDRSIITDRQVTNNRPDIVVVDKKAKSVLLVDVAVPNNKNVLDKYNEKMAKYTDLAIEVGQMWHAEKVEVVPIIVSSTGLIPKSLEDSLKKLDLHKNTFIDLQKAAILNTCHTVRKFLNM

SEQ ID NO: 9760 - protein, 845 aa, Galerucella pusilla
MDSLRQKLKAKSKRLSRYVKCTKRKQQNYLFNNNQKLFYRQLSGTVNNQNQSPPNKDELTEYWSSLWSKPVEHKSNAHWIRTEEEKINIEPMPFVNLTTTEVTEAIKSTSNWKTPGVDHVQNFWYKKFDSLHEAMATSLSHILQHPEDTPPFLTLGSTHLLPKTHQTHDPSQYRPITCLPTIYKILTACITNRIYRHVDQNNILSEEQKGCRRDHQGCKEQLIIDSVILKQAQKEKRNIHTAFVDYRKAFDSVPHSWLVKVLQIYKVHPTVVTFLESAMKHWRTNLHLQINGQYLQTDEISIRRGIFQGDSLSPLWFCLAMNPLSNLLNDTDYGYKLKANRNTSCTVSHLLYMDDIKIYASNQRQIQHLLNITEKFSSDIQMGFGLDKCKTLNIEKGKIVNGDVLLPNGNIITAMQNGETYKYLGFQQAKLLDQKQAKIKIRSQFTQRVTTLLKSQLNAGNLAKAINTHAIPILIYSFGILKWTKTELEDIQRTTRTMMTKHKCHHPTSSVIRTTLPRREGGRGLVDIVNLHNKQISRLQEFFIAKAETSELHEMVAKADKNYSPLNLVSPDMRLEIVTDSDKQVEWAQKALHGRHHHDLNQPHIDKEASNKWLSDGTLFPETEGFMSAIQDQVINTNNYKKFVMKDPNIATDKCRRCQQTTETIQHITSGCSALANIDYLRRHNQLCNIIHQKLANKFGLVNTYTPYYKYHPNSVLENADFRLYYDRSIITDRRVTNNRPDIVVVDKKANSVYLVDVAVPNNNNILDKYNEKIAKYTDLAIEVRQMWHAEKIEVVPIIVSSTGLIPKTLQDSLTKLGLHKNTYIDLQKAAILNTCHTVPKFLNM

SEQ ID NO: 9761 - protein, 1203 aa, Galerucella calmariensis
MSNCKTRLPQVGRAKCSESHTASVPSTSAVCSTDSGGSNNSIVNSGTLNLRNRQVNRHCNTLNSCRVQAGARRACSKNDESTSSSVSGRRSVTPSRATVTHTHEENNINPHPPASAVSGVTQVGTSTTTKAGKPRKRMKWTIELNSFIMRSYFKITKMETDMTTYRYALHRAFTEHFPEFQHLTEQRIADQRRSIVKNNLLPDPTLQQIRGEVLLDLQNEENDIITDHDTHEPENAQEDNNGVEITNIDCDKTPDNDYNTELCEALAEFNGTNPIHRPKLPKLRTNKSTNSIIAAVNLLLQNHAKDCKALEQLHTLIYCGAVAVLRIHNQRIQFPENNQSKDYKQLKPWWQRRLESSIDDIRRELRQLTEFKNNLKPSRRLTNRVRKIYRKIKTYAGHPQHERHVFEYIDSLRQKLKAKSKRLSRYVKCTKRKQQNYLFNNNQKLFYRQLSGTESNQNQSPPNKDELTEYWSSLWSKPVEHKSNAYWIRTEEEKINIEPMSFVDLTTSEVTEAIKSTSNWKTPGVDHVQNFWYKKFDSLHEAMATSFSHILQHPEDTPPFLTLGSTHLLPKTHQTHDPSQYRPITCLPTIYKILTACITNRIYRHVDQNNILSEEQKGCRRDHQCCKEQLIIDSVILKQAQKEKRNIHTAFVDYRKAFDSVPHSWLVKVLQIYKVHPTVVTFLESAMKHWRTNLHLQINGQYLQTDEISIRRGIFQGDSLSPLWFCLAMNPLSNLLNDTDYGYKLKANRNTSCTVSHLLYMDDIKIYASNQRQIQHLLNITEKFSSDIQMGFGLDKCKTLNIEKGKIVNGDVLLPNGNIITAMQNGETYKYLGFQQAKLLDQKQAKIKIRSQFTQRVTTLLKSQLNAGNLAKAINTYAIPILTYSIGILKWTKTELEDIQRTTRTMMTKHKCHHPTSSVIRTTLPRREGGRGLVDIVNLHNKQISRLQEFFIAKGETSELHEMVAKADKNYSPLNLVSPDMRLEIVTDSDKQVEWAQKALHGRHHHDLNQPHIDKEASNKWLSDGTLFPETEGFMMAIQDQVINTNNYKKFVMKDPNIATDKCRRCQQTTETIQHITSGCSALANIDYLRRHNQLCNIIHQKLANKFGLVNTYTPYYKYHPNSVLENADFRLYYDRSIITDRRVTNNRPDIVVVDKKANSVYLVDVAVPNNNNILDKYNEKIAKYTDLAIEVRQMWHAEKIEV

SEQ ID NO: 9762 - protein, 1195 aa, Ophraella communa
MSSFKTKLPQVGRVLRSQSHTAGVPGMSAVCSTDSGGSNNSIVTDTISLRNRQVNRHCNTYNSCRVQVDDRRACSKNDASSSSVSGMRSVTPSMATATTQEENNTKSPQTVSAVSGVSQDGTSMTTKAGKPRKRMKWTTDMNSFIIRSYFKITKIETDLTTYRFALHRAFIEQYPEFQHVTEQRIADQRRTIIKNNLIPGPLIQHIRSEVLLELQTEDNHNVIQHTNDQLDNVRLDDHTSDDTPNIDQAENPNTDSNTQPDEHENAVAELSKAILEFDGSSPIHRPILPKLKTNKNTNRILAVINLLLNDRAKNYRTLEEIHTLIYCGAVAVLRCHNQQVRVPNKKYTEKQKSYKPWWQQRLEKCINDIRKELGQLTEFNNNAKPSRRLINRVKKILKKIKTNTGHPRYKEHLCSYMDLLRQKLKAKSKRLSRYVKCTKKKQQNHLFNTNEKLFYRQLSSAGTNNYHNLPSKDELTDYWSSIWSNPQNHNEGAAWIESETDKSNIAAMVFDNITTAEVNQAVGETNSWKAPGIDNIQNFWYKKFDSLHEVMASKFTHILQHPEDIPAFLTHGLTHMLPKTANTQDPSQYRPITCLPTLYKILTSCITNRIYRHVDQNNILAEEQKGCKRGHQGCKEQLVIDSVILRQAQKQCRNISTAFVDYRKAFDSVPHSWLIRVLNIYKVHPTIVTFLEASMKQWRTNLQLNINGQHFKTDEIAIRRGIFQGDSLSPLWFCLAMNPLSHMLNDTRYGFNLKTNRNTNCTVSHLLYMDDIKIFASNQQQIQHLLDITERFSSDIRMKFGLDKCRTLNIEKGKIVNGDVALPNGDIIAAMQNGETYKYLGFQQARLLDQKQSKSKIKDQYIQRVCSLLKSELNAGNLNRAINTYAVPVLTYSFGILRWTKTELEDIQRTTRTMMTKYRYHHPTSSVLRTTLPRKEGGRALCDIINLHNKQINKLRDFFITKSTSSNLHKFIVGADKNYSPLNLAGPNVDLEITTDAEKHVKWAQKALHGRHHHDLNQPHINKLASNRWLADGTLFPETEGFMMAIQDQVINTNNYKKFVIRDPTITSDKCRRCQQTSETIQHITSGCSTIANTDYLRRHNQLCNIIHQKLANKYGLLNTYTPYYKYNPQAVLENADFRLYYDRSIITDRQVTNNRPDIVVVDKKANSVLLVDVAVPNNNNILDKYNEKIAKYTE

SEQ ID NO: 9763 - protein, 845 aa, Ophraella communa
MDLLRQKLKAKSKRLSRYVKCTKKKQQNHLFNTNEKLFYRQLSSAGTNNYHNLPSKDELFDYWSSIWSNPQKHNEGAAWIESEADKSNIAPMMFDNITTADVNQAIGQINSWKAPGIDNIQNFWYKKFSSLHEVLASKFTHILQHPEDIPAFLTHGLTHMLPKTANTQDPSQYRPITCLPTLYKILTSCITNRIYRHVDQNNILAEEQKGCKRGHQGCKEQLIIDSVILRQAKKQCRNISTAFVDYRKAFDSVPHSWLISVLNIYKINPTIVSFLEASMKQWRTSLQVNINGQYIKTNDISIRRGIFQGDSLSPLWFCLAMNPLSTMLNNTKLGFNLKINKNTNCTISHLLYMDDIKIFASNQQQIQHLLDITERFSSDIHMEFGLDKCRTLNIEKGKIVNGDVALPSGDIIAAMQNGETYKYLGFQQAKLLDQKQSKAKIRDEFSQRVSSLLKSELNAGNLNRAINTYAVPVLTYSFGILQWTKTELEDIQRTTRTMMTKYRCHHPTSSVLRTTLPRKEGGRALCDIINLHNKQINKLRDFFVTKSLSSNLHKSVIGADKKYSPLNLADPNMDLDITTDAEKQVKWAQKALHGRHHHDLNQPHIDKIASNRWLADGTLFPETEGFMMAIQDQVINTNNYKKFVIRDPTITTDKCRRCQQTSETIQHITSGCSTIANTDYLRRHNQLCNIIHQKLANKYGLLNTYTPYYKYNPQAVLENADFTLYYDRSIITDRQVTNNRPDIVVVDKKAKSVLLVDVAVPNNNNVLDKYNEKMAKYADLAIEVGQMWHAEKVEVVPIIVSSTGLIPKSLEDSLKKLDLHKNTFIDLQKAAILNTCHTVRKFLNM

SEQ ID NO: 9764 - protein, 1253 aa, Galerucella calmariensis
MSNCKTRLPQVGRAKCSESHTASVPSTSAVCSTDSGGSNNSIVNSGTLNLRNRQVNRHCNTLNSCRVQAGARRACSKNDESTSSSVSGRRSVTPSRATVTHTHEENNINPHPPASAVSGVTQVGISTTTKAGKPRKRMKWTIELNSFIMRSYFKITKMETDMTTYRYALHRAFIEHFPEFQHLTEQRIADQRRSIVKNNLLPDPTLQQIRGEVLLDLQNEENDIITDHDTHEPENAQEDNNGVEITNIDCDKTPDNDYNTELCKALAEFNGTNPIHRPKLPKLRTNKSTNSIIAAVNLLLQNHAKDCKALEQLHTLIYCGAVAVLRIHNQRIQFPGNNQSKDYKQLKPWWQRRLESSIDDIRRELGQLTEFKNNLKPSRRLTNRVRKIYRKIKTYTGHPQHERHVFEYIDSLRQKLKAKSKRLSRYVKCTKRKQQNYLFNNNQKLLYRQLSGTENNQNQSPPNKDELTEYWSSLWSKPVEHKSNAHWIRTEEEKINIEPMSFVDLTTSEVTEAIKSTSNWKTPGVDHVQNFWYKKFDSLHEAMATSFSHILQHPEDTPAFLTLGSTHLLPKTHQTHDPSQYRPITCLPTIYKILTACITNRIYRHVDQNNILSEEQKGCRRDHQGCKEQLIIDSVILKQAQKEKRNIHTAFVDYRKAFDSVPHSWLVKVLQIYKVHPTVVTFLESAMKHWRTNLHLQINGQYLQTDEISIRRGIFQGDSLSPLWFCLAMNPLSNLLNDTDYGYKLKANRNTSCTVSHLLYMDDIKIYASNQRQIQHLLNITEKFSSDIQMGFGLDKCKTLNIEKGKIVNGDVLLPNGNIITAMQNGETYKYLGFQQAKLLDQKQAKIKIRSQFTQRVTTLLKSQLNAGNLAKAINTYAIPILTYSFGILKWTKTELEDIQRTTRTMMTKHKCHHPTSSVIRTTLPRREGGRGLVDIVNLHNKQISRLQEFFIAKAETSELHEMVAKADKNYSPLNLVSPDMRLEIVTDSDKQVEWAQKALHGRHHHDLNQPHIDKEASNKWLSDGTLFPETEGFMMAIQDQVINTNNYKKFVIKDPNIATDKCRRCQQTTETIQHITSGCSALANIDYLRRHNQLCNIIHQKLANKFGLVNTYTPYYKYHPNSVLENADFRLYYDRSIITDRRVTNNRPDIVVVDKKANSVYLVDVAVPNNNNIMDKYNEKIAKYTDLAIEVRQMWHAEKIEVVPIIVSSTGLIPKTLQDSLTKLGLHKNTYIDLQKAAILNTCHTVRKFLNM

SEQ ID NO: 9765 - protein, 1253 aa, Galerucella calmariensis
MSNCKTRLPQVGRAKCSESHTASVPSTSAVCSTDSGGSNNSIVNSGTLNLRNRQVNRHCNTLNSCRVQAGARRACSKNDESTSSSVSGRRSVTPSRATVTHTHEENNINPHPPASAVSGVTQVGTSTTTKAGKPRKRMKWTIELNSFIMRSYFKITKMETDMTTYRYALHCAFIEHFPEFQHLTEQRIADQRRSIVKNNLLPDPTLQQIRGEVLLDLQNEENDIITDHDTHEPENAQEDNNGVEKTNIDCDKTPDNDYNTELCKALAEFNGTNPIHRPKLPKLRTNKSTNSIIAAVNLLLQNHAKDCKALEQLHTLIYCGAVVVLRIHNQRIQFPENNQSKDYKQLKPWWQRRLESSIDDIRRELGQLTEFKNNLKPSRRLTNRVRKIYRKIKTYTGHPQHEQHVSEYMDLLRQKLKAKSKRLSRYVKCTKRKQQNYLFNNNQKLFYRQLSGTVNNQNQSPPNKDELTEYWSSLWSKPVEHKSNAHWIRTEEEKINIEPMLFVNLTTTEVTEAIKSTSNWKTPGVDHVQNFWYKKFDSLHEAMATSFSHILQHPEDTPPFLTLGSTHLLPKTHQTHDPSQYRPITCLPTMYKILTACITNRIYRHVDQNNILSEEQKGCRRDHQGCKEQLIIDSVILKQAQKEKRNIHTAFVDYRKAFDSVPHSWLVKVLQIYKVHPTIVTFLESSMKHWRTNLHLQINGQYLQTDEISIRRGIFQGDSLSPLWFCLAMNPLSNLLNDTDYGYKLKANRNTSCTVSHLLYMDDIKIYASNQRQIQHLLNITEKFSSDIQMGFGLDKCKTLNIEKGKIVNGDVLLPNGNMITAMQNGETYKYLGFQQAKLLDQKQAKIKIRSQFTQRVTTLLKSQLNAGNLAKAINTYAIPILTYSFGILKWTKTELEDIQRTTRTMMTKHKCHHPTSSVIRTTLPRREGGRGLVDIVNLHNKQISRLQEFFIAKAETSELHEMVAKADKNYSALNLVSPDMRLGIVTDSDKQVEWAQKALHGRHHHDLNQPHIDKEASNKWLSDGILFPETEGFMMAIQDQVINTNNYKKFVMKDPNIATDKCRRCQQTTETIQHITSGCSALANIDYLRRHNQLCNIIHQKLANKFGLVNTYTPYYKYHPNSVLENADFRLYYDRSIITDRRVTNNRPDIVVVDKKSNSVYLVDVAVPNNNNILDKYNEKIAKYTDLAIEVRQMWHADKIEVVPIIVSSTGLIPKTLQDSLTKLGLHKNTYIDLQKAAILNTCHTVRKFLNM

SEQ ID NO: 9766 - protein, 1253 aa, Galerucella calmariensis
MSNCKTRLPQVGRAKCSESHTASVPSTSAVCSTDSGGSNNSIVNSGTLNLRNRQVNRHCNTLNSCRVQAGARRACSKNDESTSSSVSGRRSVTPSRATVTHTHEENNINPHPPASAVSGVTQVSTSTTTKAGKPRKRMKWTIELNSFIMRSYFKITKMETDMTTYRYALHRAFTEHFPEFQHLTEQRIADQRRSIVKNNLLPDPTLQQIRGEVLLDLQNEENDIITDHDTHEPENAQEDNNGVEITNIDCDKTPDNDYNTELCKALAEFNGTNPIHRPKLPKLRTNKSTNSIIAAVNLLLQNHAKDCKALEQLHTLIYCGAVAVLRIHNQRIQFPGNNQSKDYKQLKPWWQRRLESSIDDIRRELGQLTEFKNNLKPSRRLTNRVRKIYRKIKTYTGHPQHERHVFEYIDSLRQKLKAKSKRLSRYVKCTKRKQQNYLFNNNQKLFYRQLSGTESNQNQSPPNKDELTEYWSSLWSKPVEHKSNAHWIRTEEEKINIEPMSFVDLTTSEVTEAIKSTSNWKTPGVDHVQNFWYKKFDSLHEAMATSFSHILQHPEDTPAFLTLGSTHLLPKTHQTHDPSQYRPITCLPTIYKILTACITNRIYRHVDQNNILSEEQKGCRRDHQGCKEQLIIDSVILKQAQKEKRNIHTAFVDYRKAFDSVPHSWLVKVLQIYKVHPTVVTFLESAMKHWRTNLHLQINGQYLQTDEISIRRGIFQGDSLSPLWFCLAMNPLSNLLNDTDYGYKLKANRNTSCTVSHLLYMDDIKIYASNQRQIQHLLNITEKFSSDIQMGFGLDKCKTLNIEKGKIVNGDVLLPNGNIITAMQNGETYKYLGFQQAKLLDQKQAKIKIRSQFTQRVTTLLKSQLNAGNLAKAINTYAIPILTYSFGILKWTKTELEDIQRTTRTMMTKHKCHHPTSSVIRTTLPRKEGGRGLVDIVNLHNKQISRLQEFFIAKAERSELHEMVAKADKNYSPLNLVSPDMRLEIVTDSDKQVEWAQKALHGRHHHDLNQPHIDREASNKWLSDGTLFPETEGFMMAIQDQVINTNNYKKFVIKDPNIATDKCRRCQQTTETIQHITSGCSALANIDYLRRHNQLCNIIHQKLANKFGLVNTYTPYYKYHPNSVLENADFRLYYDRSIITDRRVTNNRPDIVVVDKKANSVYLVDVAVPNNNNILDKYNEKIAKYTDLAIEVRQMWHAEKIEVVPIIVSSTGLIPKTLLDSLTKLGLHKNTYIDLQKAAILNTCHTVRKFLNM

SEQ ID NO: 9767 - protein, 1136 aa, Ophraella communa
MTTKAGKPRKRMKWTTEMNSFIIRSYFKITKSETDLTTYRFALHRAFIEQYPEFQHVTEQRIADQRRTIIKNNLIPGPLIQQIRSEILLELQTEDDHNVIQHTNDQLDNIRLDDHTSEDTPNMDQNENIDNDTQTNEHKNAVAELSKAIVEFDGTNPTQRPILPKLRSNKNTNRILALFNLLLNDRAKDCQTLEEIHTLIYCGAVAVLRSHNQQIRFPNKNCSEKKKQHKPWWQQRLEKSINDIRKELGQLTEFKTSTKPSRHLTNRVKKIFKKIKTNTEHPRHKEHLCSYMDLLRQKLKAKSKRLSRYVKCTKKKQQNHLFDNNEKLFYRQLSSVGTNSNDNLPSKHELTDYWSSIWSNPQKHNEGAEWIQSEKDKSNIAPMLFNNITTAEVNQAVGETNSWKAPGIDNIQNFWYKKFDSLHEIIASKFTHILQHPEDIPAFLTHGLTHMLPKTANTQDPSQYRPITCLPTLYKILTSCITNRIYRHVDQNNILAEEQKGCKRGHQGCKEQLVIDSVILRQAQKQCRNISTAFVDYRKAFDSVPHSWLLSVLNIYKVHPTIVTFLETSMKQWRTSLQVNINGQYIKTNEIVIRRGIFQGDSLSPLWFCLAMNPLSTMLNDTKYGFNLKTNRNTNCTVSHLLYMDDIKIFAANQQQIEHLLDITERFSSDIHMEFGLDKCRTLNIEKGKIVNGDVALPNGDIIAAMQNGETYKYLGFQQARLLDQKQSKSKIKDQYTQRVSSLLKSELNAGNLNRAINTYAVPVLTYSFGILRWTKTELEDIQRTTRTMMTKYRYHHPISSVFRTTLPRKEGGRALCDIINLHNKQINKLRDFFITKSTSSNLHKFIVGADKNYSPLNLAGPNVDLEVTTDAEKHVKWAQKALHGRHHHDLNQPHIDKIASNRWLADGTLFPETEGFMMAIQDQVINTNNYKKFVIRDQTITSDKCRRCQQTSETIQHITSGCSTIANTDYLRRHNQLCNIIHQKLANKYGLLNTYTPYYKYHPQAVLENADFRLYYDRSIITDRQVTNNRPDIVVVDKKANSVLLVDVAVPNNNNILDKYNEKIAKYTDLAIEVGQMWHAEKVEVVPIIVSSTGLIPKSLEDSLKKLDLHKNTFIDLQKAAILNTCHTVRKFLNM

SEQ ID NO: 9768 - protein, 1262 aa, Ophraella communa
MSSFKTKLPQVGRVLRSQSHTAGVPSMSAVCSTDSGGSNNSIITDTLTLRNRQVNRHGNTYNSCRVQVDDRRTCSKNDASSSSVSGMRSVTSSMATATTQEEIITEDPPPVSAVSGVSQDGTSMTTKAGKPRKRMKWTTEMNSFIIRSYFRITKNETDLTTYRFALHRGFTQQYPEFQHVTEQRIADQRRTIIKNNLLPGPIMQQIRSEVLLELQTEIDHNVIQHTNDQLDNVRLDDHTGEDKPNIDQDENPNTDSNTQPDEHENAVTELSKAILEFDGSNPLHRPILPKLKSNRNTNGILALFNLLLKDRAKNCRTLEEIHTLIYCGAVAVIRSHNQQVRFSNQKSIEHHKQHKPWWQQRLEKSINDIRKELGQLTEFKNSIKPSRRLTNRVRKIFKKIKTHTGHPKYKEHLCSYMDLLRQKLKAKSKRLSRYVKCTKKKQQNHLFNNNEKLFYRQLRSAGGTNNNSNLPTKNEFTDYWSSIWSNPQKHNEGAAWIESEMDKSNIAPMMFDKITTAEVNQAIGETNSWKAPGIDNIQNFWYKKFDSLHELLASKFTHILQHPEDIPAFFTHGLTHMLPKTANTQDPSQYRPITCLPTLYKILTSCITNRIYRHVDQNNILAEEQKGCKRGHQGCKEQLIIDSVILKQAQKQSRNISTAFVDYRKAFDSVPHSWLISILKIYKVHPSIVNFLETSMKQWRTNLQFNINGQYLKTDEIAIRRGIFQGDSLSPLWFCLAMNPLSAMLNNTKYGFNLKTNRNTNCTVSHLLYMDDIKIFAANQQQVQHLLDITERFSSDIHMEFGLNKCRTLNIEKGKIVNGDVALPNGDIIAAMQNGETYKYLGFQQARLLDQKQSKSKIKDQYTQRVSSLLKSELNAGNLNRAINTYAVPVLTYSFGILRWTKTELEDIQRTTRTMMTKYRYHHPISSVFRTTLPRKEGGRALCDIINLHNKQINKLRDFFITKSTSSNLHKFIVGADKNYSPLNLAGPNVDLEVTTDTEKHVKWAQKALHGRHHHDLNQPHIDKIASNRWLADGTLFPVTEGFMMAIQDQVINTNNYKKFVIRDQTITSDKCRRCQQTSETIQHITSGCSTIANTDYLRRHNQLCNIIHQKLANKYGLLNTYTPYYKYNPQAVLENADFRLYYDRSIITDRQVTNNRPDIVVVDKKANSVLLVDVAVPNNNNILDKYNEKIAKYTDLAIEVGQMWHAEKVEVVPIIVSSTGLIPKSLEDSRKKLDLHKNTFIDLQKAAILNTCHTVRKFLNM

SEQ ID NO: 9769 - protein, 1253 aa, Galerucella calmariensis
MSNCKTRLPQVGRAKCSESHTASVPSTSAVCSTDSGGSNNSIVNSGTLNLRNRQVNRHCNTLNSCRVQAGARRACSKNDESTSSSVSGRRSVTPSRATVTHTHEENNINPHPPASAVSGVTQVGTSTTTKAGKPRKRMKWTIELNSFIMRSYFKITKMETDMTTYRYALHRAFTEHFPEFQHLTEQRIADQRRSIVKNNLLPDPTLQQIRGEVLLYLQNEENDIITDHDTHEPQNAQEDNNGVEITNIDCDKTPDNDYNTELCKALAEFNGTNPIHRPKLPKLRTNKSTNSIIAAVNLLLQNHAKDCKALEQLHTLIYCGAVAVLRIHNQRIQFPENNQSKDYKQLKPWWQRRLESSIDDIRRELGQLTEFKNNLKPSRRLTNRVRKIYRKIKTYTGHPQHERHVFEYIDSLRQKLKAKSKRLSRYVKCTKRKQQNYLFNNNQKLFYRQLSGTESNQNQSPPNKDELTEYWSSLWSKPVEHKSNAHWIRTEEEKINIEPMPFVNLTTTEVTEAIKSTSNWKTPGVDHVQNFWYKKFDSLHEAMATSFSHILQHPEDTPPFLTLGSTHLLPKTHQTHDPSQYRPITCLPTMYKILTACITNRIYRHVDQNNILSEEQKGCRRDHQGCKEQLIIDSVILKQAQKEKRNIHTAFVDYRKAFDSVPHSWLVKVLQIYKVHPTIVTFLESSMKHWRTNLHLQINGQYLQTDEISIRRGIFQGDSLSPLWFCLAMNPLSNLLNDTDYGYKLKANRNTSCTVSHLLYMDDIKIYASNQRQIQHLLNITEKFSSDIQMGFGLDKCKTLNIEKGKIVNGDVLLPNGNIITAMQNGETYKYLGFQQAKLLDQKQAKIKIRSQFTQRVTTLLKSQLNAGNLAKAINTYAIPILTYSFGILKWTKTELEDIQRTTRTMMTKHKCHHPTSSVIRTTLPRREGGRGLVDIVNLHNKQISRLQEFFIAKGETSELHEMVAKADKNYSPLNLVNPDMRLEIVTDSDKQVEWAQKALHGRHHHDLNQPHIDKEASNKWLSDGTLFPETEGFMTAIQDQVINTNNYKKFVMKDPNIATDKCRRCQQTTETIQHITSGCSALANIDYLRRHNQLCNIIHQKLANKFGLVNTYTPYYKYHPNSVLENADFRLYYDRSIITDRRVTNNRPDIVVVDKKANSVYLVDVAVPNNNNILDKYNEKIAKYTDLAIEVRQMWHADKIEVVPIIVSSTGLIPKTLQDSLTKLGLHKNTYIDLQKAAILNTCHTVRKFLNM

SEQ ID NO: 9770 - protein, 1253 aa, Galerucella calmariensis
MSNCKTRLPQVGRAKCSESHTASVPSTSAVCSTDSGGSNNSIVNSGTLNLRNRQVNRHCNTLNSCRVQAGARRACSKNDESTSSSVSGRRSVTPSRATVTHTHEENNINPHPPASAVSGVTQVSTSTTTKAGKPRKRMKWTIELNSFIMRSYFKITKMETDMTTYRYALHRAFTEHFPEFQHLTEQRIADQRRSIVKNNLLPDPTLQQIRGEVLLDLQNEENDIITDHDTHEPENAQEDNNGVEITNIDCDKTPDNDYNTELCKALAEFNGTNPIHRPKLPKLRTNKSTNSIIAAVNLLLQNHAKDCKALEQLHTLIYCGAVAVLRIHNQRIQFPGNNQSKDYKQLKPWWQRRLESSIDDIRRELGQLTEFKNNLKPSRRLTNRVRKIYRKIKTYTGHPQHERHVFEYIDSLRQKLKAKSKRLSRYVKCTKRKQQNYLFNNNQKLFYRQLSGTESNQNQSPPNKDELTEYWSSLWSKPVEHKSNAHWIRTEEEKINIEPMSFVDLTTSEVTEAIKSTSNWKTPGVDHVQNFWYKKFDSLHEAMATSFSHILQHPEDTPAFLTLGSTHLLPKTHQTHDPSQYRPITCLPTIYKILTACITNRIYRHVDQNNILSEEQKGCRRDHQGCKEQLIIDSVILKQAQKEKRNIHTAFVDYRKAFDSVPHSWLVKVLQIYKVHPTVVTFLESAMKHWRTNLHLQINGQYLQTDEISIRRGIFQGDSLSPLWFCLAMNPLSNLLNDTDYGYKLKANRNTSCTVSHLLYMDDIKIYASNQRQIQHLLNITEKFSSDIQMGFGLDKCKTLNIEKGKIVNGDVLLPNGNIITAMQNGETYKYLGFQQAKLLDQKQAKIKIRSQFTQRVTTLLKSQLNAGNLAKAINTYAIPILTYSFGILKWTKTELEDIQRTTRTMMTKHKCHHPTSSVIRTTLPRREGGRGLVDIVNLHNKQISRLQEFFIAKAETSELHEMVAKADKNYSPLNLVSPDMRLEIVTDSDKQVEWAQKALHGRHHHDLNQPHIDREASNKWLSDGTLFPETEGFMMAIQDQVINTNNYKKFVIKDPNIATDKCRRCQQTTETIQHITSGCSALANIDYLRRHNQLCNIIHQKLANKCGLVNTYTPYYKYHPNSVLENADFRLYYDRSIITDRRVTNNRPDIVVVDKKANSVYLVDVAVPNNNNILDKYNEKIAKYTDLAIEVRQMWHAEKIEVVPIIVSSTGLIPKTLQDSLTKLGLHKNTYIDLQKAAILNTCHTVRKFLNM

SEQ ID NO: 9771 - protein, 1233 aa, Ophraella communa
MSAVCSTDSGGSSNSIVTDTLTLRNRLVNRHGNTYNSCRVQVDDRRACSKNDVSSSSVSGMRSVTPSMATATTEEENNTKSPPPVSAVSGVSQDGTSMTTKAGKPRKRMKWTTEMNSFIIRSYFKITKSETDLTTYRFALHRAFIEQYPEFQHVTEQRIADQRRTIIKNNLIPGPLVQQIRSEVLLELQTEDDHNVIQHTNDQLDNIRLDDHTSEDTPNMDQNENIDNDTQTDEHKNAVAELSKAIVEFDGTNPIQRPILPKLRSNKNTNRIIALFNLLLNDRAKDCRTLEEIHTLIYCGAVAVLRSHNQQVRFPNKNCSEKKKQHKPWWQQRLEKSINDIRKELGQLTEFKTSTKPSRRLTNRVKKIFKKIKTNTKHPRHKEHLCSYMDLLRQKLKAKSKRLSRYVKCTKKKQQNYLFDNNEKLFYRQLSSVGTNSNDNLPSKHELTDYWSSIWSNPQKHNEGAEWIQSKKDKSNIAPMLFNNITTAEVNQAVGETNSWKAPGIDNIQNFWYKKFDSLHEIIASKFTHILQHPEDIPAFLTHGLTHMLPKTANTQDPSQYRPITCLPTLYKILTSCITNRINRHVDQNNILAEEQKGCKRGHQGCKEQLVIDSVILRQAQKQCRNISTAFVDYRKAFDSVPHSWLLSVLNIYKVHPTIVTFLETSMKQWRTSLQVNINGQYIKTNEIVIRRGIFQGDSLSPLWFCLTMNPLSTMLNDTKYGFNLKTNRNTNCTVSHLLYMDDIKIFAANQQQIEHLLDITERFSSDIHMEFGLDKCRTLNIEKGKIVNGDVALPNGDIIAAMQNGETHKYLGFQQARLLDQKQSKSKIKDQYTQRVSSLLKSELNAGNLNRAINTYAVPVLTYSFGILRWTKTELEDIQRTTRTMMTKYRYHHPISSVFRTTLPRKEGGRALCDIINLHNKQINKLRDFFITKSTSSNLHKFIVGADKNYSPLNLAGPNVDLQVTTDAEKHVKWAQKALHGRHHHDLNQPHIDKIASNRWLADGTLFPETEGFMMAIQDQVINTNNYKKFVIRDQTITSDKCRRCQQTSETIQHITSGCSTIANTDYLRRHNQLCNIIHQKLANKYGLLNTYTPYYKYNPQAVLENADFRLYYDRSIITDRQVTNNRPDIVVVDKKANSVLLVDVAVPNNNNILDKYNEKVAKYTDLAIEVGWMWHAEKVEVVPIIVSSTGLIPRSLKDGLKKLSLHKNTFIDLQKAAILNTCHTVRKFLNM

SEQ ID NO: 9772 - protein, 1262 aa, Ophraella communa
MSSFKTKLPQVGRVLRSQSHTAGVPSMSAVCSTDSGGSSNSIITDTLTLRNRQVNRHGNTYNSCRVQVDDRRTCSKNDASSSSVSGMRSVTSSMATATTQEETITEDPPPVSAVSGVSQDGTSMTTKAGKPRKRMKWTTEMNSFIIRSYFRITKNETDLTTYRFALHRGFTQQYPEFQHVTEQRIADQRRTIIKNNLLPGPIMQQIRSEVLLELQTEIDHNVIQHTNDQLDNVRLDDHTGEDKPNIDQDENPNTDSNTQPDEHENAVTELSKAILEFDGSNPLHRPILPKLKSNRNTNGILALFNLLLKDRAKNCRTLEEIHTLIYCGAVAVIRSHNQQVRFSNQKSIEHHKQHKPWWQQRLEKSINDIRKELGQLTEFKNSIKPSRRLTNRVRKIFKKIKTHTGHPKYKEHLCSYMDLLRQKLKAKSKRLSRYVKCTKKKQQNHLFNNNEKLFYRQLSSAGGTNNNSNLPTKNEFTDYWSSIWSNPQKHNEGAAWIESEMDKSNIAPMMFDKITTAEVNQAIGETNSWKAPGIDNIQNFWYKKFDSLHELLASKFTHILQHPEDIPAFFTHGLTHMLPKTANTQDPSQYRPITCLPTLYKILTSCITNRIYRHVDQNNILAEEQKGCKRGHQGCKEQLIIDSVILKQAQKQSRNISTAFVDYRKAFDSVPHSWLISILKIYKVHPSIVKFLETSMKQWRTNLQFNINGQYLKTDEIAIRRGIFQGDSLSPLWFCLAMNPLSALLNNTKYGFNLKTNRNTNCTVSHLLYMDDIKIFAANQQQVQHLLDITERFSSDIHMEFGLDKCRTLNIEKGKIVNGDVALPNGDIIAAMQNGETYKYLGFQQARLLDQKQSKSKIKDQYTQRVSSLLKSELNAGNLNRAINIYAVPVLTYSFGILRWTKTELEDIQRTTRTMMTKYRYHHPISSVFRTTLPRKEGGRALCDIINLHNKQINKLRDFFITKSTSSNLHKFIVGADKNYSPLNLAGPDVDLEVTTDTEKHVKWAQKALHGRHHHDLNQPHIDKIASNRWLADGTLFPETEGFMMAIQDQVINTNNYKKFVIRDQTITSDKCRRCQQTSETIQHITSGCSTIANTDYLRRHNQLCNIIHQKLANKYGLLNTYTPYYKYNPQAVLENADFRLYYDRSIITDRQVTNNRPDIVVVDKKANSVLLVDVAVPNNNNMLDKYNEKIAKYTDLAIEVGQMWHAEKVEVVPIIVSSTGLIPKSLEDSLKKLDLHKNTFIDLQKAAILNTCHTVRKFLNM

SEQ ID NO: 9773 - protein, 1253 aa, Galerucella calmariensis
MSNCKTRLPQVGRAKCSESHTASVPSTSAVCSTDSGGSNNSIVNSKTLNLRNRQVNRHCNTLNSCRVQAGARRACSKNDESTSSSVSGRRSVTPSRATVTHTHEENNINPHPPASAVSGVTQVGTSTTTNAGKPRKRMKWTIELNSFIMRSYFKITKMETDMTTYRYALHRAFIEHFPEFQHLTEQRIADQRRSIVKNNLLPDPTLQQIRGEVLLDLQNEENDIITDHDTHEPENAQEDNNGVEKTNIDCDKTPDNDYNTELSKALAEFNGTNPIHRPKLPKLRTNRSTNSIIAAVNLLLQNHAKDCKALEQLHTLIYCGAVAVLRIHNQRIQFPGNNQSKDYKQLKPWWQRRLESSIDDIRRELGQLTEFKNNLKPSRRLTNRVRKIYRKIKTYTGHPQHEQHVFEYMDSLRQKLKAKSKRLSRYVKCTKRKQQNYLFNNNQKLFYRQLSGTVNNQNQSPPNKDELTEYWSSLWSKPVEHKSNAHWIRTEEEKINIEPMSFVDLTTSEVTEAIKSTSNWKTPGVDHVQNFWYKKFDSLHEAMATSFSHILQHPEDTPPFLTLGSTHLLPKTHQTHDPSLYRPITCLPTIYKILTACITNRIYRHVDQNNILSEEQKGCRRDHQGCKEQLIIDSVILKQAQKEKRNIHTAFVDYRKAFDSVPHSWLVKVLQIYKVHPTIVTFLESSMKHWRTNLHLQINGQYLQTDEISIRRGIFQGDSLSPLWFCLAMNPLSNLLNDTDYGYKLKANRNTSCTVSHLLYMDDIKIYASNQRQIQHLLNITEKFSSDIQMGFGLDKCKTLNIEKGKIVNGDVLLPNGNIITAMQNGETYKYLGFQQAKLLDQKQAKIKIRSQFTQRVTTLLKSQLNAGNLAKAINTYAIPILTYSFGILKWTKTELEDIQRTTRTMMTKHKCHHPTSSVIRTTLPRREGGRGLVDIVNLHNKQISRLQEFFIAKGETSELHEMVAKADKNYSPLNLVSPDLRLGIVTDSDKQVEWAQKALHGRHHHDLNQPHIDKEASNKWLSDGTLFPETEGFMMAIQDQVINTNNYKKFVMKDPNIATDKCRRCQQTTETIQHITSGCSALANIDYLRRHNQLCNIIHQKLANKFGLVNTYTPYYKYHPNSVLENADFRLYYDRSIITDRRVTNNRPDIVVVDKKANSVYLVDVAVPNNNNILDKYNEKIAKYTDLAIEVRQMWHAEKIEVVPIIVSSTGLIPKTLQDSLTKLGLHKNTYIDLQKAAILNTCHTVRKFLNM

SEQ ID NO: 9774 - protein, 1190 aa, Galerucella calmariensis
MSNCKTRLPQVGRAKCSESHTASVPSTSAVCSTDSGGSNNSIVNSGTLNLRNRQVNRHCNTLNFCRVQAGARRACSKNDESTSSSVSGRRSVTPSRATVTHTHEENNINPHPPASAVSGVTQVGTSTTTNAGKPRKRMKWTIELNSFIMRSYFKITKMETDMTTYRYALHRAFIEHFPEFQHLTEQRIADQRRSIVKNNLLPDPTLQQIRGEVLLDLQNEENDIITDHDTHEPENAQEDNNGVEKTNIDCDKTPDNDYNTELSKALAEFNGTNPIHRPKLPKLRTNKSTNSIIAAVNLLLQNHAKDCKALEQLHTLIYCGAVAVLRIHNQRIQFPGNNQSKDYKQLKPWWQRRLESSIDDIRRELGQLTEFKNNLKPSRRLTNRVRKIYRKIKTYTGHPQHEQHVFEYMDSLRQKLKAKSKRLSRYVKCTKRKQQNYLFNNNQKLFYRQLSGTINNQNQSPPNKDELTEYWSSLWSKPVEHKSNAHWIRTEEEKINIEPMSFVDLTTSEVTEAIKSTSNWKTPGVDHVQNFWYKKFDSLHEAMATSFSHILQHPEDTPPFLTLGSTHLLPKTHQTHDPSQYRPITCLPTIYKILTACITNRIYRHVDQNNILSEEQKGCRRDHQGCKEQLIIDSVILKQAQKEKRNIHTAFVDYRKAFDSVPHSWLVKVLQIYKVHPTVVTFLESAMKHWRTNLHLQINGQYLQTDEISIRRGIFQGDSLSPLWFCLAMNPLSNLLNDTDYGYKLKANRNTSCTVSHLLYMDDIKIYASNQRQIQHLLNITEKFSSDIQMGFGLDKCKTLNIEKGKIVNGDVLLPNGNIITAMQNGETYKYLGFQQAKLLDQKQAKIKIRSQFTQRVTTLLKSQLNAGNLAKAINTYAIPILTYSFGILKWTRTELEDIQRTTRTMMTKHKCHHPTSSVIRTTLPRREGGRGLVDIVNLHNKQISRLQEFFIAKGETSELHEMVAKADKNYSPLNLVSPDMRLEIVTDSDKQVEWAQKTLHGRHHHDLNQPHIDKEASNKWLSDGTLFPETEGFMTAIQDQVFNTNNYKKFVMKDPNIATDKCRRCQQTTETIQHITSGCSALANIDYLRRHNQLCNIIHQKLANKFGLVNTYTPYYKYHPNSVLENADFRLYYDRSIITDRRVTNNRPDIVVVDKKANSVYLVDVAVPNNNNIMDKYNEKIAKYTDLAI

SEQ ID NO: 9775 - protein, 845 aa, Ophraella communa
MDLLRQKLKAKSKRLSRYVKCTKKKQQNHLFNTNEKLFYRQLSSAGTNNYHNLPSKDELFDYWSSIWSNPQKHNEGAAWIESEADKSNIAPMMFDNITTADVNQAIGQINSWKAPGIDNIQNFWYKKFSSLHEVLASKFTQILQHPEDIPAFLTHGLTHMLPKTANTQDPSQYRPITCLPTLYKILTSCITNRIYRHVDQNNILAEEQKGCKRGHQGCKEQLIIDSVILRQAQKQCRNISTAFVDYRKAFDSVPHSWLISVLNIYKINPTIVSFLEASMKQWRTSLQVNINGQYIKTNDISIRRGIFQGDSLSPLWFCLAMNPLSTMLNNTKLGFNLKINKNTNCTISHLLYMDDIKIFASNQQQIQHLLDITERFSSDIHMEFGLDKCRTLNIEKGKIVNGDMALPSGDIIAAMQNGETYKYLGFQQARLLDQKQSKAKIRDEFSQRVSSLLKSELNAGNLNRAINTYAVPVLTYSFGILQWTKTELEDIQRTTQTMMTKYRCHHPTSSVLRTTLPRKEGGRALCDIINLHNKQINKLRDFFVTKSLSSNLHKSVIGADKKYSPLNLADPNMDLDITTDAEKQVKWAQKALHGRHHHDLNQPHIDKIASNRWLADGTLFPETEGFMMAIQDQVINTNNYKKFVIRDPTITTDKCRRCQQTSETIQHITSGCSTIANTDYLRRHNQLCNIIHQKLANKYGLLNTYTPYYKYNPQAVLENADFTLYYDRSIITDRQVTNNRPDIVVVDKKAKSVLLVDVAVPNNNNVLDKYNEKMAKYTDLAIEVGQMWHAEKVEVVPIIVSSTGLIPKSLEDSLKKLDLHKNTFIDLQKAAILNTCHTVRKFLNM

SEQ ID NO: 9776 - protein, 1176 aa, Ophraella communa
MRSVTSSMATATTQEETITEDPPPVSAVSGVSQDGTSMTTKAGKPRKRMKWTTEMNSFIIRSYFRITKNETDLTTYRFALHRGFTQQYPEFQHVTEQRIADQRRTIIKNNLLPGPIMQQIRSEVLLELQTEIDHNVIQHTNDQLDNVRLDDHTGEDKPNIDQDENPNTDSNTQPDEHENAVTELSKAILEFDGSNPLHRPILPKLKSNRNTNGILALFNLLLKDRAKNCRTLEEIHTLIYCGAVAVIRSHNQQVRFSNQKSIEHHKQHKPWWQQRLEKSINDIRKELGQLTEFKNSIKPSRRLTNRVRKIFKKIKTHTGHPKYKEHLCSYMDLLRQKLKAKSKRLSRYVKCTKKKQQNHLFNNNEKLFYRQLSSAGGTNNNSNLPTKNEFTDYWSSIWSNPQKHNEGAAWIESEMDKSNIAPMMFDKITTAEVNQAIGETNSWKAPGIDNIQNFWYKKFDSLHELLASKFTHILQHPEDIPAFFTHGLTHMLPKTANTQDPSQYRPITCLPTLYKILTSCITNRIYRHVDQNNILAEEQKGCKRGHQGCKEQLIIDSVILKQAQTQSRNISTAFVDYRKAFDSVPHSWLISILKIYKVHPSIVKFLETSMKQWRTNLQFNINGQYLKTDEIAIRRGIFQGDSLSPLWFCLAMNPLSALLNNTKYGFNLKTNRNTNCTVSHLLYMDDIKIFAANQQQVQHLLDITERFSSDIHMEFGLDKCRTLNIEKGKIVNGDVALPNGDIIAAMQNGETYKYLGFQQARLLDQKQSKSKIKDQYTQRVSSLLKSELNAGNLNRAINTYAVPVLTYSFGILRWTKTELEDIQRTTRTMMTKYRYHHPISSVFRTTLPRKEGGRALCDIINLHNKQINKLRDFFITKSTSSNLHKFIVGADKNYSPLNLAGPNVDLEVTTDTEKHVKWAQKALHGRHHHDLNQPHIDKIASNRWLADGTLFPETEGFMMAIQDQVINTNNYKKFVIRDQTITSDKCRRCQQTSETIQHITSGCSTIANTDYLRRHNQLCNIIHQKLANKYGLLNTYTPYYKYNPQAVLENADFRLYYDRSIITDRQVTNNRPDIVVVDKKANSVLLVDVAVPNNNNMLDKYNEKIAKYTDLAIEVGQMWHAEKVEVVPIIVSSTGLIPKSLEDSLKKLDLHKNTFIDLQKAAILNTCHTVRKFLNM

SEQ ID NO: 9777 - protein, 1116 aa, Galerucella calmariensis
MKWTIELNSFIMRSYFKITKMETDMTTYRYALHRAFTEHFPEFQHLTEQRIADQRRSIVKNNLLPDPTLQQIRGEVLLDLQNEENDIITDHDTHEPENAQEDNNGVEITNIDCDKTPDNDYNTELCKALAEFNGTNPIHRPKLPKLRTNKSTNSIIAAVNLLLQNHAKDCKALEQLHTLIYCGAVAVLRIHNQRIQFPENNQSKDYKQLKPWWQRRLESSIDDIRRELGQLTEFKNNLKPSRRLTNRVRKIYRKIKTYTGHPQHERHVFEYIDSLRQKLKAKSKRLSRYVKCTKRKQQNYLFNNNQKLFYRQLSGTESNQNQSPPNKDELTEYWSSLWSKPVEHKSNAHWIRTEEEKINIEPMSFVDLTTSEVTEAIKSTSNWKTPGVDHVQNFWYKKFDSLHEAMATSFSHILQHPEDTPPFLTLGSTHLLPKTHQTHDPSQYRPITCLPTIYKILTACITNRIYRHVDQNNILSEEQKGCRRDHQGCKEQLIIDSVILKQAQKEKRNIHTAFVDYRKAFDSVPHSWLVKVLQIYKVHPTVVTFLESAMKHWRTNLHLQINGQYLQTDEISIRRGIFQGDSLSPLWFCLAMNPLSNLLNDTDYGYKLKANRNTSCTVSHLLYMDDIKIYASNQRQIQHLLNITEKFSSDIRMGFGLDKCKTLNIEKGKIVNGDVLLPNGNIITAMQNGETYKYLGFQQAKLLDQKQAKIKIRSQFTQRVTTLLKSQLNAGNLAKAINTYAIPILTYSFGILKWKKTELEDIQRTTRTMMTKHKCHHPTSSVIRTTLPRREGGRGLVDIVNLHNKQISRLQEFFIAKAETSELHEMVAKADKNYSPLNLVSPDMRLEIVTDSDKQVEWAQKALHGRHHHDLNQPHIDKEASNKWLFDGTLFPETEGFMMAIQDQVINTNNYKKFVIKDPNIATDKCRRCQQTTETIQHITSGCSALANIDYLRRHNQLCNIIHQKLANKFGLVNTYTPYYKYHPNSVLENADFRLYYDRSIITDRRVTNNRPDIVVVDKKANSVYLVDVAVPNNNNIMDKYNEKIAKYTDLAIEVRQMWHAEKIEVVPIIVSSTGLIPKTLQDSLTKLGLHKNTYIDLQKAAILNTCHTVRKFLNM

SEQ ID NO: 9778 - protein, 1208 aa, Galerucella calmariensis
MSNCKTRLPQVGRAKCSESHTASVPSTSAVCSTDSGGSNNSIVNSGTLNLRNRQVHRHCNTLNSCRVQACARRACSKNDESTSSSVSGRRSVTPSRATVTHTHEENNINPHPPASAVSGVTQVGISTTTKAGKPRKRMKWTIELNSFIMRSYFKITKMETDMTTYRYALHRAFIEHFPEFQHLTEQRIADQRRSIVKNNLLPDPTLQQIRGEVLLDLQNEENDIITDHDTHEPENAQEDNNGVEITNIDCDKTPDNDYNTELCKALAEFNGTNPIHRPKLPKLRTNKSTNSIIAAVNLLLQNHAKDCKALEQLHTLIYCGAVAVLRIHNQRIQFPGNNQSKDYKQLKPWWQRRLESSIDDIRRELGQLTEFKNNLKPSRRLTNRVRKIYRKIKTYAGHPQHEQHVSEYMDSLRQKLKAKSKRLSRYVKCTKRKQQNYLFNNNQKLFYRQLSGTVNNQNQSPPNKDELTEYWSSLWSKPVEHKSNAHWIRTEEEKINIEPMSFVDLTTSEVTEAIKSTSNWKTPGVDHVQNFWYKKFDSLHEAMATSFSHILQHPEDTPPFLTLGSTHLLPKTHQTHDPSQYRPITCLPTIYKILTACITNRIYRHVDQNNILSEEQKGCRRDHQGCKEQLIIDSVILKQAQKEKRNIHTAFVDYRKAFDSVPHSWLVKVLQIYKVHPTVVTFLESAMKHWRTNLHLQINGQYLQTDEISIRRGIFQGDSLSPLWFCLAMNPLSNLLNDTDYGYKLKANRNTSCTVSHLLYMDDIKIYASNQRQIQHLLNITEKFSSDIQMGFGLDKCKTLNIEKGKIVNGDVLLPNGNIITAMQNGETYKYLGFQQAKLLDQKQAKIKIRSQFIQRVTTLLKSQLNAGNLAKAINTYAIPILTYSFGILKWTKTELEDIQRTTRTMMTKHKCHHPTSSVIRTTLPRREGGRGLVDIVNLHNKQISRLQEFFIAKGETSELHEMVAKADKNYSPLNLVSPDMRLEIVTDADKQVEWAQKALHGRHHHDLNQPHIDKEASNKWLSDGTLFPETEGFMTAIQDQVINTNNYKKFVMKDPNIATDKCRRCQQTTETIQHITSGCSALANIDYLRRHNQLCNIIHQKLANKFGLVNTYTPYYKYHPNSVLENADFRLYYDRSIITDRRVTNNRPDIVVVDKKANSVYLVDVAVPNNNNIMEKYNEKIAKYTDLAIEVKQMWHAEKIEVVPIIV

SEQ ID NO: 9779 - protein, 1259 aa, Ophraella communa
MSSFKTKLPQVGRVLRSQSHTAGVPGMSAVCSTDSGGSSNSIVTDTLTLRNRLVNRHGNTYNSCRVQVDDRRACSKNDASSSSVSGMRSVTPSMATATTEEENNTKSPPPVSAVSGVSQDGTSMTTKAGKPRKRMKWTTEMNSFIIRSYFKITKSETDLTTYRFALHRAFIEQYPEFQHVTEQRIADQRRTIIKNNLIPGPLIQQIRSEVLLELQTEDDHNVIQHTNDQLDNIRLDDHTSEDTPNMDQNENIDNDTQTDEHKNAVAELSKAIVEFDGTNPIQRPILPKLRSNKNTNRILALFNLLLNDRAKDCQTLEEIHTLIYCGAVAVLRSHNQQIRFPNKNCSEKKKQHKPWWQQRLEKSINDIRKELGQLTEFKTSTKPSRRLTNRVKKIFKKIKTNTEHPRHKEHLCSYMDLLRQKLKAKSKRLSRYVKCTKKKQQNHLFDNNEKLFYRQLSSVGTNSNDNLPSKHELTDYWSSIWSNPQKHNEGAEWIQSKKDKSNIAPMLFNNITTAEVNQAVGETNSWKAPGIDNIQNFWYKKFDSLHEIIASKFTHILQHPEDIPAFLTHGLTHMLAKTANTQDPSQYRPITCLPTLYKILTSCITNRIYRHVDQNNILAEEQKGCKRGHQGCKEQLVIDSVILRQAQKQCRNISTAFVDYRKAFDSVPHSWLLSVLNIYKVHPTIVTFLETSMKQWRTSLQVNINGQYIKTNEIVIRRGIFQGDSLSPLWFCLAMNPLSTMLNDTKYGFNLKTNRNTNCTVSHLLYMDDIKIFAANQQQIEHLLDITERFSSDIHMEFGLDKCRTLNIEKGKIVNGDVALPNGDIIAAMQHGETYKYLGFQQARLLDQKQSKSKIKDQYTQRVSSLLKSELNAGNLNRAINTYAVPVLTYSFGILRWTKTELEDIQRTTRTMMTKYRYHHPISSVFRTTLPRKEGGRALCDIINLHNKQINKLRDFFITKSTSSNLHKFIVGADKNYSPLNLAGPNVDLEVTTDAEKHVKWAQKALHGRHHHDLNQPHIDKIASNRWLADSTLFPETEGFMMAIQDQVINTNNYKKFVIRDQTITSDKCRRCQQTSETIQHITSGCSTIANTDYLRRHNQLCNIIHQKLANKYGLLNTYTPYYKYNPQAVLENADFRLYYDRSIITDRQVTNNRPDIVVVDKKANSVLLVDIAVPNNNNILDKYNEKIAKYTDLAIEVGQMWQAEKVEVVPIIVSSTGLIPKSLEDSLKKLDLHKNTFIDLQKAAILNTCHTVRKFLNV

SEQ ID NO: 9780 - protein, 845 aa, Ophraella communa
MDLLRQKLKAKSKRLSRYVKCTKKKQQNHLFNTNEKLFYRQLSSAGTNNYHNLPSKDELFDYWSSIWSNPQKHNEGAAWIESEADKSNIAPMMFDNITTADVNQAIGQINSWKAPGIDNIQNFWYKKFSSLHEVLASKFTHILQHPEDIPAFLTHGLTHMLPKTANTQDPSQYRPITCLPTLYKILTSCITNRIYRHVDQNNILAEEQKGCKRGHQGCKEQLVIDSVILRQAQKQCRNISTAFVDYRKAFDSVPHSWLISVLNIYKINPTIVSFLEASMKQWRTSLQVNINDQYIKTNDISIRRGIFQGDSLSPLWFCLAMNPLSTMLNDTKLGFNLKINKNTNCTISHLLYMDDIKIFASNQQQIQHLLDITERFSSDIHMEFGLDKCRTLNIEKGKIVNGDVALPSGDIIAAMQNGETYKYLGFQQARLLDQKQSKAKIRDEFSQRVSSLLKSELNAGNLNRAINTYAVPVLTYSFGILQWTKTELEDIQRTTRTMMTKYRCHHPTSSVLRTTLPRKEGGRALCDIINLHNKQINKLRDFFVTKSLSSNLHKSVIGADKKYSPLNLADPNMDLDITTDAEKQVKWAQKALHGRHHHDLNQPHIDKIASNRWLADGTLFPETEGFMMAIQDQVINTNNYKKFVIRDQTITSDKCRRCQQTSETIQHITSGCSTIANTDYLRRHNQLCNIIHQKLANKYGLLNTYTPYYKYNPQAVLENADFRLYYDRSIITDRQVTNNRPDIVVVDKKANSVLLVDVAVPNNNNILDKYNEKIAKYTDLAIEVGQMWHAEKVEVVPIIVSSTGLIPKSLEDSLKKLDLHKNTFIDLQKAAILNTCHTVRKFLNM

SEQ ID NO: 9781 - protein, 1092 aa, Galerucella calmariensis
MTTYRYALHRAFIEHFPEFQHLTEQRIADQRRSIVKNNLLPDPTLQQIRGEVLLDLQNEENDIITDHDTHEPENAQEDNNGVEITNIDCDKTPDNDYNTELCKALAEFNGTNPIHRPKLPKLRTNKSTNSIIAAVNLLLQNHAKDCKALEQLHTLIYCGAVAVLRIHNQRIQFPENNQSKDYKQLKPWWQRRLESSIDDIRRELGQLTEFKNNLKPSRRLTNRVRKVYRKIKTYTGHPQHERHVFEYIDSLRQKLKAKSKRLSRYVKCTKRKQQNYLFNNNQKLFYRQLSGTESNQNQSPPNKDELTEYWSSLWSKPVEHKSNAHWIRTEEEKINIEPMSFVDLTTSEVTEAIKSTSNWKTPGVDHVQNFWYKKFDSLHEAMATSFSHILQHPEDTPPFLTLGSTHLLPKTHQTHDPSQYRPITCLPTIYKILTACITNRIYRHVDQNNILSEEQKGCRRDHQGCKEQLIIDSVILKQAQKEKRNIHTAFVDYRKAFDSVPHSWLVKVLQIYKVHPTVVTFLESAMKHWRTNLHLQINGQYLQTDEISIRRGIFQGDSLSPLWFCLAMNPLSNLLNDTDYGYKLKANRNTSCTVSHLLYMDDIKIYASNQRQIQHLLNITEKFSSDIQMGFGLDKCKTLNIEKGKIFNGDVLLPNGNIITAMQNGETYKYLGFQQAKLLDQKQAKIKIRSQFTQRVTTLLKSQLNAGNLAKAINTYAIPILTYSFGILKWTKTELEDIQRTTRTMMTKHKCHHPTSSVIRTTLPRREGGRGLVDIVNLHNKQISRLQEFFIAKAETSELHEMVAKADKNYSPLNLVSPDMRLEIVTDSDKQVEWAQKALHGRHHHDLNQPHIDKEASNKWLSDGTLFPETEGFMMAIQDQVINTNNYRKFVIKDPNIATDKCRKCQQTTETIQHITSGCSALANIDYLRRHNQLCNIIHQKLANKFGLVNTYTPYYKYHPNSVLENADFRLYYDRSIITDRRVTNNRPDIVVVDKKANSVYLVDVAVPNNNNILDKYNEKIAKYTDLAIEVRQMWHAEKIEVVPIIVSSTGLIPKTLQDSLTKLGLHKNTYIDLQKAAILNTCHTVRKFLNM

SEQ ID NO: 9782 - protein, 1200 aa, Galerucella calmariensis
MSNCKTRLPQVGRAKCSESHTASVPSTSAVCSTDSGGSNNSIVNSGTLNLRNRQVNRHCNTLNSCRVQAGARRACSKNDESTSSSVSGRRSVTPSRATVTHTHEENNINPHPPASAVSGVTQVGISTTTKAGKPRKRMKWTIELYSFIMRSYFKITKMETDMTTYRYALHRAFIEHFPEFQHLTEQRIADQRRSIVKNNLLPDPTLQQIRGEVLLDLQNEENDIITDHDTHEPENAQEDNNGVEITNIDCDKTPDNDYNTELCKALAEFNGTNPIHRPKLPKLRTNKSTNRIIAAVNLLLQNHAKDCKALEQLHTLIYCGAVAVLRIHNQRIQFPGNNQSKDYKQLKPWWQCRLESSIDDIRRELGQLTEFKNNLKPSRRLTNRVRKIYRKIKTYTGHPQHERHVFEYIDSLRQKLKAKSKRLSRYVKCTKRKQQNYLFNNNQKIFYRQLSGTENNQNQSPPNKDELTEYWSSLWSKPVEHKSNAHWIRTEEEKINIEPMSFVDLTTSEVTEAIKSTSNWKTPGVDHVQNFWYKKFDSLHEAMATSFSHILQHPEDTPPFLTLGSTHLLPKTHQTHDPSLYRPITCLPTIYKILTACITNRIYRHVDQNNILSEEQKGCRRDHQGCKEQLIIDSVILKQAQKEKRNIHTAFVDYRKAFDSVPHSWLVKVLQIYKVHPTIVTFLESSMKHWRTNLHLQINGQYLQTDEISIRRGIFQGDSLSPLWFCLAMNPLSNLLKDTDYGYKLKANRNTSCTVSHLLYMDDIKIYASNQRQIQHLLNITEKFSSDIQMGFGLDKCKTLNIEKGKIVNGDVLLPNGNIITAMQNGETYKYLGFQQAKLLDQKQAKIKIRSQFTQRVTTLLKSQLNAGNLAKAINTYAIPILTYSFGILKWTKTELEDIQRTTRTMMTKHKCHHPTSSVIRTTLPRREGGRGLVDIVNLHNKQISRLQEFFIAKAETSELHEMVAKADKNYSPLNLVSPDMRLGIVTDSDKQVEWAQKALHGRHHHDLNQPHIDKEASNKWLSDGTLFPETEGFMMAIQDQVINTNNYKKFVMKDPNIATDKCRRCQQTTETIQHITSGCSALANIDYLRRHNQLCNIIHQKLANKFGLVNTYTPYYKYHPNSVLENADFRLYYDRSIITDRRVTNNRPDIVVVDKKANSVYLVDVAVPNNNNILDKYKEKIAKYTDLAIEVRQMWHAEK

SEQ ID NO: 9783 - protein, 1261 aa, Ophraella communa
MSNFKTILPQVGRALRSQSHTAGVPGMSTVCSTDSGGSNNSIVTDTLSLRNRQVNRHCNTYNSCRVQVDDRRACSKNDASSSSVSGMRSVTPSMATAITQEENITDSPPPVSAVSGVSQDGTSMTTKAGKPRKRMKWTTEMNSFIIRSYFKITKIETDLTTYRYALHRAFIEQYPEFQHVTEQRIADQRRTIIKNNLLPGPLLQQIRSEVLLELQTEIDHNVIQHTNDQLDNVRLDDHTGEDTPNIDQDENPNTDSNTQPDEHEDAVTELSKAILEFDGSNPLHRPILPKLKSNKNTNRIIAVINSLLKDRAKDYRTLEEIHTLIYCGAVAVVRSHNQQVRFPNRKCTEKQKPYKPWWQQRLEKSINDIRKELGQLTEFNNNAKPSRRLTNRVKKIFKKIKTNTGHPRYKEHLCSYMDLLRQKLKAKSKRLARYVKCTKKKQQNHLFNTNEKLFYRQLSSAGTNNYHNLPSKDELFDYWSSIWSNPQKHNEGAAWIESEAGKSNIAPMMFDNITTADVNQAIGQINSWKAPGIDNIQNFWYKKFSSLHEVLASKFTHILQHPEDIPAFLTHGLTHMLPKTANTQDPSQYRPITCLPTLYKILTSCITNRIYRHVDQNNILAEEQKGCKRGHQGCKEQLIIDSVILRQAQKQCRNISTAFVDYRKAFDSVPHSWLISVLNIYKINPTIVSFLEASMKQWRTSLQVNINGQYIKTNDISIRRGIFQGDSLSPLWFCLAMNPLSTMLNNTKLGFNLKINKNTNCTVSHLLYMDDIKIFASNQQQIQHLLDVTERFSRDVRMQFGLDKCRTLNIEKGKIINGDLALPNGEIIAAMQNGETYKYLGFQQARLLDQKQSKSKIRNEFSQRVSSILKSELNAGNLNRAINTYAVPVLTYSFGILQWTKTELEDIQRTTRTMMTKYRCHHPTSSVLRTTLPRKEGGRALCDIINLHNKQINKLRDFFVTKSLSSNLHKSVIGADKKYSPLNLADPNMDLEITTDAEKHVKWAQKALHGRHHHDLNQPHIDKIASNRWLADGTLFPETEGFMMAIQDQVINTNNYKKCVIRDPTITTDKCRRCQQTSETIQHITSGCSTIANTDYLRRHNQLCNIIHQKLANKYGLLNTYTPYYKYNPQAVLENADFRLYYDRSIITDRQVTNNRPDIVVVDKKAKSVLLVDVAVPNNNNVLDKYNEKMAKYTDLAIEVGQMWHAEKVEVVPIIVSSTGLIPKSLEDSLKKLDLHKNTFIDLQKAAILNTCHTVRKFLNM

SEQ ID NO: 9784 - protein, 845 aa, Galerucella calmariensis
MDSLRQKLKAKSKRLSRYVKCTKRKQQNYLFNNNQKLFYRQLSGTVNNQNQSPPNKDELTEYWSSLWSKPVEHKSNAHWIRTEEEKINIEPMSFVDLTTSEVTEAIKSTSNWKTPGVDHVQNFWYKKFDSLHEAMATSFSHILQHPEDTPPFLTLGSTHLLPKTHQTHDPSQYRPITCLPTIYKILTACITNRIYRHVDQNNILSEEQKGCRRDHQGCKEQLIIDSVILKQAQKEKRNIHTAFVDYRKAFDSVPHSWLVKVLQIYKVHPTVVTFLESAMKHWRTNLHLQINGQYLQTDEISIRRGIFQGDSLSPLWFCLAMNPLSNLLNDTDYGYKLKANRNTSCTVSHLLYMDDIKIYASNQRQIQHLLNITEKFSSDIQMGFGLDKCKTLNIEKGKIVNGDVLLLNGNIITAMQNGETYKYLGFQQAKLLDQKQAKIKIRSQFTQRVTTLLKSQLNAGNLAKAINTYAIPILTYSFGILKWTKTELEDIQRTTRTMMTKHKCHHPTSSVIRTTLPRREGGRGLVDIVNLHNKQISRLQEFFIAKGETSELHEMVAKADKNYSPLNLVSPDMRLEIVTDSDKQVEWAQKALHGRHHHDLNQPHIDKEASNKWLSDGTLFPETEGFMTAIQDQVINTNNYKKFVMKDPNIATDKCRRCQQTTETIQHITSGCSALANIDYLRRHNQLCNIIHQKLANKFGLVNTYTPYYKYHPNSVLENADFRLYYDRSIITDRRVTNNRPDIVVVDKKANSVYLVDVAVPNNSNILDKYNEKIAKYTDLAIEVRQMWHAEKIEVVPIIVSSTGLIPKTLQDSLTKLGLHKNTYIDLQKAAILNTCHTVRKFLNM

SEQ ID NO: 9785 - protein, 845 aa, Galerucella calmariensis
MDLLRQKLKAKSKRLSRYVKCTERKQQNYLFNNNQKLFYRQLSGTVNNQNQSPPNKDELTEYWSSLWSKPVEHKSNAHWIRTEEEKINIEPMPFVNLTTTEVTEAIKSTSNWKTPGVDHVQNFWYKKFDSLHEAMATSFSHILQHPEDTPPFLTLGSTHLLPKTHQTHDPSQYRPITCLPTIYKILTACINNRIYRHVDQNNILSEEQKGCRRDHQGCKEQLIIDSVILKQAQKEKRNIHTAFVDYRKAFDSVPHSWLVKVLQIYKVHPTIVTFLESSMKHWRTNLHLQINGQYLQTDEISIRRGIFQGDSLSPLWFCLAMNPLSNLLNDTDYGYKLKANRNTSCTVSHLLYMDDIKIYASNQRQIQHLLNITEKFSSDIQMGFGLDKCKTLNIEKGKIVNGDVLLPNGNIITAMQNGETYKYLGFQQAKLLDQKQAKIKIRSQFTQRVTTLLKSQLNARNLAKAINTHAIPILTYSFGILKWTKTELEDIQRTTRTMMTKHKCHHPTSSVIRTTLPRREGGRGLVDIVNLHNKQISSLQEFFIAKAETSELHEMVAKADKNYSPLNLVSPDMRLGIVTDSDKQVEWAQKALHGRHHHDLNQPHIDKEASNKWLSDGTLFPETEGFMMAIQDQVINTNNYKKFVMKDPNIATDKCRRCQQTTETIQHITSGCSALANIDYLRRHNQLCNIIHQKLANKFGLVNTYTPYYKYHPNSVLENADFRLYYDRSIITDRRVTNNRPDIVVVDKKANSVYLVDVAVPNNNNILDKYNEKIAKYTDLAIEVRQMWHAEKIEVVPIIVSSTGLIPKTLQDSLTKLGLHKNTYIDLQKAAILNTCHTVRKFLNM

SEQ ID NO: 9786 - protein, 1175 aa, Ophraella communa
MRSVTSSMATAITQEENITDSPPPVSAVSGVSQDGTSMTTKAGKPRKRMKWTTEMNSFIIRSYFKITKIETDLTTYRYALHRAFIEQYPEFQHVTEQRIADQRRTIIKNNLLPGPLLQQIRSEVLLELQTEIDHNVIQHTNDQLDNVRLDDHTGEDTPNIDQDENPNTDSNTQPDEHEDAVTELSKAILEFDGSNPLHRPILPKLKSNKNTNRIIAVINSLLKDRAKDYRTLEEIHTLIYCGAVAVVRSHNQQVRFPNRKCTEKQKPYKPWWQQRLEKSINDIRKELGQLTEFNNNAKSSRRLTNRVKKIFKKIKTNTGHPRYKEHLCSYMDLLRQKLKAKSKRLARYVKCTKKKQQNHLFNTNEKLFYRQLSSAGTNHYHNLPSKDELFDYWSSIWSYPQKHNEGAAWIESEAGKSSIAPMMFDNITTADVNQAIGQINSWKAPGIDNIQNFWYKKFSSLHEVLASKFTHILQHPEDIPAFLTHGLTHMLPKTANTQDPSQYRPITCLPTLYKILTSCITNRIYRHVDQNNILTEEQKGCKRGHQGCKEQLIIDSVILRQAQKQCRNISTAFVDYRKAFDSVPHSWLISVLNIYKINPTIVSFLEASMKQWRTSLQVNINGQYIKTNDISIRKGIFQGDSLSPLWFCLAMNPLSTMLNNTKLGFNLKINKNTNCTVSHLLYMDDIKIFASNQQQIQHLLDVTERFSRDVRMQFGLEKCRTLNIEKGKIINGDLALPNGEIIGAMQNGETYKYLGFQQARLLDQKQSKSKIRNEFSQRVSSILKSELNAGNLNRAINTYAVPVLTYSFGILQWTKTELEDIQRTTRTMMTNYRCHHPTSSVLRTTLPRKEGGRALCDIINLHNKQINKLRDFFVTKSLSSKLHKSVIGADKKYSPLNLADPNMDLEITTDAEKQVKWAQKALHGRHHHDLNQSHIDKIASNRWLADGTLFAETEGFMMAIQDQVISTNNYKKFVIRDPTIISDKCRRCQQTSETIQHITSGCSTIANTDYLRRHNQLCNIIHQKLANKYGLLNTYTPYYKYNPQAVLENADFRLYYDRSIITDRQVTNNRPDIVVVDKKAKSVLLVDVAVPNNNNVLDKYNEKMAKYTDLAIEVGQMWHAEKVEVVPIIVSSTGLIPKSLEDSLKKLDLHKNTFIDLQKAAILNTCHTVRKFLNM

SEQ ID NO: 9787 - protein, 1258 aa, Ophraella communa
MSNFKTILPQVGRALRSQSHTAGVPGMSTVCSTDSGGSNNSIVTDTLSLRNRQVNRHCNTYNSCRVQVDDRRACSKNDASSSSVSGMRSVTPSMATAITQEENITDSPPPVSGVSQDGTSMTTKAGKPRKRMKWTTEMNSFIIRSYFKITKIETDLTTYRYALHRAFIEQYPEFQHVTEQRIADQRRTIIKNNLLPGPLLQQIRSEVLLELQTEIDHNVIQHTNDQLDNVRLDDHTGEDTPNIDQDENPNTDSNTQPDEHEDAVTELSKAILEFDGSNPLHRPILPKLKSNKNTNTIIAVINSLLKDRAKDYRTLEEIHTLIYCGAVAVVRSHNQQVRFPNRKCTEKQKPYKPWWQQRLEKSINDIRKELGQLTEFNNNAKPSRRLTNRVKKIFKKIKTNTGHPRYKEHLCSYMDLLRQKLKAKSKRLARYVKCTKKKQQNHLFNTNEKLFYRQISSAGTNNYHNLPSKDELFDYWSSIWSNPQKHNEGTAWIESEAGKSNIAPMMFDNITTADVNQAIRQINSWKAPGIDNIQNFWYKKFSSLHEVLASKFTHILQHPEDIPAFLTHGLTHMLPKTANTQDPSQYRPITCLPTLYKILTSCITNRIYRHVDQNNILAEEQKGCKRGHQGCKEQLIIDSVILRQAQKQCRNISTAFVDYRKAFDSVPHSWLISVLNIYKINPTIVSFLEASMKQWRTSLQVNINGQYIKTNDISIRRGIFQGDSLSPLWFCLAMNPLSTMLNNTKLGFNLKINKNTNCTVSHLLYMDDIKIFASNQQQIQHLLDVTERFSRDVRMQFGLDKCRTLNIEKGKIINGDLALPNGEIIAAMQNGETYKYLGFQQARLLDQKQSKSKIRNEFSQRVSSILKSELNAGNLNRAINTYAVPVLTYSFGILQWTKTELEDIQRTTRTMMTKYRCHHPTSSVLRTTLPRKEGGRALCDIINLHNKQINKLRDFFVTKSLSSNLHKSVIGADKKYSPLNLADPNMDLEITTDAEKYVKWAQKALHGRHHHDLNQPHIDKIASNRWLADGTLFPETEGFMMAIQDQVINTNNYKKCVIRDPTITTDKCRRCQQTSETIQHITSGCSTIANTHYLRRHNQLCNIIHQKLANKYGLLNTYTPYYKYNPQAVLENADFTLYYDRSIITDRQVTNNRPDIVVVDKKAKSVLLVDVAVPNNNNVLDKYNEKMAKYTDLAIEVGQMWHAEKVEVVPIIVSSTGLIPKSLGDSLKKLDLHKNTFIDLQKAAILNTCHTVRKFLNM

SEQ ID NO: 9788 - protein, 1253 aa, Galerucella calmariensis
MSNCKTRLPQVGRAKCSESHTASVPSTSAVCSTDSGGSNNSIVNSGTLNLRNRQVNRHCNTLNSCRVQAGARRACSKNDESTSSSVSGRRSVTPSRATVTHTHEENNINPHPPASAVSGVTQVGTSTTTNAGKPRKRMKWTIELNSFIMRSYFKITKMETDMTTYRYALHRAFIEHFPEFQHLTEQRIADQRRSIVKNNLLPDPTLQQIRGEVLLDLQNEENDIITDHDTHEPENAQEDNNGVEKTNIDCDKTPDNDYNTELSKALAEFDGTNPIHRPKLPKLRTNKSTNSIIAAVNLLLQNHAKDCKALEQLHTLIYCGAVAVLRIHNQRIQFPGNNQSKDYKQLKPWWQRRLESSIDDIRRELGQLTEFKNNLKPSRRLTNRVRKIYRKIKTYTGHPQHEQHVFEYMDSLRQKLKAKSKRLSRYVKCTKRKQQNYLFNNNQKLFYRQLSGTVNNQNQSPPNKDELTEYWSSLWSKPVEHKSNAHWIRTEEEKINIEPMSFVDLTTSEVTEAIKSTSNWKTPGVDHVQNFWYKKFDSLHEAMATSFSHILQHPEDTPPFLTLGSTHLLPKTHQTHDPSQYRPITCLPTIYKILTACITNRIYRHVDQNNILSEEQKGCRRDHQGCKEQLIIDSVILKQAQKEKRNIHTAFVDYTKAFDSVPHSWLVKVLQIYKVHPTVVTFLESAMKHWRTNLHLQINGQYLQTDEISIRRGIFQGDSLSPLWFCLAMNPLSNLLNDTDYGYKLKANRNTSCTVSHLLYMDDIKIYASNQRQIQHLLNITEKFSSDIQMGFGLDKCKTLNIEKGKIVNGDVLLPNGNIITAMQNGETYKYLGFQQAKLLDQKQAKIKIRSQFTQRVTTLLKSQLNAGNLAKAINTYAIPILTYSFGILKWTRTELEDIQRTTRTMMTKHKCHHPTSSVIRTTLPRREGGRGLVDIVNLHNKQISRLQEFFIAKGETSELHEMVAKADKNYSPLNLVSPDMRLEIVTDSDKQVEWAQKALHGRHHHDLNQPHIDKEASNKWLSDGTLFPETEGFMMAIQDQVINTNNYKKFVMKDPNIATDKCRRCQQTTETIQHITSGCSALANIDYLRRHNQLCNIIHQKLANKFGLVNTYTPYYKYHPNSVLENADFRLYYDRSIITDRRVTNNRPDIVVVDKKANSVYLVDVAVPNNNNILDKYNEKIAKYTDLAIEVRQMWHAEKIEVVPIIVSSTGLIPKTLQDSLTKLGLHKNTYIDLQKAAILNTCHTVRKFLNM

SEQ ID NO: 9789 - protein, 946 aa, Ophraella communa
MQKIIIIILIYCGAVAVLRSHNQQIRFTNKNCSEKKKQHKPWWQQRLEKSINDIRKELGQLTEFKTSTKPSRRLTNRVKKIFKKIKTNTEHPRHKEHLCSYMDLLRQKLKAKSKRLSRYVKCTKKKQQNHLFDNNEKLFYRQRSSVGTSSNDNLPSKHELTDYWSSIWSNPQKHNEGAEWIQSERDKSNIAPMLFNNITTAEVNQAVGETNSWKAPGIDNIQNFWYKKFDSLHEIIASKFTHILQHPEDIPAFLTHGLTHMLPKTANTQDPSQYRPITCLPTLYKILTSCITNRIYRHVDQNNILAEEQKGCKRGHQGCKEQLVIDSVILRQAQKQCRNISTAFVDYRKAFDSVPHSWLLSVLNIYKVHPTIVTFLETSMKQWRTSLQVNINGQYIKTNEIVIRRGIFQGDSLSPLWFCLAMNPLSTMLNDTKYGFNLKTNRNTNCTVSHLLYMDDIKIFAANQQQIEHLLDITKRFSSDIHMEFGLDKCRTLNIEKGKIVNGDVALPNGDIIAAMQNGETYKYLGFQQARLLDQKQSKSKIKDQYTQRVSSLLKSELNAGNLNRAINTYAVPVLTYSFGILRWTKTELEDIQRTTRTMMTKYRYHHPISSVFRTTLPRKEGGRALCDIINLHNKQINKLRDFFITKSTSSNLHKFIVGADKNYSPLNLAGPNVDLEVTTDAEKHVKWAQKALHGRHHHDLNQPHIDKIASNRWLADGTLFPETEGFMMAIQDQVINTNNYKKFVIRDQTITSDKCRRCQQTSETIQHITSGCSTIANTDYLRRHNQLCNIIHQKLANKYGLLNTYTPYYKYNPQAVLENADFRLYYDRSIITDRQVTNNRPDIVVVDKKANSVLLVDVAVPNNNNILDKYNEKIAKYTDLAIEVGQMWHAEKVEVVPIIVSSTGLIPKSLEDSLKKLDLHKNTFIDLQKAAILNTCHTVRKFLNM

SEQ ID NO: 9790 - protein, 754 aa, Galerucella calmariensis
MSFVDLTTSEVTEAIKSTSNWKTPGVDHVQNFWYKKFDSLHEAMATSFSHILQHPEDTPPFLTLGSTHLLPKTHQTHDPSQYRPITCLPTIYKILTACITNRIYRHVDQNNILSEEQKGCRRDHQGCKEQLIIDSVILKQAQKEKRNIHTAFVDYRKAFDSVPHSWLVKVLQIYKVHPTVVTFLESAMKHWRTNLHLQINGQYLQTDEISIRRGIFQGDSLSPLWFCLAMNPLSNLLNDTDYGYKLKANRNTSCAVSHLLYMDDIKIYASNQRQIQHLLNITEKFSSDIQMGFGLDKCKTLNIEKGKIVNGDVLLPNGNIITAMQNGETYKYLGFQQAKLLDQKQAKIKIRSQFTQRVTTLLKSQLNAGNLAKAINTYAIPILTYSFGILKWTRTELEDIQRTTRTMMTKHKCHHPTSSVIRTTLPRREGGRGLVDIVNLHNKQISRLQEFFIAKAETSELHEMVAKADKNYSPLNLVSPDMRLEIVTDSDKQVEWAQKALHGRHHHDLNQPHIDKEASNKWLSDGTLFPETEGFMMAIQDQVINTNNYKKFVIKDPNIATDKCRRCQQTTETIQHITSGCSALANIDYLRRHNQLCNIIHQKLANKCGLINTYTPYYKYHPNSVLENADFRLYYDRSIITDRRVTNNRPDIVVVDKKANSVYLVDVAVPNNNNILDKYNEKIAKYTDLAIEVRQMWHAEKIEVVPIIVSSTGLIPKTLQDSLTKLGLHKNTYIDLQKAAILNTCHTVRKFLNM

SEQ ID NO: 9791 - protein, 1120 aa, Ophraella communa
MNSFIIRSYFKITKIETDLTTYRFALHRAFIEQYPEFQHVTEQRIADQRRTIIKNNLLPGPLLQQIRSEVLLELQTEDDHNVIQHTNDQLDNIRLDDYTSDDTPNIDQDENPNRDSNTQPDEHENAAAELSKAILEFDGSNPIHRPLLPKLKSNKNTNRILASINSLLKDRAKDYRTLEEIHTLIYCGAVTVLRCYNQQVRFPNKKCTEKQKLYKPWWQQRLEKSINDIRKELGQLTEFNNNAKPSRRLTNRVKKILKKIKTNTGHPRYKEHLCSYMDLLGQKLKAKSKRMARYVKCTKKKQQNHLFNTKEKLFYRQLSAGTNNYRNLPSKDDLTDYWSSIWSNSQKHNKGAAWIESEKDKLNIAPMLFNNITTAEVNQAVGETNSWKAPGINNIQNFWYKKFDSLHEVMASKFTHILQHPEDIPAFLTHGLTHMLPKIANTQDPSQYRPITCLPTLYKILNSCITNRIYRHVDQNNILAEEQKRCKRGHQGCKEQLVIDSVILRQAQKQCRNISTAFVDYRKAFDSVPHSWLIRVLNIYKVHPTIVTFLEASMKQWRTNLQLNINGQHFKTDEIAFRRGIFQGDSLSPLWFCLAMNPLSHMLNDSKYGFNLKTNRNTNCTVSHLLYMDDIKIFASNQQHIQHLLDITERFSSDIHMEFGLDKCRTLNIEKGKIVNGDVALPNGDIIAAMQNGETYKYLGFQQARLLDQKQSKAKIRDEFSQRVSSLLKSELNAGNLNRAINTYAVPVLNYCFGILQWTKTELEDIQRTTRTMMTKYRCHHPTSSVLRTTLLRKEGGRALCDIVNLHNKQINRLRDFFITKSLSSNLHKSVIGADKKYSPLNLADPHMDLEIITDAEKQVKWAQKALHGRHHHDLNQPHIDKIASNRWLADGALFPETEGFIIAIQDRVINTKNYKKFVIRDPTITTDKCRRCQQTSETIQHITSGSSTIANTDYLRRHNQLCNIIHQKLANKYGLLNTYTPYYKYNPQAVLENADFRLYYDRSIITDRQVTNNRPDIVVVDKKANSVLLVDVAVPNNNNILDKYNEKLAKYTDLAIEVGQMWHVEKVKVVPIIVSSTGLILKSLEDSLKKLDLHKNTFIDLQKAAILNTCHTIRKFLNM

SEQ ID NO: 9792 - protein, 1261 aa, Ophraella communa
MSNFKTILPQVGRALRSQSHTAGVPGMSAVCSTDSGGSNNSIVTDTLSLRNRQVNRHCNTYNSCRVQVDDRRACSKNDASSSSVSGMRSVTPSMATATTQEENNTKSPPPVSVVSGVSQDGTSMTTKAGKPRKRMKWTTEMNSFIIRSYFKITKIETDLTTYRFALHRAFIEQYPEFEHVTEQRIADQRRTIIKNNLLPGPLLQQIRSEVLLELQTEDDHNVIQHTNDQLDNIRLDDYTGDDTPNIDQDENPNRDSNTQPDEHENIAAELSKAILEFDGSNPIHRPLLPKLKSNKNTNRILASINSLLKDRAKDYRTLEEIHTLIYCGAVTVLRCHNQQVRFPNKKCTEKQKTYKPWWQQRLEKSINDIRKELGQLTEFKNNAKPSRRLTNRVKKILKKIKTNTGHPRYKEHLCSYMDLLRQKLKAKSKRLSRYVKCTKKKQQNHLFNTNEKLFYRQLSSAGTNNYHNLPSKDDLTDYWSSIWSNPQKHNEGAAWIESETDKLNIAPMLFNNITTAEVNQAVGETNSWKAPGIDNIQNFWYKKFDSLHEVMASKFTHILQHPEDIPAFLTHGLTHMLPKTANTQDPSQYRPITCLPTLYKILTSCITNRIYRHVDQNNILAEEQKGCKRGHQGCKEQLIIDSVILRQAQKQCRNISTAFVDYRKAFDSVPHSWLIRVLNIYKVHPTIVTFLEASMKQWRTNLQLNINGLHFKTDEIAIRRGIFQGDSLSPLWFCLAMNPLSHMLNDTRYGFNLKTNRNTNCTVSHLLYMDDIKIFASNQQQIQHLLDITERFSSDIRMKFGLDKCRTLNIEKGKIVNGDVALPNGDIIAAMQNGETYKYLGFQQARLLDQKQSKSKIKDQYTQRVCSLLKSELNAGNLNRAINTYAVPVLTYSFGILRWTKTELEDIQRTTRTMMNKYRYHHPTSSVLRTTLPRKEGGRALCDIINLHNKQINKLRDFFITKSTSSNLHKFIVRADKNYSSLNLAGPNVDLEITTDAEKHVKWAQKALHGRHHHDLNQPHIDKLASNRWLADGTLFPETEGFMMAIQDQVINTNNYKKFVIRDPTITSDKCRRCQQTSETIQHITSGCSTIANTDYLRRHNQLCNIIHQKLANKYGLLNTYTPYYKYNPQAVLENADFRLYYDRSIITDRQVTNNRPDIVVVDKKANSVLLVDVAVPNNNNILDKYNEKIAKYTDLAIEVGQMWHAEKVEVVPIIVSSTGLIPRSLEDSLKKLSLHKNTFIDLQKAAILNTCHTVRKFLNV

SEQ ID NO: 9793 - protein, 1253 aa, Galerucella calmariensis
MSNCKTRLPQVGRAKCSESHTASVPSTSAVCSTDSGGSNNSIVNSGTLNLRNRQVNRHCNTLNSCRVQAGARRACSKNDESTSSSVSGRRSVTPSRATVTHTLEENNINPHPPASAVSGVTQVGTSTTTKAGKPRKRMKWTIELNSFIMRSYFKITKMETDMTTYRYALHCAFIEHFPEFQHLTEQRIADQRRSIVKNNLLPDPTLQQIRGEVLLDLQNEENDILTDHDTHEPENAQEDNNGVEKTNIDCDRTPDNDYNTELCKALAEFNGTNPIHRPKLPKLRTNKSTNSIIAAVNLLLQNHAKDCKALEQLHTLIYCGAVVVLRIHNQRIQFPENNQSKDYKQLKPWWQRRLESSIDDIRRELGQLTEFKNNLKPSRRLTNRVRKIYRKIKTYAGHPQHEQHVSEYMDLLRQKLKAKSKRLSRYVKCTKRKQQNYLFNNNQKLFYRQLSGTVNNQNQSPPNKDELTEYWSSLWSKPVEHKSNAHWIRTEEEKINIEPMPFVNLTTTEVTEAIKSTSNWKTPGVDHVQNFWYKKFDSLHEAMATSFSHILQHPEDTPPFLTLGSTHLLPKTHQTHDPSQYRPITCLPTMYKILTACITNRIYRHVDQNNILSEEQKGCRRDHQGCKEQLIIDSVILKQAQKEKRNIHTAFVDYRKAFDSVPHSWLVKVLQIYKVHPTIVTFLESSMKHWRTNLHLQINGQYLQTDEISIRRGIFQGDSLSPLWFCLAMNPLSNLLNDTDYGYKLKANRNTSCTVSHLLYMDDIKIYASNQRQIQHLLNITEKFSSDIQMGFGLDKCKTLNIEKGKIVNGDVLLPNGNIITAMQNGETYKYLGFQQAKLLDQKQAKIKIRSQFTQRVTTLLKSQLNAGNLAKAINTYAIPILTYSFGILKWTKTELEDIQRTTRTMMTKHKCHHPTSSVIRTTLPRREGGRGLVDIVNLHNKQISRLQEFFIAKAETSELHEMVAKADKNYSPLNLVSPDMRLGIVTDSDKQVEWAQKALHGRHHHDLNQPHIDKEASNKWLSDGILFPETEGFMMAIQDQVINTNNYKKFVMKDPNIATDKCRRCQQTTETIQHITSGCSVLANIDYLRRHNQLCNIIHQKLANKFGLVNTYTPYYKYHPNSVLENADFRLYYDRSIITDRRVTNNRPDIVVVDKKANSVYLVDVAVPNNNNILDKYNEKIAKYTDLAIEVRQMWHADKIEVVPIIVSSTGLIPKTLQDSLTKLGLHKNTYIDLQKAAILNTCHTVRKFLNM

SEQ ID NO: 9794 - protein, 1261 aa, Ophraella communa
MSSFKTELPQVGRVLRSQSHTAGVPGMSAVCSTDSGGSNNSIVTDTLSLRNRQVNRHCNTYNSCRVQVDDRRACSKNDSSSSSVSGMRSVTPSMATATTQEENNTKSPQTVSAVSGVSQDGTSMTTKAGKPRKRMKWTTEMNSFIIRSYFKITKIETDLTTYRFALHRAFIEQYPEFQHVTEQRIADQRRTILKNNLLPGPLMQQIRSEVLLELQIEDNHNLIQHTNDQLDNVRLDDHTSDDTPNIDQDENPNTDSNTQPDEHENAVAELSKAILEFDGSSPTHRPILPKLKTNKNTNRILAVINLLLNDRAKNYRTLEEIHTLIYCGAVAVLRCHNQQVRVPNKKYTEKQKSYKPWWQQRLEKSINDIRKELGQLTEFNNNAKPSRRLINRVKKILKKIKTNTGHPRYKEHLCSYMDLLRQKLKAKSKRLSRYVKCTKKKQQNHLFNTNEKLFYRQLSSAGTNNYHNLPSKDELTDYWSSIWSNPQNHNEGAAWIESETDKSNIAAMVFDNITTAEVNQAVGETNSWKAPGIDNIQNFWYKKFDSLHEVMASKFTHILQHPEDIPAFLTHGLTHMLPKTANTQDPSQYRPITCLPTLYKILTSCITNRIYRHVDQNNILAEEQKGCKRGHQGCKEQLVIDSVILRQAQKQCRNISTAFVDYRKAFDSVPHSWLIRVLNIYKVHPTIVTFLEASMKQWKTNLQLNINGQHFKTDEIAIRRGIFQGDSLSPLWFCLAMNPLSHMLNDTKYGFNLKTNKNTNCTVSHLLYMDDIKIFASNQQQIQHLLDITERFSSDIRMEFGLDKCRTLNIEKGKIVNGDVALPNGDIIAAMQNGETYKYLGFQQARLLDQKQSKSKIKDQYTQRVCLLLKSELNAGNLNRAINTYAVPVLTYSFGILRWTKTELEDIQRTTRTMMTKYRYHHPTSSVLRTTLPRKEGGRALCDIINLHNKQINKLRDFFITKSTSSNLHKFIVGADKNYSPLNLAGPNVDLEITTDADKHVKWAQKALHGRHHHDLNQPHIDKLASNRWLADGTLFPETEGFMMAIQDQVINTNNYKKFVIRDPTITSDKCRRCQQTSETIQHITSGCSTIANTDYLRRHNQLCNIIHQKLANKYGLLNTYTPYYKYNPQAVLENADFRLYYDRSIITDRQVTNNRPDIVVVDKKANSVLLVDVAVPNNNNILDKYNEKIAKYTDLAIEVGQMWHAEKVEVVPIIVSSTGLIPRSLEDSLKKLSLHKNTFIDLQKAAILNTCHTVRKFLNV

SEQ ID NO: 9795 - protein, 1252 aa, Galerucella calmariensis
MSNCKTRLPQVGRAKCSESHTASVPSTSAVCSTDSGGSNNSIVNSGTLNLRNRQVNRHCNTLNSCRVQAGARRACSKNDESTSSSVSGRRSVTPSRATVTHTHEENNINPHPPASAVSGVTQVGTSTTTKAGKPRKRMKWTIELNSFIMRSYFKITKMETDMTTYRYALHCAFIEHFPEFQHLTEQRIADQRRSIVKNNLLPDPTLQQIRGEVLLDLQNEENDIITDHDTHEPENAQEDNNGVEKTNIDCDKTPDNDYNTELCKALAEFNGTNPIHRPKLPKLRTNKSTNSIIAAVNLLLQNHAKDCKALEQLHTLIYCGAVAVLRIHNQRIQFPENNQSKDYKQLKHWWQRRLESSIDDIRRELGQLTEFKNNLKPSRRLTNRVRKIYRKIKTYTGHPQHEQHVSEYMDLLRQKLKAKSKRLSRYVKCTKRKQQNYLFNNNQKLFYRQLSGTVNNQNQSPPNKDELTEYWSSLWSKPVEHKSNAHWIRTEEEKINIEPMPFVNLTTTEVTEAIKSTSNWKTPGVDHVQNFWYKKFDSLHEAMATSFSHILQHPEDTPPFLTLGSTHLLPKTHQTHDPSQYRPITCLPTIYKILTACITNRIYRHVDQNNILSEEQKGCRRDHQGCKEQLIIDSVILKQAQKEKRNIHTAFVDYRKAFDSVPHSWLVKVLQIYKVHPTIVTFLESSMKHWRTNLHLQINGQYLQTDDISIRRGIFQGDSLSPLWFCLAMNPLSNLLNDTDYGYKLKANRNTSCTVSHLLYMDDIKIYASNQRQIQHLLNITEKFSSDIQMGFGLDKCKTLNIEKGKIVNGDVLLPNGNIITDMQNGETYKYLGFQQAKLLDQKQAKIKIRSQFTQRVTTSLKSQLNAGNLAKAINTYAIPILTYSFGILKWTKTELEDIQRTTRTMMTKHKCHHPTSSVIRTTLPRREGGRGLVDIVNLHNKQIYKLQEFFIAKAETSELHEMVAKADKNYSPLNLVSPDMRLEIVTDSDKQVEWAQKALHGRHHHDLNQPHIDKEASNKWLSDGTLFPETEGFMTAIQDQVINTNNYKKFVMKDPNIATDKCRRCQQTTETIQHITSGCSALANIDYLRRHNQLCNIIHQKLANKFGLVNTYTPYYKYHPNSVLENADFRLYYDRSIITDRRVTNNRPDIVVVDKKANSVYLVDVAVPNNNIMDKYNEKIAKYTDLAIEVRQMWHAEKIEVVPIIVSSTGLIPKTLKDSLTKLGLHKNTYIDLQKAAILNTCHTVRKFLNM

SEQ ID NO: 9796 - protein, 1235 aa, Ophraella communa
MSAVCSTDSGGSNNSIVTDTLSLRNRQVNRHCNTYNSCRVQVDDRRACSKNDASSSSVSGMRSVTPSMATATTQEENNTKSPQTVSAVSGVSQDGTSTTTKAGKPRKRMKWTIEMNSFIIRSYFKITKIETDLTTYRFALHRAFIEQYPEFQHVTEQRIADQRRTILKNNLLPGPLMQQIRSEVLLELQTEDNHNVIQHTNDQLDNVRLDDHTSDDTPNIDQDENPNTDSNTQPDKHENAVAELSKAILEFDGSSPIHRPILPKLKTNKNTNRILAVINLLLNDRAKNYRTLEEIHTLIYCGAVAVLRCHNQHVRVPNKKYTEKQKSYKPWWQQRLEKSINDIRKELGQLTEFNNNAKPSRRLINRVKKILKKIKTNTGHPRYKEHLCSYMDLLRQKLKAKSKRLSRYVKCTKKKQQNHLFNTNEKLFYRQLSSAGTNNYHNLPSKDELTDYWSSIWSNPQNHNEGAAWIESETDKSNIAAMVFDNITTAEVNQAVGETNSWKAPGIDNIQNFWYKKFDSLHEVMASKFTHILQHPEDIPAFLTHGLTHMLPKTANTQDPSQYRPITCLPTLYKILTSCITNRIYRHVDQNNILAEEQKGCKRGHQGCKEQLVIDSVILRQAQKQCRNISTAFVDYRKAFDSVPHSWLIRVLNIYKVHPTIVTFLEASMKQWRTNLQLNINGQHFKTDEIAIRRGIFQGDSLSPLWFCLAMNPLSHMLNDTKYGFNLKTNRNTNCTVSHLLYMDDIKIFASNQQQIQHLLDITERFSSDIRMEFGLDKCRTLNIEKGKIVNGDVALPNGDIIAAMQNGETYKYLGFQQARLLDQKQSKSKIKDQYTQRVCSLLKSELNAGNLNRAINTYAVPVLTYSFGILRWTKTELEDIQRTTRTMMTKYRYHHPTSSVLRTTLPRKEGERALCDIINLHNKQINKLQDFFITKSTSSNLHKFIVGADKNYSPLNLAGPNVDLEITTDAEKHVKWAQKALHGRHHHDLNQPHIDKLASNRWLADGTLFPETEGFMMAIQDQVINTNNYKKFVIRDPTITSDKCRRCQQTSETIQHITSGCSTIANTDYLRRHNQLCNIIHQKLANKYGLLNTYTPYYKYNPQAVLENADFRLYYDRCIITDRQVTNNRPDIVVVDKKANSVLLVDVAVPNNNNILDKYNEKIAKYTDLAIEVGQMWHAEKVEVVPIIVSSTGLIPRSLEDSLKKLSLHKNTFIDLQKAAILNTCHTVRKFLNM

SEQ ID NO: 9797 - protein, 845 aa, Galerucella tenella
MDLLRQKLKAKSKRLSRYVKCTKRKQQNYLFNNNQKLFYRQLSGTVNNQNQSPPNKDELTEYWSSLWSKPVEHKSNAHWIRTEEEKINIEPMPFVNLTTTEVTEAIKSTSNWKTPGVDHVQNFWYKKFDSLHEAMATSFSHILQHPEDTPPFLTLGSTHLLPKTHQTHDPSQYRPITCLPTIYKILTACITNRIYRHVDQNNILSEEQKGCRRDHQGCKEQLIIDSVILKQAQKEKRNIHTAFVDYRKAFDSVPHSWLVKVLQIYKVHPTIVTFLESSMKHWRTNLHLQINGQYLQTDEISIRRGIFQGDSLSPLWFCLAMNPLSNLLNDTDYGYKLKANRNTSCTVSHLLYMDDIKIYASNQRQIQHLLNITEKFSSDIQMGFGLDKCKTLNIEKGKIVNGDVLLPNGNIITAMQNGETYKYLGFQQAKLLDQKQAKIQIRSQFTQRVTTLLKSQLNAGNLAKAINTYAIPILTYSFGILKWTKTELEDIQRTTRTMMTKHKCHHPTSSVIRTTLPRREGGRGLVDIVNLHNIQISRLQEFFIAKAETSELHEMVAKADKNYSPLNLVSPDMRLGIVTDSDKQVEWAQKALHGRHHHDLNQPHIDKEASNKWLSDGTLFPETEGFMMAIQDQVINTNNYKKFVMKDPNIATDKCRRCQQTTETIQHITSGCSALANIDYLRRHNQLCNIIHQKLANKFGLVNTYTPYYKYHPNSVLENADFRLYYDRSIITDRRVTNNRPDIVVVDKKANSVYLVDVAVPNNNNILDKYNEKIAKYTDLAIEVRQMWHAEKIEVVPIIVSSTGLIPKTLQDSLTKLGLHKNTYIDLQKAAILNTCHTVRKFLNM

SEQ ID NO: 9798 - protein, 1106 aa, Ophraella communa
MSNFKTILPQVGRALRSQSHTAGVPGMSTVCSTDSGGSNNSIVTDTLSLRNRQVNRHCNTYNSCRVQVDDRRACSKNDASSSSVSGMRSVTPSMATAITQEENLTDSPPPVSAVSGVSQDGTSMTTKAGKPRKRMKWTTEMNSFIIRSYFKLLKDRAKDYRTLEEIHTLIYCGAVAVVRSHNQQVRFPNRKCTEKQKPYKPWWQQRLEKSINDIRKELGQLTEFNNNAKPSRRLTNRVKKIFKKIKTHTEHPRYKEHLCSYMDLLRQKLKAKSKRLARYVKCTKKKQQNHLFNTNEKLFYRQLSSAGTNNHHNLPSKDELFDHWSSIWSNPQKHNEGAAWIESEAGKSNIAPMMFDNITTADVNQAIRQINSWKAPGIDNIQNFWYKKFGSLHEVLASKFTHILQHPEDIPAFLTHGLTHMLPKTANTQDPSQYRPITCLPTLYKILTSCITNRIYRHVDQNNILAEEQKGCKRGHQGCKEQLIIDSVILRQAQKQCRNISTAFVDYRKAFDSVPHSWLISVLNIYKINPTIVSFLEASMKQWRTSLQVNINGQYIKTNDISIRRGIFQGDSLSPLWFCLAMNPLSTMLNNTKLGFNLKINKNTNCTVSHLLYMDDIKIFASNQQQIQHLLDVTERFSRDVRMQFGLDKCRTLNIEKGKIINGDLALPNGEIIAAMQNGETYKYLGFQQARLLDQKQSKSKIRNEVSQRVSSILKSELNAGNLNRAINTYAVPVLAYSFGILQWTKTELEDIQRTTRTMITKYRCHHPTSSVLRTTLPRKEGGRALCDIINLHNKQINKLRDFFVTKSLSSNLHKSVIGADKKYSPLNLADPNMDLEITTDAEKHVKWAQKALHGRHHHDLNQPHIDKIASNRWLADGTLFPETEGFMMAIQDQVINTNNYKKCVIRDPTITTDKCRRCQQTSETIQHITSGCSTIANTDYLRRHNQLCNIIHQKLANKYGLLNTYTPYYKYNPQAVLENADFRLYYDRSIITDRQVTNNRPDIVVVDKKAKSVLLVDVAVPNNNNVLDKYNEKMAKYTDLVIEVGQMWHAEKVEVVPIIVSSTGFIPKSLEDSLKKLDLHKNTFIDLQKAAILNTCHTVRKFLNM

SEQ ID NO: 9799 - protein, 1259 aa, Ophraella communa
MSSFKTKLPQVGRVLRSQSHTAGVPGMSAVCSTDSGGSSNSIVIDTLTLRNRLVNRHGNTYNSCRVQVDDRRACSKNDASSSSVSGMRSVTPSMATATTEEENNTKSPPPVSAVSGVSQDGTSMTTKAAKPSKRMKWTTEMNSFIIRSYFKITKSETDLTTYRFALHRAFIEQYPEFQHVTEQRIADQRRTIIKNNLIPGPLIQQIRSEVLLELQTEDDHNVIQHTNDQLDNIRLDDHTSEDTPNMDQNENIDNDTQTDEHKNAVAELSKAIVEFDGTNPIQRPILPKLRSNKNTNRIIALFNLLLNDRAKDCRTLEEIHTLIYCGAVAVLRSHNQQVRFPNKNCSEKKKQHKPWWQQRLEKSINDIRKELGQLTEFKTSTKPSRRLTNRVKKIFKKIKTNTEHPRHKEHLCSYMDILRQKLKAKSKRLSRYVKCTKKKQQNHLFDNNEKLFYRQLSSVGTNSNDNLPSKHELTDYWSSIWSNPQKHNEGAEWIQSEKDKSNIAPMLFNNITTAEVNQAVGETNSWKAPGIDNIQNFWYKKFDSLHEIIASKFTHILQHPEDIPAFLTHGLTHMLPKTANTQDPSQYRPITCLPTLYKILTSCITNRIYRHVDQNNILAEEQKGCKRGHQGCKEQLIIDSVILRQAQKQCRNISTAFVDYRKAFDSVPHSWLISVLNIYKINPTIVSFLKASMKQWRTSLQVNINGQYIKTNDISIRRGIFQGDSLSPLWFCLAMNPLSTMLNNTKLGFNLKINKNTNCTVSHLLYMDDIKIFASNQQQIQHLLDVTERFSRDVRMQFGLEKCRTLNIEKGKIVNGDVALPNGDIIAAMQNGETYKYLGFQQARLLDQKQSKSKIKNQYTQRVSSLLKSELNAGNLNRAINTYAVPVLTYSFGILRWTKTELEDIQRTTRTMMTKYRYHHPISSVFRTTLPRKEGGRALCDIINLHNKQINKLRDFFITKSTSSNLHKFIVGADKNYSPLNLAGPNVDLEVTTDAEKHVKWAQKALHGRHHHDLNQPHIDKIASNRWLADGTLFPETEGFMMAIQDQVINTNNYKKFVIRDQTITSDKCRRCQQTSETIQHITSGCSTIANTDYLRRHNQLCNIIHQKLANKYGLLNTYTPYYKYNPQAVLENADFRLYYDRSIITDRQVTNNRPDIVVVDKKANSVLLVDVAVPNNNNILDKYNEKVAKYTDLAIEVGRMWHAEKVEVVPIIVSSTGLIPRSLEDGLKKLSLHKNTFIDLQKAAILNTCHTVRKFLNM

SEQ ID NO: 9800 - protein, 1026 aa, Ophraella communa
MECKFNMHLTQLVLDRQIMAALTVKIVRSDKLNIIIIIIIIIIIIIIIIIIIIIIIRSNKNTNRILALFNLLLNDRAKDCQTLEEIHTLIYCGAVAVLRSHNQQIRFPNKRSTEKQKPFKPWWQQRLEKSINDIRKELGQLTEFNNNTKPSRRLINRVKKILKKIKTNTGHPRYKEHLCSYMDLLRQKLKAKSKRLSRYVKCTKKKQQNHLFNTNEKLFYRQLSSAGTNNYHSLPSKDELTDYWSSIWSNPQKHNEGAAWIEAETDKSNIASMVFDNITTAEVNQVVGETNSWKAPGIDNIQNFWYKKFDSLHEVMASKFTHILQHPEEIPAFLTHGLTHMLPKTANTQDPSQYRPITCLPTLYKILTSCITNRIYRHVDQNNILAEEQKGCKRGHQGCKEQLVIDSVILRQAQKQCRNISTAFVDYRKAFDSVPHSWLIRILNIYKVHPTIVTFLEASMKQWRTNLQLNINGQHFKTDEIAIRRGIFQGDSLSPLWFCLAMNPLSHLLNDTKYGFNLKTNRNTNYTVSHLLYMDDIKIFASNQQQIQHLLDITERFSSDIHMEFGLDKCRTLNIEKGKIVNGDVALPNGDIIAAMQNGETYKYLGFQQARLLDQKQSKAKIRDEFSQRVSSLLKSELNAGNLNRAINTYAVPMLTYSFGILQWTKTELEDIQRTTRTMMTKYRCHHPTSSVLRTTLPRKEGGRALCDIVNLHNKQINRLRDFFITKSLSSNLHKSVIGADKKYSPLNLADPHMDLEITTDAEKQVKWAQKALHGRHHHDLNQPHIDKIASNRWLADGTLFPETEGFMMAIQDQVINTNNYKKFVIRDPTITTDKCRRCQQTSETIQHITSGCSTIANTDYLRRHNQLCNIIHQKLANKYGLLNTYTPYYKYNPQAVLENADFRLYYDRPIITDRQVTNNRPDIVVVDKKAKAVLLVDVAVPNNNNVLDKYNEKMAKYTDLAIEVGQMWRAEKVEVVPIIVSSTGLIPKSLEDSLKKLDLHKNTFIDLQKAAILNTCHTVRKFLNM

SEQ ID NO: 9801 - protein, 845 aa, Galerucella calmariensis
MDSLRQKLKAKSKRLSRYVKCTKRKQQNYLFNNNQKLFYRQLSGTVNNQNQSPPNEDELTEYWSLLWSKPVEHKSNAHWIRTEEEKINIEPMSFVDLTTSEVTEAIKSTNNWKTPGVDHVQNFWYKKFDSLHEAMATSFSHILQHPEDTPPFLTLGSTHLLPKTHQTHDPSQYRPITCLPTIYKILTACITNRIYRHVDQNNILSEEQKGCRRDHQGCKEQLIIDSVILKQAQKEKRNIHTAFVDYRKAFDSVPHSWLVKVLQIYKVHPTVVTFLESAMKHWRTNLHLQINGQYLQTDEISIRRGIFQGDSLSPLWFCLAMNPLSNLLNDTDYGYKLKANRNTSCTVSHLLYMDDIKIYASNQRQIQHLLNITEKFSSDIQMGFGLDKCKTLNIEKGKIVNGYVLLPNGNIITAMQNGETYKYLGFQQAKLLDQKQAKIKIRSQFTQRVTTLLKSQLNAGNLAKAINTSAIPILTYSFGILKWTKTELEDIQRTTRTMMTKHKCHHPTSSVIRTTLPRREGGRGIVDIVNLHNKQISRLQEFFIAKAETSELHEMVAKADKNYSPLNLVSPDMRLEIVTDADKQVEWAQKALHGRHHHDLNQPHIDKEASNKWLSDGTLFPETEGFMTAIQDQVINTNNYKKFVMKDPNIATDKCRRCQQTTETIQHITSGCSALANIDYLRRHNQLCNIIHQKLANKFGLVNTYTPYYKYHPNSVLENADFRLYYDRSIITDRRVTNNRPDIVVVDKKANSVYLVDVAVPNNNNIMEKYNEKIAKYTDLAIEVRQMWHAEKIEVVPIIVSSTGLIPKTLQDSLTKLGLHKNTYIDLQKAAILNTCHTVRKFLNM

SEQ ID NO: 9802 - protein, 1253 aa, Galerucella tenella
MSNCKTRLPQVGRAKCSESHTASVPSTSAVCSTDSGGSNNSIVNSGTLNLRNRQVNRHCNTLNSCRVQAGARSACSKNDESTSSSVSGRRSVTPSRATVTHTHEENNINPHPPASAVSGVTQDGTSTTTKAGKPRKRMKWTIELNSFIMRSYFKITKMETDMTTYRYALHCAFIEHFPEFQHLTEQRIADQRRSIVKNNLLPDPTLQQIRGEVLLVLQNEENDIITDHDTHEPENAQEDNNGDEKINIDCDKTPDNDYNTELCKALAEFNGTNPIHRPKLPKLRTNKSTNSIIAAVNLLLQNHAKDCKALEQLHTLIYCGAVAVLRIHNQRIQFPENNQSKDYKQLKPWWQRRLESSIDDIRRELGQLTEFKNNLKPSRRLTNRVRKIYRKIKTYTGHPQHEQHVSEYMDLLRQKLKAKSKRLSRYVKCTKRKQQNYLFNNNQKLFYRQLSGTVNNQNQSPPNKDELTEYWSSLWSKPVEHKSNAHWIRTEEEKINIEPMPFVNLTTTEVTEAIKSTSNWKTPGVDHVQNFWYKKFDSLHEAMATSFSHILQHPEDTPPFLTLGSTHLLPKTHQTHDPSQYRPITCLPTIYKILKACITNRIYRHVDQNNILSEEHKGCKRDHQGCKEQLIIDSVILKQAQKEKRNIHTAFVDYRKAFDSVPHSWLVKVLQIYKVHPTIVTFLESSMKHWRTNLHLQINGQYLQTEEISIRRGIFQGDSLSPLWFCLAMNPLSNLLNDTDYGYKLKANRNTSCTVSHLLYMDDIKIYASNQRQIQHLLNITEKFSSDIQMGFGLDKCKTLNIEKGKIVNGDVLLPNGNIITAMQNGETYKYLGFQQAKLLDQKQAKIKIRSQFTQRVTTLLKSQLNAGNLAKAINTYAIPILTYSFGILKWTKTELEDIQRTTRTMMTKHKCHHPTSSVIRTTLPRREGGRGLVDIVNLHNKQISRLQEFFIAKAETSELHEMVAKADKNYSPLNLVSPDMRLGIVTDSDKQVEWAQKALHGRHHHDLNQPHIDKEASNKWLSDGTLFPETEGFMMAIQDQVINTNNYKKFVMKDPNIATDKCRRCQQTTETIQHITSGCSALANIDYLRRHNQLCNIIHQKLANKFGLVNTYTPYYKYHPNSVLENADFRLYYDRSIITDRRVTNNRPDIVVVDKKANSVYLVDVAVPNNNNILDKYNEKIAKYTDLAIEVRQMWHAEKIEVVPIIVSSTGLIPKTLQDSLTKLGLHKNTYIDLQKAAILNTCHTVRKFLNM

SEQ ID NO: 9803 - protein, 1259 aa, Ophraella communa
MSSFKTKLPQVGRVLRSQSHTAGVPGMSAVCSTDSGGSSNSIVTDTLTLRNRLVNRHGNTYNSCRVQVDDRRACSKNDASSSSVSGMRSVTPSMATATTEEENNTKSPPPVSAVSGVSQDGTSMTTKAGKPSKRMKWTTEMNSFIIRSYFKITKSETDLTTYRFALHRAFIEQYPEFQHVTEQRIADQRRTIIKNNLIPGPLIQQIRSEVLLELQTEDDHNVIQHTNDQLDNIRLDDHTSEDTPNMDQNENIDNDTQTDEHKNAVAELSKAIVEFDGTNPIQRPILPKLRSNKNTNRIIALFNLLLNDRAKDCRTLEEIHTLIYCGAVAVLRSHNQQVRFPNKNCSEKKKQHKPWWQQRLEKSINDIRKELGQLTEFKTSTKPSRRLTNRVKKIFKKIKTNTEHPRHKEHLCSYMDLLRQKLKAKSKRLSRYVKCTKKKQQNHLFDNNEKLFYRQLSSVGTNSNDNLPSKHELTDYWSSIWSNPQKHNEGAEWIQSEKDKSNIAPMVFNNITTAEVNQAVGETNSWKAPGIDNIQNFWYKKFDSLHEIIASKFTHILQHPEDIPAFLTHGLTHMLPKTANTQDPSQYRPITCLPTLYKILTSCITNRINRHVDQNNILAEEQKGCKRGHQGCKEQLVIDSVILRQAQKQCRNISTAFVDYRKAFDSVPHSWLLSVLNIYKVHPTIVTFLETSMKQWRTSLQVNINGQYIKTNEIVIRRGIFQGDSLSPLWFCLAMNPLSTMLNDTKYGFNLKTNRNTNCTVSHLLYMDDIKIFAANQQQIEHLLDITERFSSDIHMEFGLDKCRTLNIEKGKIVNGDVALPNGDIIAAMQNGETYKYLGFQQARLLDQKQSKSKIKDQYTQRVSSLLKSELNAGNLNRAINTYAVPVLTYSFGILRWTKTELEDIQRTTRTMMTKYRYHHPISSVFRTTLPRKEGGRALCDIINLHNKQINKLRDFFITKSTSSNLHKFIVGADKNYSPLNLAGPNVDLEVTTDAEKHVKWAQKALHGRHHHDLNQPHIDKIASNRWLADGTLFPETEGFMMAIQDQVINTNNYKKFVIRDQTITSDKCRRCQQTSETIQHITSGCSTIANTDYLRRHNQLCNIIHQKLANKYGLLNTYTPYYKYNPQAVLENADFRLYYDRSIITDRQVTNNRPDIVVVDKKANLVLLVDVAVPNNNNILDKYNEKVAKYTDLAIEVGQMWHAEKVEVVPIIVSSTGLIPKSLEDSLKKLDLHKNTFIDLQKAAILNTCHTVRKFLNM

SEQ ID NO: 9804 - protein, 1014 aa, Ophraella communa
MDQNENIDNDTQTDEHENAVAELSKAIAEFDGTNPIQRPILPKLRSNKNTNRILALFNLLLNDRAKDCQTLEEIHTLIYCGAVAVLRSHNQQIRFPNKRSTEKQKPFKPWWQQRLEKSINDIRKELGQLTEFNNNTKPSRRLINRVKKILKKIKTNTGHPRYKEHLCSYMDLLRQKLKAKSKRLSRYVKCTKKKQQNHLFNTNEKLFYRQLSSAGTNNYHNLPSKDELTDYWSSIWSNPQKHNEGAAWIESETDKSNIASMMFDNITTAEVNQVVGETDSWKAPGIDNIQNFWYKKFDSLHEVLASKFTHILQYPEEIPAFLTHGLTHMLPKTANTQDPSQYRPITCLPTLYKILTSCITNRIYRHVDQNNILAEEQKGCKRGHQGCKEQLVIDSVILRQAQKQCRNISTAFVDYRKAFDSVPHSWLIHILNIYKVHPTIVTFLEASMKHWRTNLQLNINGQHFKTDEIAIRRGIFQGDSLSPLWFCLAMNPLSHLLNDTKYGFNLKTNRNTNCTVSHLLYMDDIKIFAANQQQIQHLLDITERFSSDIHMEFGLDKCRTLNIEKGKIVNGDVALPNGDIIAAMQNGETYKYLGFQQARLLDQKQSKSKIKDQYTQRVSSLLKSELNAGNLNRAINTYAVPVLTYSFGILRWTTTELEDIQRTTRTMMTKYRYHHPISSVFRTTLPRKEGGRALCDIINLHNKQINKLRDFFITKSTSSDLHKFIVGADKNYSPLNLAGPNVDLEVTTDAEKHVKWAQKALHGRHHHDLNQPHIDKTASNRWLADGTLFPETEGFMMAIQDQVINTNNYKKFVIRDQTITSDKCRRCQQTSDTIQHITSGCSTIANTDYLRRHNQLCNIIHQKLANKYGLLNTYTPYFKYNPQAVLENADFRLYYDRSIITDRQVTNNRPDIVVVNKKANSVLLVDVAVPNNNNILDKYNEKIAKYTDLAIEVGQMWHAEKVEVVPIIVSSTGLIPKSLEDSLKKLDLHKNTFIDLQKAAILNTCHTVRKFLNM

SEQ ID NO: 9805 - protein, 1253 aa, Galerucella pusilla
MSNCKTRLPQVGRAKCSESHTASVPSTSAVCSTDSGGSNNSIVNSGTLNLRNRQVNRHCNTLNSCRVQAGARRACSKNDESTSSSVSGRRSVTPSRATVTHTHEENNINPHPPTSAVSGVTQVGTSTTTKAGKPRKRMKWTIELNSFIMRSYFKITKMETDMTTYRYALHRAFIEHFPEFQHLTEQRIADQRRSIVKNNLLPDPTLQQIRGEVLLDLQNEENDIITDHDTHEPENAQEDNNGVEKTNIDCDKTPDNDYNTELCKALAEFNGTNPIHRPKLPKLRTNKSTNSIIAAVNLLLQNHAKDCKALEQLHTLIYCGAVAVLRIHNQRIQFPENNQSKDYKQLKPWWQRRLESSIDDIRRELGQLTEFKNNLEPSRRLTNRVKKIYRKIKTYTGHPQHEQHVFEYMDSLRQKMKAKSKRLSRYVKCTKRKQQNYLFNNNQKLFYRQLSGTENNQNQGPPNKNELTEYWSSLWSKPVEHKSNAHWIRTEEEKINIEPMSFVDLTTSEVTEAIKSTSNWKTPGVDHVQNFWYKKFDSLHEAMATSFSHILQHPEDTPPFLTLGSTHLLPKTHQTHDPSQYRPITCLPTIYKILTACITNRIYRHVDQNNILSEEQKGCRRDHQGCKEQLIIDSVILKQAQKEKRNIHTAFVDYRKAFDSVPHSWLVKVLQIYKVHPTVVTFLESAMKHWRTNLHLQINGQYLQTDEISIRRGIFQGDSLSPLWFCLAMNPLSNLLNDTDYGYKLKANRNTSCTVSHLLYMDDIKIYASNQRQIQHLLNITEKFSSDIQMGFGLDKCKTLNIEKGKIINGDVLLPNGNIITAMQNGETYKYLGFQQAKLLDQKQAKIKIRSQFTQRVTTLLKSQLNAGNLAKAINTYAIPILTYIFGILKWTKTELEDIQRTTRTMMTKHKCHHPTSSVIRTTLPRREGGRGLVDVINLHNKQISRLQEFFIAKAETSELHEMVAKADKNYSPLNLVSPDMRLEIVTDSDKQVEWAQKALHGRHHHDLNQPHIDKEASNKWLSDGTLFPETEGFMMAIQDQVINTNNYKKFVMKDPYIDTDKCRRCQQTTETIQHITSGCSALANIDYLRRHNQLCNIIHQKLANKFGLVNTYTPYYKYHPNSVLENADFRLYYDRSIITDRRVTNNRPDIVVVDKKANSVYLVDVAVPNNNNILDKYNEKIAKYTDLAIEVRQMWHAEKIEVVPIIVSSTGLIPKTLQDSLTKLGLHKNTYIDLQKAAILNTCHTVRKFLNM

SEQ ID NO: 9806 - protein, 1253 aa, Galerucella calmariensis
MSNCKTRLPQVGRAKCSESHTASVPSTSAVCSTDSGGSNNSIVNSGTLNLRNRQVNRHCNTLNSCRVQAGARRACSKNDESTSSSVSGRRSVTPSRATVTHTLEENNINPHPPASAVSEVTQVGTSTTTKAGKPRKRMKWTIELNSFIMRSYFKITKMETDMTTYRYALHCVFIEHFPEFQHLTEQRIADQRRSIVKNNLLPDPTLQQIRGEVLLDLQNEENDILTDHDTHEPENAQEDNNGVEKTNIDCDKTPDNDYNTELCKALAEFNGTNPIHRPKLPKLRTNKSTNSIIAAVNLLLQNHAKDCKALEQLHTLIYCGAVVVLRIHNQRIQFPENNQSKDYKQLKPWWQRRLESSIDDIRRELGQLTEFKNNLKPSRRLTNRVRKIYRKIKTYAGHPQHEQHVSEYMDLLRQKLKAKSKRLSRYVKCTKRKQQNYLFNNNQKLFYRQLSGTVNNQNQSPPNKDELTEYWSSLWSKPVEHKSNAHWIRTEEEKINIEPMSFVDLTTSEVTEAIKSTSNWKTPGVDHVQNFWYKKFDSLHEAMATSFSHILQHPEDTPPFLTLGSTHLLPKTHQTHDPSQYRPITCLPTIYKILTACITNRIYRHVDQNNILSEEQKGCRRDHQGCKEQLIIDSVILKQAQKEKRNIHTAFVDYRKAFDSVPHSWLVKVLQIYKVHPTIVTFLESSMKHWRTNLHLQINDQYLQTDEISIRRGIFQGDSLSPLWFCLAMNPLSNLLNDTDYGYKLKANRNTSCTVSHLLYMDDIKIYASNQRQIQHLLNITEKFSSDIQMGFGLDKCKTLNIEKGKIVNGDVLLPNGNIITAMQNGETYKYLGFQQAKLLDQKQAKIKIRSQFTQRVTTLLKSQLNAGNLAKAINTYAIPILTYSFGILKWTKTELEDIQRTTRTMMTKHKCHHPTSSVIRTTLPRREGGRGLVDIVNLHNKQISRLQEFFIAKAETSELHEMVAKADKNYSPLNLVSPDMRLGIVTDSDKQVEWAQKALHGRHHHDLNQPHIDKEASNKWLSDGTLFPETEGFMMAIQDQVINTNNYKKFVMKDPNIATDKCRRCQQTTETIQHITSGCSALANIDYLRRHNQLCNIIHQKLANKFGLVNTYTPYYKYHPNSVLENADFRLYYDRSIITDRRVTNNRPDIVVVDKKANSVYLVDVAVPNNNNILDKYNEKIAKYTDLAIEVRQMWHAEKIEVVPIIVSSTGLIPKTLQDSLTKLGLHKNTYIDLQKAAILNTCHTVRKFLNM

SEQ ID NO: 9807 - protein, 1254 aa, Galerucella tenella
MSNCKTRLPQVGRAKCSESHTASVPSTSAVCSTDSGGSNNSIVHSGTLNLRNRQVNRHCNTLNNSCRVQAGARRACSKNDESTSSSVSGRRSVTPSRATVTHTHEENNINPHPPASAVSGVTQVGTSTTTKAGEPRKRMKWTIELNSFIMRSYFKITKMETDMTTYRYALHCAFIEHFPEFQHITEQRIADQRRSIVKNNLLPDPTLQQIRGEVLLDLQNEENDIITDHDTHEPENTQEDNNGVEKTNIDCDKTPDNDYNTELCKALAEFNGTNPIHRPKLPKLRTNKSTNSIIAAVNLLLQNYAKDCKALEQLHTLIYCGAVAVLRIHNQRIQFPENNQSKDYKQLKPWWQRRLESSIDDIRRELGQLTEFKNNLKPSRRLTNRVRKIYRKIKTYTGHPQHEQHLSEYMDLLRQKLKAKSKRLSRYVKCTKRKQQNYLFNNNQKLFYRQLSGTVNNQNQSPPNKDELTEYWSSLWSKPVEHKSNAHWIRTEEEKINIEPMPFVNLTTTEVTEAIKSTSNWKTPGVDHVQNFWYKKFDSLHEAMATSFSHILQHPEDTPPFLTLGSTHLLPKTHQTHDPSQYRPITCLPTIYKILTACITNRIYRHVDQNNILSEEQKGCRRDHQGCKEQLIIDSVILKQAQKEKRNIHTAFVDYRKAFDSVPHSWLVKVLQIYKVHPTIVTFLESSMKHWRTNLHLQINGQYLQTDEISIRRGIFQGDSLSPLWFCLAMNPLSNLLNDTNYGYKLKANRNTSCTVSHLLYMDDIKIYASNQRQIQHLLNITEKFSSDIQMGFGLDKCKTLNIEKGKIVNGDVLLPNGNIITAMQNGETYKYLGFQQAKLLDQKQAKIKIRSQFTQRVTTLLKSQLNAGNLAKAINTYAIPILTYSFGILKWTKTELEDIQRTTRTMMTKHKCHHPTSSVIRTTLPRREGGRGLVDIVNLHNKQISRLQEFFIAKAETSELHEMVAKADKNYSPLNLVSPDMRLGIVTDSDKQVEWAQKALHGRHHHDLNQPHIDKEASNKWLSDGTLFPETEGFMMAIQDQVINTNNYKKFVMKDPNIATDKCRRCQQTTETIQHITSGCSALANIDYLRRHNQLCNIIHQKLANKFGLVNTYTPYYKYHPNSVLENADFRLYYDRSIITDRRVTNNRPDIVVVDKKANSVYLVDVAVPNNNNILDKYNEKIAKYTDLAIEVRQMWHAEKIEVVPIIVSSTGLIPKTLQDSLTKLGLHKNTYIDLQKAAILNTCHTVRKFLNM

SEQ ID NO: 9808 - protein, 1235 aa, Ophraella communa
MSVVCSTDSGGSNNSIITDTLTLRNRQVNRHGNTYNSCRVQVDDRRTCSKNDASSSSVSGMRSVTPSMATATTQEENNTKSPPPVSAVSGVSQDGTSMTTKAGKPRKLMKWTTEMNSFIIRSYFRITKNETDLKTYRFALHRAFIQQYPEFQHVTEPRIADQRRTIIKNNLLPGPLMQQIRSEVLLELQTEIDHNVIQHTNDQLDNVRLDDHTGEDTPNIDQDENPNTDSNTQPDEHENVVTELSKAILEFDGSNPLHRPILPKLKSNKDTNKILAVINLLLKDRAKDYRTLEGIHTLIYCGAVAVVRSHNQQVRVPNKKYTEKQKPYKPWWQQRLEKSINDIRKELGQLTEFNNNAKPSRRLTNRVKKILKKIKTNTGHPRYKEHLCSYMDLLRQKLKAKSKRLSRYVKCTKKKQQNHLFNTNEKLFYRQLSSAGTNNYHNLPSKDELFDYWSSIWSNPQKHNEGAAWIESEADKSNIAPMMFDNITTADVNQAIGQINSWKAPGIDNIQNFWYKKFSSLHEVLASKFTHILQHPEDIPAFLTHGLTHMLPKTANTQDPSQYRPITCLPTLYKILTSCITNRIYRHVDQNNILAEEQKGCKRGHQGCKEQLIIDSVILRQAQKQCRNISTAFVDYRKAFDSVPHSWLISVLNIYKINPTIVSFLEASMKQWRTSLQVNINGQYIKTNDISIRRGIFQGDSLSPLWFCLAMNPLSTMLNNTKLGFNLKINKNTNCTISHLLYMDDIKIFASNQQQIQHLLDITERFSSDIHIKFGLDKCRTLNIEKGKIVNGDVALPSGDIIAAMQNGETYKYLGFQQARILDQKQSKAKIRDEFSQRVSSLLKSELNAGNLNRAINTYAVPVLTYSFGILQWTKTELEDIQRTTRTMMTKYRCHHPTSSVLRTTLPRKERGRALCDIINLHNKQINKLRDFFVTKSLSSNLHKSVIGADKKYSPLNLADPNMDLDITTDAEKQVKWAQKALHGGHHHDLNQPHIDKIASNRWLADGTLFPETEGFMMAIQDQVINTNNYKKFVIRDPTITTDTCRRCQQTSETIQHITSGCSTIANTDYLRRHNQLCNIIHQKLANKYGLLNTYTPYYKYNPQAVLENADFTLYFDRSIITDRQVTNNRPDIVVVDKKAKSVLLVDVAVPNNNNVLDKYNEKMAKYTDLAIEVGQMWHAEKVEVVPIIVSSTGLIPKSLEDSLKKLDLHKNTFIDLQKAAILNTCHTVWKFLNM

SEQ ID NO: 9809 - protein, 845 aa, Ophraella communa
MDLLRQKLKAKSKRLARYVKCTKKKQQNHLFNTNEKLFYRQISSAGTNNYHNLPSKDELFDYWSSIWSNPQKHNEGAAWIESEAGKSNIAPMMFDNITTADVNQAIRQINSWKAPGIDNIQNFWYKKFSSLHEVLASKFTHILQHPEDIPAFLTHGLTHMLPKTANTQDPSQYRPITCLPTLYKILTSCITNRIYRHVDQNNILAEEQKGCKRGHQGCKEQLIIDSVILRQAQKQCRNISTAFVDYRKAFDSVPHSWLISVLNIYKINPTIVSFLEASMKQWRTSLQVNINGQYIKTNDISIRRGIFQGDSLSPLWFCLAMNPLSTMLNNTKLGFNLKINKNTNCTVSHLLYMDDIKIFASNQQQIQHLLDVTERFSRDVRMQFGLDKCRTLNIEKGKIINGDLALPNGEIIAAMQNGETYKYLGFQQARLLDQKQSKSKIRNEFSQRVSSILKSELNAGNLNRAINTYAVPVLTYSFGILQWTKTELEDIQRTTRTMMTKYRCHHPTSSVLRTTLPRKEGGRALCDIINLHNKQINKLRDFFVTKSLSSNLHKSVIGADKKYSPLNLADPNMDLEITTDAEKHVKWAQKALHGRHHHDLNQPHIDKIASNRWLADGTLFPETEGFMMAIQDQVINTNNYKKCVIRDPTITTDKCRRCQQTSETIQHITSGCSTIANTDYLRRHNQLCNIIHQKLANKYGLLNTYTPYYKYNPQAVLENADFRLYYDRSIITDRQVTNNRPDIVVVDKKAKSVLLVDVAVPNNNNVLDKYNEKMAKYTDLAIEVGQMWHAEKVEVVPIIVSSTGLIPKSLEDSLKKLDLHKNTFIDLQKAAILNTCHTVRKFLNM

SEQ ID NO: 9810 - protein, 1253 aa, Galerucella pusilla
MSNCKTRLPQVGRAKCSESHTASVPSTSAVCSTDSGGSNNSIVNSGTSNLRNRQVNRHCNTLNSCRVQAGARRACSKNDESTSSSVSGRRSVTPSRATVTHTHEENNINPHPPASAVSGVTQVGTSTTTKAGKPRKRMKWTIELNSFIMRSYFKITKMETDMTTYRYALHCAFIEQFPEFQHLTEQRIADQRRSIVKNNLLPDPTLQQIRGEVLLDLQNGENDIITDHDTHEPENAQEDNNGVEKTNIDCDKTPDNDYNTELCKALAEFNGTNPIHRPKLPKLRTNKSTNSIIAEVNLLLQNHAKDCKALEQLHTLIYCGAVAVLRIHNQRIQFPENNQSKNYKQLKPWWQRRLESSIDDIRRELGQLTEFKNNLKPSRRLTNRVRKIYRKIKTYTGHPQHEQHVSEYMDLLMQKLKAKSKRLSRYVKCTKRKQQNYLFNNNQKLFYRQLSGTVNNQNQSPPNKDELTEYWSSLWSKPVEHKSNAHWIRTEEEKINIEPMPFVNLTTTEVTEAIKSTSNWKTPGVDHIQNFWYKKFDSLHEAMATSFSHILQHPEDTPPFLTLGSTHLLPKTHQTHDPSQYRPITCLPTIYKILTACITNRIYRHVDQNNILSEEQKGCRRDHQGCKEQLIIDSVILKQAQKEKRNIHTAFVDYRKAFDSVPHSWLVKVLQIYKVHPTVITFLESAMKHWQTNLHLQINGQYLQTDEIFIHRGIFQGDSLSPLWFCLAMNPLSNLLNDTDYGYKLKANRNTSCTVSHLLYMDDIKIYASNQRQIQHLLNITEKFSSDIQMGFRLDKCKTLNIEKGKIVNGDVLLPNGNIITAMQNGETYKYLGFQQAKLLDQKQAKIKIRNQFTQRVTTLLKSQLNAGNLAKAINTYAIPILTYSFGILKWTKTELEDIQRTTRTMMTKHKCHHPTSSVIRTTLPRKEGGRGLVDIVNLHNKQISRLQEFFIAKAETSELHEMVAKADKSFSPLNLVSPDMRLGIVTDSDKQVEWAQKALHGRHHHDLNQPHIDKEASNKWLSDGTLFPETEGFMIAIQDQVINTNNYKKFIMKDPNIATDKCRRCQQTTETIQHITSGCSALANIDYLRRHNQLCNIIHQKLANKFGLVNTYTPYYKYHPNSVLENADFRLYYDRSIITDRGVTNNRPDIVVVDKKANSVYLVDVAVPNDNNILDKYNEKIAKYTDLAIEVGQMWHAEKIEVVPIIVSSTGLIPKTIQDSLTKLGLHKNTYIDLQKAAILNTCHTVRKFLNM

SEQ ID NO: 9811 - protein, 1253 aa, Galerucella tenella
MSNCKTRLPQVGRAKCSESHTASVPSTSAVCSTDSGGSNNSIVNSGTLNLRNRQVNRHCNTLNSCRVQAGARRACSKNDESTSSSVSGRRSVTPSRATVTHTHEENNINPHPPASAVSGVTQVGTSTTTKAGKPRKRMKWTIELNSFIMRSYFKITKMETDMTTYRYALHRAFIEHFPEFQHLTEQRIADQRRSIVKNNLLPDPTLQQIRGEVLLDLQNEENDIITDHDTHEPENAQEDNNGVEKTNIDCDKTPDNDFNTELCKALAEFNGTNPIHRPKLPKLRTNKSTNSIIAAVNLLLQDHAKDCKALEQLHTLIYCGAVAVLRIHNQRIQLPGNNQSKDYNQLKPWWQRRLESSIDDIRRELGQFTEFKNNLKPSRRLTNRVRKIYGKIKTYTGHPQHEQHVFEYMDSLRQKLKAKSKRLSRYVKCTKRKQQNYLFNNNQKLFYRQLSGTVNNQNQSPPNKDELTEYWSSLWSKPVEHKSNAHWIRTEEEKINIEPMSFVDLTTSEVTEAIKSTSNWKTPGVDHVQNFWYKKFDSLHEAMAASFSHILQHPEDTPPFLTLGSTHLLPKTHQTHDPSQYRPITCLPTIYKILTACITNRIYRHVDQNNILSEEQKGCRRDHQGCKEQLIIDSVILKQAQKEKRNIHTAFVDYRKAFDSVPHSWLVKVLQIYKVHPTVVTFLESAMKHWRTNLHLQINGQYLQTDEISIRRGIFQGDSLSPLWFCLAMNPLSNLLNDTDYGYKLKANRNTSCTVSHLLYMDDIKIYASNQRQIQHLLNITEKFSSDIQMGFGLDKCKTLNIEKGKIVNGDVLLPNGNIITAMQNGETYKYLGFQQAKLLDQKQAKIKIRSQFTQRVTTLLKSQLNAGNLAKAINTYAIPILTYSFGILKWTKTELEDIQRTTRTMMTKHKCHHPTSSVIRTTLPRREGGRGLVDIVNLHNKQISRLQEFFIAKAETSELHEMVAKADKNYSPLNLVSPDMRLEIVTDSDKQVEWAQKALHGRHHHDLNQPHIDKEASNKWLSDGTLFPETEGFMTAIQDQVINTNNYKKFVMKDPNIATDKCRRCQQTTETIQHITSGCSALANTDYLRRHNQLCNIIHQKLANKFGLVNTYTPYYKYHPNSVLENADFRLYYDRSIITDRRVTNNRPDIVVVDKKANSVYLVDVAVPNNNNILDKYNEKIAKYTDLAIEVRQMWHAEKIEVVPIIVSSTGLIPKTLQDSLTKLGLHKNTYIDLQKAAILNTCHTVRKFLNM

SEQ ID NO: 9812 - protein, 1146 aa, Ophraella communa
MIRKAAVPEWCGMQRGFSRISARHCQTRRGKRFSPSGFPSTKKKKNNNNNNNNHRAFIEQYPEFQHVTEQRIADQRRTIIKNNLIPGPLIQQIRSKVLLELQTEDDHNVIQHTNDQLDNIRLDDHTSEDTLNMDQNENIDNDTQTDEHKNAVAELSKAIVEFDGTNPIQRPILPKLRSNKNTNKILALFNLLLNDRAKDCQTLEEIHTLIYCGAVAVLRSHNQQIRFPNKNCSEKKKQHKPWWQQRLEKSINDIRKELGQLTEFKTSTKPSRRLTNRVKKIFKKIKTNTEHPRHKEHLCSYMDLLRQKLKAKSKRLSRYVKCTKKKQQNHLFDNNEKLFYRQLSSVGANSNDNLPSKHELTDYWSSIWSNTQKHNEGAEWIQSEKDMSNIAPMLFNNITTAEVNQAVGETNSWKAPGIDNIQNFWYKKFDSLHEIIASKFTHILQHPEDIPAFITHGLTHMLPKTANTQDPSQYRPFTCLPTLYKILTSCITNRIYRHVDQNNILAEEQKGCKRGHQGCKEQLVIDSVILRQAQKQCRNISTAFVDYRKAFDSVPHSWLLSVLNIYKVHPTIVTFLETSMKQWRTSLQVNINGQYIKTNEIVIRRGIFQGDSLSPLWFCLAMNPLSTMLNDTKYGFNLKTNRNTNCTVSHLLYMDDIKIFAANQQQIEHLLDITERFSSDIHMEFGLDKCRTLNIEKGKILNGDVALPNGDIIAAMQNGETYKYLGFQQARLLDQKQSKSKIKDQYTQRVSSLLKSELNAGNLNRAINTYAVPVLTYSFGILRWTKTELEDIQRTTRTMMTKYRYHHPISSVFRTTLPRKEGGRALCDIINLHNKQINKLRDFFITKSTSSNLHKFIVGADKNYSPLNLAGPNVDLEVTTDTEKHVKWAQKALHGRHHHDLNQPHIDKIASNRWLADGTLFPETEGFMMAIQDQVINTNNYKKFVIKDQTITSDKCRRCQQTSETIQHITSGCLTIANTDYLRRHNQLCNIIHQKLANKYGLLNTYTPYYKYNPQAVLENADFRLYYDRSIITDRQVTNNRPDIVVVDEKANSVLLVDVAVPNNNNILDKYNEKIAKYTDLAIEVGQMWHAEKVEVVPIIVSSTGLIPKSLEDSLKKLDLHKNTFIDLQKAAILNTCHTVRKYLNM

SEQ ID NO: 9813 - protein, 845 aa, Ophraella communa
MDLLRQKLKAKSKRLSRYVKCTKKKQQNHLFDNNEKLFYRQLSSVGTNSNDNLPSKHELTDYWSSIWSNPQKHNEGAEWIQSEKDKSNIAPMLFNNITTAEVNQAVGETNSWKAPGIDNIQNFWYKKFDSLHEIIASKFTHILQHPEDIPAFLTHGLTHMLPKTANTQDPSQYRPITCLPTLYKILTSCITNRIYRHVDQNNILAEEQKGCKRGHQGCKEQLVIDSVILRQAQKQCRNISTAFVDYRKAFDSVPHSWLLSVLNIYKVHPTIVTFLETSMKQWRTSLQVNINGQYIKTNEIVIRRGIFQGDSLSPLWFCLAMNPLSTMLNDTKYGFNLKTNRNTNCTVSHLLYMDDIKIFAANQQQIEHLLDITERCSSDIHMEFGLDKCRTLNIEKGKIVNGDVALPNGDIIAAMQNGETYKYLGFQQARLLDQKQSKSKIKDQYTQRVSSLLKSELNAGNLNRAINTYAVPVLTYSFGILRWTKTELEDIQRTTRTMMTKYRYHHPISSVFRTTLPRKEGGRALCDIINLHNKQINKLRDFFITKSTSSNLHKFIVGADKNYSPLNLAGPNVDLEVTTDAEKHVKWAQKALHGRHHHDLNQPHIDKIASNRWLADGTLFPETEGFMMAIQDQVINTNNYKKFVIWDQTITSDKCRRCQQTSETIQHITSGCSTIANTDYLRRHNQLCNIIHQKLANKYGLLNTYTPYYKYNPQAVLENADFRLYYDRSIITDRQVTNNRPDIVVVDKKANSVLLVDVAVPNNNNTLDKYNEKIAKYTDLAIEVGQMWHAEKVEVVPIIVSSTGLIPKSLEDSLKKLDLHKNTFIDLQKAAILNTCHTVRKFLNM

SEQ ID NO: 9814 - protein, 1138 aa, Ophraella communa
MTTKAGKPRKRMKWTTDMNSFIKRSYFKITKIETDLTTYRFALHRAFIEQYPEFQHVTEQRIADQRRTILKNNLLPGPLMQQIRSEVLLELQTEDNHNVIQDTNDQLDNVRLDDHTSDDTPNIDQDENPNTDSNTQPDEHENAVAELSKAILEFDGSSPIHRPILPKLKTNKNTNRILAVINLLLNDRAKNYRTLEEIHTLIYCGAVAVLRCHNQQVRVPNKKYTEKQKSYKPWWQQRLEKSINDIRKELGQLTEFNNNAKPSRRLINRVKKILKKIKTNTGHPRYKEHLCSYMDLLRQKLKAKSKRLSRYVKCTKKKQQNHLFNTNEKLFYRQLSSAGTNNYHNLPSKDELTDYWSSIWSNPQNHNEGAAWIESETDKSNIAAMVFDNITTAEVNQAVGETNSWKAPGIDNIQNFWYKKFDSLHEVMASKFTHILQHPEDIPAFLTHGLTHMLPKTANTQDPSQYRPITCLPTLYKILTSCITNRIYRHVDQNNILAEEQKGCKRGHQGCKEQLVIDSVILRQAQKQCRNISTAFVDYRKAFDSVPHSWLIRVLNIYKVHPTIVTFLEASMKQWRTNLQLNINGQHFKTDEIAIRRGIFQGDSLSPLWFCLAMNPLSHMLNDTRYGFNLKTNRNTNCTVSHLLYMDDIKIFASNQQQIQHLLDITERFSSDIRMKFGLDKCRTLNIEKGKIVNGDVALPNGDIIAAMQNGETYKYLGFQQARLLDQKQSKSKIKDQYTQRVCSLLKSELNAGNLNRAINTYAVPVLTYSFGILRWTKTELEDIQRTTRTMMTKYRYHHPTSSVLRTTLPRKEGGRALCDIINLHNKQINKLRDFFITKSTSSNLHKFIVGADKNYSPLNLAGPNVDLEITTDAEKHVKWAQKALHGRHHHDLNQPYINKLASNRWLADGTLFPETEGFMMAIQDQVINTNNYKKFVIRDPTITSDKCRRCQQTSETIQHITSGCSTIANTDYLRRHNQLCNIIHQKLANKYGLLNTYTPYYKYNPQAVLENADFRLYYDRSIITDRQVTNNRPDIVVVDKKANSVLLVDVAVPNNNNILDKYNEKIAKYTDLAIEVGQMWHAEKVEVVPIIVSSTGLIPRSLEDSLKKLELHKNTFIDLQKAAILNTCHTVRKFLNM

SEQ ID NO: 9815 - protein, 845 aa, Galerucella pusilla
MDSLRQKLKAKSKRLSRYVKCTKRKQQNYLFNNNQKLFYRQLSGTVNNQNQSPPNKDELTEYWSSLWSKPVEHKPNAHWIRTEEEKINIEPMPFVNLTTTEVTEAIKSTSNWKTPGVDHVQNFWYKKFDSLHEAMATSFSHILQHPEDTPPFLTLGSTQLLPKTHQTHDPSQYRPITCLPTIYKILTACITNRIYRHVDQNNILSEEQKGCRRDHQGCKEQLIIDSVILKQAQKEKRNIHTAFVDYRKAFDSVPHSWLVKVLQIYKVHPTVVTFLESAMKHWRTNLHLQINGQYLQTDEISIRRGIFQGDSLSPLWFCLAMNPLSNLLNDTDYGYKLKANRNTSCTVSHLLYMDDIKIYASNQRQIQHLLNITEKFSSDIQMGFGLDKCKTLNIEKGKIVNGDVLLPNGNIITAMQNDETYKYLGFQQAKLLDQKQAKIKIRSQFTQRVTTLLKSQLNAGNLAKAINTHAIPILTYSFGILKWTKTELEDIQRTTRTMMTKHKCHHPTSSVIRTTLPRREGGRGLVDIVNLHNKQISRLQEFFIAKAETSELHEMVAKADKNYSPLNLVSPDMRLEIVTDSDKQVEWAQKALHGRHHHDLNQPHIDKEASNKWLSDGTLFPETEGFMTAIQDQVINTNNYKKFVMKDPNIATDKCRRCQQTTETIQHITSGCSALANIDYLRRHNQLCNIIHQKLANKFGLVNTYTPYYKYHPNSVLENADFRLYYDRSIITDRRVTNNRPDIVVVDKKANSVYLVDVAVPNNNNILDKYNEKIAKYTDLAIEVRQMWHAEKIEVVPIIVSSTGLIPKTLQDSLTKLGLHKNTYIDLQKAAILNTCHTVRKFLNM

SEQ ID NO: 9816 - protein, 1253 aa, Galerucella tenella
MSNCKTRLPQVGRAKCSESHTASVPSTSAVCSTDSGGSNNSIVNSGTLNLRNRQVNRHCNTLNSCRVQAGARRACSKNDESTSSSVSGRRSVTPSRATVTHTHEENNINPHPPASAVSGVTQDGTSTTTKAGKPRKRMKWTIEVNSFIMRSYFKITKMETDMTTYRYALHCAFIEHFPEFQHLTEQRIADQRRSIVKNNLLPDPTLQQIRGEVLLDLQNEENDIITDHNTHEPENAQEDNNGVEKTNIDCDKTPDNNYNTELCKALAEFNGTNPIHRPKLPKLRTNKSTNSIIAAVNLLLQNHAKDCKALEQLHTLIYCGAVAVLRIHNQRIQFPENNQSKDYKQLKPWWQRRLESSIDDIRRELGQLTEFKNNLKPSRRLTNRVRKIYRKIKTYTGHPQHEQHVSEYMDLLRQKLKAKSKRLSRYVKCTKRKQQNYLFNNNQKLFYRQLSGTVNNQNQSPPNKDELTEYWSSLWSKPVEHKSNAHWIRTEEEKINIEPMPFVNLTTTEVTEAIKSTSNWKTPGVDHVQNFWYKKFDSLHEAMATSFSHILQHPEDTPPFLTLGSTHLLPKTHQTHDPSQYRPITCLPTIYKILTACITNRIYRHVYQNNILSEEQKGCRRDHQGCKEQLIIDSVILKQAQKEKRNIHTAFVDYRKAFDSVPHSWLVKVLQIYKVHPTIVTFLESSMKHWRTNLHLQINGQYLQTDEISIRRGIFQGDSLSPLWFCLAMNPLSNLLNDTDYGYKLKANRNTSCTVSHLLYMDDIKIYASNQRQIQHLLNITEKFSSDIQMGFGLDKCKTLNIEKGKIVNGDVLLPNGNIITAMQNGETYKYLGFQQAKLLDQKQAKIKIRSQFTQRVTTSLKSQLNAGNLAKAINTFAIPILTYSFGILKWTKTELEDIQRTTRTMMTKHKCHHPTSSVIRTTLPRREGGRGLVDIVNLHNKQISRLQEFFIAKAETSELHEMVAKADKNYSPLNLVSPDMRLGIVTDYDKQVEWAQKALHGRHHHDLNQPHIDKEASNKWLSDGTLFPETEGFMMAIQDQVINTNNYKKFVMKDPNIATDKCRRCQQTTETIQHITSGCSALANIDYLRRHNQLCNIIHQKLANKFGLVNTYTPYYKYHPNSVLENADFRLYYDRSIITYRRVTNNRPDIVVVDKKANSVYLVDVAVPNNNNILDKYNEKIAKYTDLAIEVRQMWHAEKIEVVPIIVSSTGLIPKTLQDSLTKLGLHKNTYIDLQKAAILNTCHTVRKFLNM

SEQ ID NO: 9817 - protein, 1059 aa, Ophraella communa
MQQIRSEVLLELQTEDNHNVIQHTNDQLDNVRLDDHTSDDTPNIDQDENPNTDSNTQPDEHENAVAELSKAILEFDGSSPIHRPILPKLKTNKNTNRILAVINLLLNDRAKNYRTLEEIHTLIYCGAVAVLRCHNQQVRVLNKKYTEKQKSYKPWWQQRLEKSINDIRKELGQLTEFNNNAKPSRRLINRVKKILKKIKTNTGHPRYKEHLCSYMDLLRQKLKAKSKRLSRYVKCTKKKQQNHLFNTNEKLFYRQLSSAGTNNYHNLPSKDELTDYWSSIWSNPQNHNEGAAWIESETDKSNIAAMVFDNITTAEVNQAVGETNSWKAPGIDNIQNFWYKKFDSLHEVMASKFTHILQHPEDIPAFLTHGLTHMLPKTANTQDPSQYRPITCLPTLYKILTSCITNRIYRHVDQNNILAEEQKGCKRGHQGCKEQLVIDSVILRQAQKQCRNISTAFVDYRKAFDSVPHSWLIRVLNIYKVHPTIVTFLEASMKQWRTNLQLNINGQHFKTDEIAIRRGIFQGDSLSPLWFCLAMNPLSHMLNDTRYGFNLKTNRNTNCTVSHLLYMDDIKIFASNQQQIQHLLDITERFSSDIRMKFGLDKCRTLNIEKGKIVNGDVALPNGDIIAAMQNGETYKYLGFQQARLLDQKQSKSKIKDQYTQRVCSLLKSELNAGNLNRAINTYAVPVLTYSFGILRWTKTELEDIQRTTRTMMTKYRYHHPTSSVLRTTLPRKEGGRALCDIINLHNKQINKLRDFFITKSTSSNLHKFIVGADKNYSPLNLAGPNVDLEITTDAEKHVKWAQKALHGRHHHDLNQPHIDKLASNRWLADGTLFPETEGFMMAIQDQVINTNNYKKFVIRDPTITSDKCRRCQQTSETIQHITSGCSTIANTDYLRRHNQLCNIIHQKLANKYGLLNTYTPYYKYNPQAVLENADFRLYYDRSIITDRQVTNNRPDIVVVDKKANSVLLVDVAVPNNNNILDKYNEKIAKYTDLAIEVGQMWHAEKVEVVPIIVSSTGLIPRSLEDSLKKLELHKNTFIDLQKAAILNTCHTVRKFLNM

SEQ ID NO: 9818 - protein, 1259 aa, Ophraella communa
MSNFKTKLPQVGRVLRSQSHTAGVPGMSAVCSTDSGGSNNSIVTDTLTLRNRQVNRHCNTYNSCRVHVDDRRACSKNDASSSLVSGMRSVTPSMDTAITQEENITDSPPPVSAVSGVSQDGTSMTTKAGKPRKRMKWTTEMNSFIIRSYFKITKIETDLTTYRYALHRAFIEQYPEFQHVTEQRIADQRRTIIKNNLLPGPLLQQIRSEVLLELQTEIDHNVIQHTNDQLDNIRLDDHTSEDTPNMDQNENIDNDTQTDEHENAVAELSKAIAEFDGTNPIQRPILPKLRSNKNTNRILALFNLLLNDRAKDCQTLEEIHTLIYCGAVAVLQSHNQQIRFPNKRSTEKQKPFKPWWQQRLEKSINDIRKELGQLTEFNNNTKPSRRLINRVKKILKKIKTNTGHPRYKEHLCSYTDLLRQKLKAKSKRLSRYVKCTKKKQQNHLFNTNEKLFYRRLSSAGTNNYHNLPSKDEFTDYWSSIWSNPQKHNEGAAWIESETDKSNIASMVFDNITTAEVNQVVGETNSWKAPGIDNIQNFWYKKFDSLHEVMASKFTHILQHPEKIPAFLTHGLTHMLPKTANTQDPSQYRPITCLPTLYKILTSCITNRIYRHVDQNNILAEEQKGCKRGHQGCKEQLVIDSVILRQAQKQCRKISTALVDYRKAFDSVPHSWLIRILNIYKVHSTIVTFLEASMKQWRTNLQLNINGQHFKTHEIAISRGIFQGDSLSPLWFCLAMNPLSHLLNDTKYGFNLKTNRNTNYTVSHLLYMDDIKIFAPNQQQIQHLLDITERFSSDIHMEFGLDKCRTLNIEKGKIVNGDVALPNGEIIAAMQNGETYKYLGFQQARLLDQKQSKAKIRDEFSQRVSSLLKSELNAGNLNRAINTYAVTVLTYSFGILQWTKTELEDIQRTTRTMMTKYRCHHPTSSVLRTTLPRKEGGRALCDIVNLHNKQINRLRDFFITKSLSSNLHKSVIGADKKYSPLNLADPHMDLEITTDAEKQVKWAQKALHGRHHHDLSQPYIYKIASNRWLADGTLFLETEGFMMAIQDQVINTNNYKKLVIRDPTITTDKCRRCQQTSETIQHITSGCSTIANTDYLRRHNQLCNIIHQKLANKYGLLNTHTPYYKYNPQAVLENADFRLYYDRSIITDRQVTNNRPDIVVVDKKANSVLLVDGAVPNINNVLDKYNEKMAKYTDLAIEVGQMWHAEKVEVVPIIVSSTGLIPKSLEDSLKKLDLHKNTFIDLQKAAILNTCHTVRKFLNM

SEQ ID NO: 9819 - protein, 1261 aa, Ophraella communa
MSSFKTKLPQVGRVLRSQSHTAGVPSMSAVCSTDSGGSNNSIITDTLTLRNRQVNRHGNTYNSCRVQVDDRRTCSKNDASSSSVSGMRSVTSSMATATTQEETITEDPPPVSAVSGVPQNGTSMTTKTGKPRKRMKWTTEMNSFIIRSYFKITKIETDLTTYRFALHQAFIEQYPDFQHVTEQRIADQRRTIIKNNLLPGPLMQQIRSEVLLELQTEDDHNVVQHTNDQLDNVRLDDHTSDETPNIDQDENPNTDSNTQPDEHENAVAELSKAILEFDGSNPIHRPILPKLKTNKNTNRILAVINLLLNDRAKNYRTLEEIHTLIYCGAVAVIRSHNQQVRFPNKKCTKKQKPYKPWWQQRLEKSINDIRKELGQLTEFNNNAKPSRRLTNRVNKILKKIHTNTGHPRYKEHLCSYMDLLRQKLKAKSKRLSRYVKCTKKKQQNHLFNTNEKLFYRQLNSAGTNNYHKLPSKDELFDYWSSIWSNPQKHNEGAAWIESEADKSNIAPMMFDNITTADVNQAIGQINSWKAPGIDNIQNFWYKKFSSLHEVLASKFTHILQHPEDIPAFLTHGLTHMLPKTANTQDPSQYRPITCLPTLYKILTSCITNRIYRHVDQNNILAEEQKGCKRGHQGCKEQLVIDSVILRQAQKHCRNISTAFVDYRKAFDSVPHSWLLSVLNIYKVHPTIVTFLETSMKQWRTSLQVNINGQYIKTNEIVIRRGIFQGDSLSPLWFCLAMNPLSTMLNYTKYGFNLKTNRNTNCTISHLLYMDDIKIFAANQQQIQHLLDITERFSSDIHMEFGLDKCRTLNIEKGKIVNGDVALPNEDIIAAMQNGETYKYLGFQQARLLDQKQSKSKIKDQNTQRVSSLLKSELNAGNLNRAINTYAVPVLTYSFGILRWTKTELEDIQRTTRTMMTKYRYHHPISSVFRTTLPRKEGGRALCDIINLHNKQINKLRDFFITKSTSSNLHKLIVGADKNYSPLNLAGPNVDLEVTTDAEKHVKWAQKALHGRHHHDLNQPHIDEIASNRWLADGTLFPETEGFMMAIQDQVINTNNYKKFVIRDQTITSDKCRRCQQTSETIQHITSGCSTIANTDYLRRHNQLCNIIHQKLANKYGLLNTYTPYYKYNPQTVLENADFRLYYDRSIITDRQVTNNRPDIVVVDKKAKSVLLVDVAVPNNNNILDKYNEKIAKYTDLAIEVGQMWHAEKVEVVPIIVSSTGLIPKSLEDSLKKLDLHKNTFIDLQKAAILNTCHTVRKFLNM

SEQ ID NO: 9820 - protein, 1253 aa, Galerucella pusilla
MSNCKTRLPQVGRAKCSESHTASVPSTSAVYSTDSGGSNNSIVNSGTLNLRNRQVNRHCNTLNSCRVQAGARRACSKNDESTSSSVSGRRSVTPSRATVTHTHEENNINPHPPASAVSGVTQVGTSTTTKAGKPRKRMKWTIELNSFIMRSYFKITKMETDMTTYRYALHRAFIEHFPEFQHLTEQRIADQRRSIVKNNLLPDPTLQQIRGEALLDLQNEENDIITDHDTHEPENAHEDNNGVERTNIDCDKTPDNDCNTELCKALAEFNGTNPIHRPKLPKLRTNKSTNSIIAAVNLLLQNHAKDCKALEQLHTLIYCGAVAVLRIHNQRIQFPENNQSKDHKQLKPWWQRRLESSIDDIRRELGQLTEFKNNLKPSRRLTNRVRKIYRKIKTYTGHPQHEQHVFEYMDSLRQKLKAKSKRLSRYVKCTKRKQQNYLFNNNQKLFYRQLSGTENNQNQGPPNKDELTEYWSSLWSKPVEHKSNAHWIRTEEEKINIEPMSSVDLTTSEVAEAIKGTSNWKTPGVDHVQNFWYKKFDSLHEAMATSFSHILQHPEDTPPFLTLGSTHLLPKTHQTHDPSQYRPITCLPTIYKILTACITNRIYRHVDQNNILSEEQKGCRRDHQGCKEQLIIDSVILKQAQKEKRNIHTAFVDYRKAFDSVPHSWLVKVLQIYKVHPTVVTFLESAMKHWRTNLHLQINGQYLQTDEISIRRGIFQGDSLSPLWFCLAMNPLSNLLNDTDYGYKLKANRNTSCTVSHLLYMDDIKIYASNQRQIQHLLNITEKFSSDIQMGFGLDKCKTLNIEKGKIVNGDVLLPNGNIITAMQNGETYKYLGFQQAKLLDQKQAKIKIRSQFTQRVTTLLKSQLNAGNLAKAINTYAIPILTYSFGILKWTKTELEDIQRTTRTMMTKHKCHHPTSSVIRTTLPRREGGRGLVDIVNLHNKQISRLQEFFIAKAETSELHEMVAKADKNYSPLNLVSPDIRLEIVTDSDKQVEWAQKALHGRHHHDLNQPHIDKEASNKWLSDGTLFPETEGFMTAIQDQVINTNNYKKFVMKDPNIATDKCRRCQQTTETIQHITSGCSALANIDYLRRHNQLCNIIHQKLANKFGLVNTYTPYYKYHPNSVLENADFRLYYDRSIITDRRVTNNRPDIVVVDKKANSVYLVDVAVPNNNNILDKYNEKIAKYTDLAIEVRQMWHAEKIEVVPIIVSSTGLIPKTLQDSLTKLGLHKNTYIDLQKAAILNTCHTVRKFLNM

SEQ ID NO: 9821 - protein, 1116 aa, Galerucella calmariensis
MKWTIELNSFIMRSYFKITKMETDMTTYRYALHRAFTEHFPEFQHLTEQRIADQRRSIVKNNLLPDPTLQQIRGEVLLDLQNEENDIITDHDTHEPENAQKDNNGVEITNIDCDKTPDNDYNTELCKALAEFNGTNPIHRPKLPKLRTNKSTNSIIAAVNLLLQNHAKDCKALEQLHTLIYCGAVAVLRIHNQRIQFPENNQSKDYKQLKPWWQRRLESSIDDIRRELGQLTEFKNNLKPSRRLTNRVRKIYRKIKTYTGHPQHERHVFEYIDSLRQKLKAKSKRLSRYVKCTKRKQQNYLFNNNQKLFYRQLSGTESNQNQSPPNKDELTEYWSSLWSKPVEHKSNAHWIRTEEEKINIEPMSFVDLTTSEVTEAIKSTSNWKTPGVDHVQNFWYKKFDSLHEAMATSFSHILQHPEDTPPFLTLGSTHLLPKTHQTHDPSQYRPITCLPTIYKILTACITNRIYRHVDQNNILSEEQKGCRRDHQGCKEQLIIDSVILKQAQKEKRNIHTAFVDYRKAFDSVPHSWLVKVLQIYKVHPTVVTFLESAMKHWRTNLHLQINGQYLQTDEISIRRGIFQGDSLSPLWFCLAMNPLSNLLNDTDYGYKLKANRNTSCTVSHLLYMDDIKIYASNQRQIQHLLNITEKFSSDIQMGFGLDKCKTLNIEKGKIVNGDVLLPNGNIITAMQNGETYKYLGFQQAKLLDQKQAKIKIRSQFTQRVTTLLKSQLNAGNLAKAINTYAIPILTYSFGILNGTKTELEDIQRTTRTMMTKHKCHHPTSSVIRTTLPRREGGRGLVDIVNLHNKQISRLQEFFIAKAETSELHEMVAKADKNYSPLNLVSPDMRLEIVTDSDKQVEWAQKAFHGRHHHDLNQPHIDKEASNKWLSDGTLFPETEGFMMAIQDQVINTNNYKKFVIKDPNIATDKCRRCQQTTETIQHITSGCSALANIDYLRRHNQLCNIIHQKVANKCGLVNTYTPYYNYHPNSVLENADFRLYYDRSIITDRGVTNNRPDIVVVDKKANSVYLVDVAVLNNNNILDKYNEKIAKYTDLAIEVRQMWHAEKIEVVPIIVSSTGLIPKTLQDSLTKLGLHKNTYIDLQKAAILNTCHTVRKFLNM

SEQ ID NO: 9822 - protein, 1059 aa, Ophraella communa
MQQIRCEVLLELQTEIDHNVIQHTNDQLDNVRLDDHTGEDTPNIDQDENPNTDSNTQPDEHENVVTELSKAILEFDGSNPLHRPILPKLKSNKDTNKILAVINSLLKDRAKDYRTLEEIHTLIYCGAVAVVRSHNQQVRFPNRKCTEKQKPYKPWWQQRLEKSINDIRKELGQLTEFNNNAKPSRRLTNRVKKILKKIKTNTGHPRYKEHLCSYMDLLRQKLKAKSKRLSRYVKCTKKKQQNHLFNTNEKLFYRQLSSAGTNNYHNLPSKDELFDYWSSIWSNPQKHNEGAAWIESEADKSNIAPMMFDNITTADVNQAIGQINSWKAPGIDNIQNFWYKKFSSLHEVLASKFTHILQHPEDIPAFLTHGLTHMLPKTANTQDPSQYRPITCLPTLYKILTSCITNRIYRHVDQNNILAEEQKGCKRGHQGCKEQLIIDSVILRQAQKQCRNISTAFVDYRKAFDSVPHSWLISVLNIYKINPTIVSFLEASMKQWRTSLQVNINGQYIKTNDISIRRGIFQGDSLSPLWFCLAMNPLSTMLNNTKLGFNLKINKNTNCTISHLLYMDDIKIFASNQQQIQHLLDITERFSSDIHMEFGLDKCRTLNIEKGKIVNGDVALPSGDIIAARQNGETYKYLGFQQARLLDQKQSKAKIRDEFSQRVSSLLKSELNAGNLNRAINTYAVPVLTYSFGILQWTKTELEDIQRTTRTMMTKYRCHHPTSSVLRTTLPIKEGGRALCDIINLHNKQINKLRDFFVTKSLSSNLHKSVIGADKKYSPLNLADPNMDLEITTDAEKHVKWAQKALHGRHHHDLNQPHIDKIASNRWLADGTLFPETEGFMMAIQDQVINTNNYKKFVIRDPTITTDKCRRCQQTSETIQHITSGCSTIANTDYLRRHNQLCNIIHQKLANKYGLLNTYTPYYKYNPQAVLENADFTLYYDRSIITDRQVTNNRPDIVVVDKKAKSVLLVDVAVPNNNNVLDKYNEKMAKYTDLAIEVGQMWHAEKVEVVPIIVSSTGLIPKSLKDSLKKLDLHKNTFIDLQKAAILNTCHTVRKFLNM

SEQ ID NO: 9823 - protein, 845 aa, Galerucella pusilla
MDSLRQKLKAKSKRLSRYVKCTKRKQQNYLFNNNQKLFYRQLSGTENNQNQGPPNKDELTEYWSSLWSKPVEHKSNAHWIRTEEEKINIEPMSFVDLTTSEVAEAIKSTSNWKTPGVDHVQNFWYKKFDSLHEAMATSFSHILQHPEDTPPFLTLGSTHLLPKTHQTHDPSQYRPITCLPTIYKILTACITNRIYRHVDQNNILSEEQKGCRRDHQGCKEQLIIDSVILKQAQKEKRNIHTAFVDYRKAFDSVPHSWLVKVLQIYKVHPTVVTFLESAMKHWRTNLHLQINGQYLQTDEISIRRGIFQGDSLSPLWFCLAMNPLSNLLNDTDYGYKLKANRNTSCTVSHLLYMDDIKIYASNQRQIQHLLNITEKFSSDIQMGFGLDKCKTLNIEKGKIVNGDVLLPNGNIITAMQNGETYKYLGFQQAKLLDQKQAKIKIRSQFTQRVTTLLKSQLNAGNLAKAINTHAIPILTYSFGILKWTKTELEDIQRTTRTMMTKHKCHHPTSSVIRTTLPRREGGRGLVDIVNLHNKQISRLQEFFIAKAETSELHEMVAKADKNYSPLNLVSPDMRLEIVTDSDKQVEWAQKALHGRHHHDLNQPHIDKEASNKWLSDGTLFPETEGFMTAIQDQVINTNNYKKFVMKDPNIATDKCRRCQQTTDTIQHITSGCSALANIDYLRRHNQLCNIIHQKLANKFGLVNTYTPYYKYHPNSVLENADFRLYYDRSIITDRRVTNNRPDIVVVDKKANSVYLVDVAVPNNNNILDKYNEKIAKYTDLAIEVRQMWHAEKIEVVPIIVSSTGLIPKTLQDSLTKLGLHKNTYIDLQKAAILNTCHTVRKFLNM

SEQ ID NO: 9824 - protein, 1253 aa, Galerucella calmariensis
MSNCKTRLPQVGRAKCSESHTASVPSTSAVCSTDSGGSNNSIVNSGTLNLRNRQVNRHCNTLNSCRVQAGARRACSKNDESTSSSVSGRRSVTPSRATVTHTHEENNINPHPPASAVSGVTQVGTSTTTNAGKPRKRMKWTIELNSFIMRSYFKITKMETDMTTYRYALHRAFIEHFPEFQHLTEQRIADQRRSIVKNNLLPDPTLQQIRGEVLLDLQNEENDIITDHDTHEPENAQEDNNVVEKTNIDCDKTPDNDYNTELSKALAEFNGTNPIHRPKLPKLRTNKSTNSIIAAVNLLLQNHAKDCKALEQLHTLIYCGAVAVLRIHNQRIQFPGNNQSKDYKQLKPWWQRRLESSIDDIRRELGQLTEFKNNLKPSRRLTNRVRKIYRKIKTYTGHPQHEQHVFEYMDSLRQKLKAKSKRLSRYVKCTKRKQQNYLFNNNQKLFYRQLSGTVNNQNQSPPNKDELTEYWSSLWSKPVEHKSNAHWIRTEEEKINIEPMSFVDLTTSEVTEAIKSTSNWKTPGVDHVQNFWYKKFDSLHEAMATSFSHILQHPEDTPPFLTLGSTHLLPKTHQTHDPSQYRPITCLPTIYKILTACITNRIYRHVDQNNILSEEQKGCRRDHQGCKEQLIIDSVILKQAQKEKRNIHTAFVDYRKAFDSVPHSWLVKVLQIYKVHPTVVTFLESAMKHWRTNLHLQINGQYLQTDEISIRRGIFQGDSLSPLWFCLAMNPLSNLLNDTDYGYKLKANRNTSCTVSHLLYMDDIKIYASNQRQIQHLLNITEKFSSDIQMGFGLDKCKTLNIEKGKIVNGDVLLPNGNIITAMQNGETYKYLGFQQAKLLDQKQAKIKIRSQFTQRVTTLLKSQLNAGNLAKAINTYAIPILTYSFGILKWTRTELEDIQRTTRTMMTKHKCHHPTSSVIRTTLPRREGGRGLVDIVNLHNKQISRLQEFFIAKGETSELHEMVAKADKNYSPLNLVSPDMRLEIVTDSDKQVEWAQKALHGRHHHDLNQPHIDKEASNKWLSDGTLFPETEGFMMAIQDQVINTNNYKKFVIKDPNIATDKCRRCQQTTETIQHITSGCSALANIDYLRRHNQLCNIIHQKLANKFGLVNTYTPYYKYHPNSVLENADFRLYYDRSIITDRRVTNNRPDIVVVDKKANSVYLVDVAVPNNNNIMDKYNEKIAKYTDLAIEVRQMWHAEKIEVVPIIVSSTGLIPKTLQDSLTKLGLHKNTYIDLQKAAILNTCHTVRKFLNM

SEQ ID NO: 9825 - protein, 1248 aa, Ophraella communa
MSSFKTKLPQVGRVLRSQSHTAGVPGMSAVCSTDSGGSNNSIVTDTLSLRNRQVNRHCNTYNSCRVQVDDRRACSKNDASSSSVSGMRSVTPSMATAITQEENITDSPPPVSAVSGVSQDGTSMTTKAGKPRKRMKWTTEMNSFIIRSYFKITKIETDLTTYRYALHRAFIEEYPEFQHVTEQRIADQRRTIIKNNLLPGPLLQQIRSEVLLELQTEIDHNVIQHTNDQLDNIRLDDHTSEDTPNMDQNENIDNDTQTDEHENAVAELSKAIAEFDGTNPIQRPILPKLRSNKNTNRILALFNLLFNDRAKDCQTLEEIHTLIYCGAVAVLRSHNQQIRFPNKRSTEKQKPFKPWWQQRLEKSINDIRKELGQLTEFNNNAKPSRRLINRVKKILKKIKTNTGHPRYKEHLCSYMDLLRQKLKAKSKRLSRYVKCTKKKQQNHLFNTNEKLFYRKLSSAGKNNYHNLPSKDELTDYWSSIWSNPQNHNEGAAWIESETNKSNIAAMVFDNITTAEVNQAVGETNSWKAPGIDNIQNFWYKKFDSLHEVMASKFTHILQHPEDIPAFLTHGLTHMLPKTANTQDPSQYRPITCLPTLYKILNSCITNRIYRHVDQNNILAEEQKGCKRGHQGCKEQLVIDSVILRQAQKQCRNISTAFVDYRKAFDSVPHSWLIRVTFLEASMKQWRTNLQLNINGQHFKTDEIAIRRGIFQGDSLSPLWFCLAMNPLSHMLNDTKYGFNLKTNRNTNCTVSHLLYMDDIKIFASNQQQIQHLLDITERFSSDIRMEFGLDKCRTLNIEKGKIVNGDVALPNGDIIAAMQNGETYKYLGFQQARLLDQKQSKSKIKDQYTQRVCSLLKSELNAGNLNRAINTYAVPVLTYSFGILRWTKTELEDIQRTTRTMMTKYRYHHPTSSVLRTTLPRKEGGRALCDIINLHNKQINKLRDFFITKSTSSNLHKFIVGADKNYSPLNLAGPNVDLEITTDAEKHVKWAQKALHGRHHHDLNQPHIDKPASNRWLADGTLFPETEGFMMAIQDQVINTNNYKKFVIRDPTITSDKCRRCQQTSETIQHITSGCSTIANTDYLRRHNQLCNIIHQKLANKYGLLNTYTPYYKYNPQAVLENADFRLYYDRSIITDRQVTNNRPDIVVVDKKANSVLLVDVAVPNNNNILDKYNEKIAKYTDLAIEVGQMWHAEKVEVVPIIVSSTGLIPRSLEDSLKKLSLHKNTFIDLQKAAILNTCHTVRKFLNV

SEQ ID NO: 9826 - protein, 1233 aa, Ophraella communa
MSAVCSTDSGGSSNSIVTDTLTLRNRPVNRHGNTYNSCRVQVDDRRACSKNDASSSSVSGMRSVTPSMATATTEEENNTKSPPPVSAVSGVSQDGTSMTTKAGKPRKRMKWTTEMNSFIIRSYFKITKIETDLTTYRFALHRAFIEQYPEFQHVTEQRIADQRRTIIKNNLLPGPLMQQIRSEVLLELQTEDDHNVIQHTNDQLDNIRLDDHNSENTPNMDQNENIHNDTQTDEHENAVAELSKAIAEFDGTNPIRRPILPKLRSNKNTNRILALFNLLLNDRAKDCRTLEEIHTLIYCGAVAVLRSHNQQVRFPNKNCSEKKKQHKPWWQQRLEKSINDIRKELGQLTEFNNNTKPSRRLINRVKKILKKIKTNTGHPRFKEHLCSYMDLLRQKLKAKSKRLSRYVKCTKKKQQNHLFNTNEKLFYRQLSSAGTNNYHNLPSKDELTDYWSSIWSNPQKHNEGAAWIESETDKSNIASMVFDNITTAEVNQVVGETNSWKAPGIDNIQNFWYKKFDSLDEVMASKFTHILQHPEEIPTFLTHGLTHMLPKTANTQDPSQYRPITCLPTLYKILTSCITNRIYRHVDQNNILAEEQKGCKRGHQGCKEQLVIDSVILRQAQKQCRNISTAFVDYRKAFDSVPHSWLIRILNIYKVHPTILTFLEASMKQWRTNLQLNINGQHFKTDEIAIRRGIFQGDSLSPLWFCLAMNPLSTMLNDTKYGFNLKTNRNTNCTVSHLLYMDDIKIFAGNQQQMQHLLDTTERFSSDIHMEFGLDKCRTLNIEKGKIVNGDVALPNGDIIAAMQNGETYKYLGFQQARLLDQKQSKSKIKDQYTQRVSSLLKSELNAGNLNRAINTYAVPVLTYSFGILRWTKTELEDIQRTTRTMMTKYRYHHPISSVFRTTLPRKEGGRALCDIINLHNKQINKLRDFFITKSTSSNLHKFIVGADKNYSPLNLAGPNVDLEVTTDAEKHVKWAQKALHGRHHHDLNQPHIDKIASNRWLADGTLFPETEGFMMAFQDQVINTNNYKKFVIRDQTITSDKCRRCQQTSETIQHITSGCSTIANTDYLRRHNQLCNIIHQKLANKYGLLNTYTPYYKYNPQAVLENADFRLYYDRSIITDRQVTNNRPDIVVVDKKANSVLLVDVAVPNNNNILDKYKEKIAKYTDLAIEVGLMWHAEKVEVVPIIVSSTGLIPKSLEDSLKKLDLHKNTFIDLQKAAILNTCHTVRKFLNM

SEQ ID NO: 9827 - protein, 1178 aa, Ophraella communa
MSSFKTKLPQVGRVLRSQSHTAGVPGMSTVCSTDSGGSNNSIVTDTISLRNRQVNRHCNTYNSCRVQVDDRRACSKNDASSSSVSGMRSVTPSMATATTQEENNTKSPQTVSAVSGVSQDGTSMTTKAGKPRKRMKWTTEMNSFIIRSYFKITKIETDLTTYRYALHRAFIEQYPEFQHVTEQRIADQRRTIINNNLLPGPLLQQIRSEVLLELQTEIDHNVIQHTNDQLDNVRLDDHTSDDTPNIDQDGNPNTYSNTQPDEHENAVAELSKAILEFDGSSPIYRPILPKLKTNKNTNRIIAVINSLLKDRAKDYRTLEEIHTLIYCGAVAVVRSHNQQVRFPNRKCTEKQKPYKPWWQQRLEKSINDIRKELGQLTEFNNNAKSSRRLTNRVKKIFKKIKTNTGHPRYKEHLCSYMDLLRQKLKAKSKRLARYVKCTKKKQQNHLFNTNEKLFYRQLSSAGTNNYHNLPSKDELFDYWSSIWSYPQKHNEGAAWIESEAGKSNIAPMMFDNITTADVNQAIGQINSWKAPGIDNIQNFWYKKFSSLHEVLASKFTHILQHPEDIPAFLTHGLTHMLPKTANTQDPSQYRPITCLPTLYKILTSCITNRIYRHVDQNNILAEEQKGCKRGHQGCKEQLIIDSVILRQAQKQCRNISTAFVDYRKAFDSVPHSWLISVLNIYKINPTIVSFLKASMKQWRTSLQVNINGQYIKTNDISIRRGIFQGDSLSPLWFCLAMNPLSTMLNNTKLGFNLKINKNTNCTVSHLLYMDDIKIFASNQQQIQHLLDVTERFSRDVRMQFGLEKCRTLNIEKGKIINGDLALPNGEIIAAMQNGETYKYLGFQQARLLDQKQSKSKIRNEFSQRVSSILKSELNAGNLNRAINTYAVPVWTYSFGILQWTKTELEDIQRTTRTMMTKYRCHHPTSSVLRTTLPRKEGGRALCDIINLHNKQINKLRDFFVTKSLSSKLHKSVIGADKKYSPLNLADPNMDLEITTDVEKQVKWAQKALHGRHHHDLNQSHIDKIASNRWLADGTLFPETEGFMMAIQDQVISTNNYKKFVIRDPTIISDKCRRCQQTSETIQHITSGCSTIANTDYLRRHNQLCNIIHQKLANKYGLLNTYTPYYKYNPQAVLENADFRLYYDRSIITDRQVTNNRPDIVVVDKKAKSVLLVDVAVPN

SEQ ID NO: 9828 - protein, 947 aa, Ophraella communa
MIVLRTAKHWKKSTPLSTVVQLQCYEVTTNKSGFRTKNCSEKKKQHKPWWQQRLEKSINDIRKELGQLTEFKTSTKPSRRLTNRVKKIFKKIKTNTEHPRHKEHLCSYMDLLRQKLKAKSKRLSRYVKCTKKKQQNHLFDNNEKLFYRQLSSVGTNSNDNLPSKHELTDYWSSIWSNPQKHNEGAEWIQSEKDKSNIAPMLFNNITTAEVNQAVGETNSWKAPGIDNIQNFWYKKFDSLHEIIASKFTHILQHPEDIPAFLTHGLTHMLAKTANTQDPSQYRPITCLPTLYKILTSCITNRIYRHVDQNNILAEEQKGCKRGHQGCKEQLVIDSVILRQAQRQCRNISTAFVDYRKAFDSVPHSWLLSVLNIYKVHPTIVTFLETSMKQWRTSLQVNINGQYIKTNEIVIRRGIFQGDSLSPLWFCLAMNPLSTMLNDTKYGFNLKTNRNTNCTVSHLLYMDDIKIFAANQQQIEHLLDITERFSSDIHMEFGLDKCRTLNIEKGKIVNGDVALPNGDIIAAMQHGETYKYLGFQQARLLDQKQSKSKIKDQYTQRVSSLLKSELNAGNLNRAINTYAVPVLTYSFGILRWTKTELEDIQRTTRTMMTKYRYHHPISSVFRTTLPRKEGGRALCDIINLHNKQINKLRDFFITKSTSSNLHKFIVGADKNYSPLNLAGPNVDLEVTTDAEKHVKWAQKALHGRHHHDLNQPHIDKIASNRWLADGTLFPETEGFMMAIQDQVINTNNYKKFVIRDQTITSDKCRRCQQTSETIQHITSGCSTIANTDYLRRHNQLCNIIHQKLANKYGLLNTYTPYYKYNPQAVLENADFRLYYDRSIITDRQVTNNRPDIVVVDKKANSVLLVDVAVPNNNNILDKYNEKIAKYTDLAIEVGQMWHAEKVEVVPIIVSSTGLIPKSLEDSLKKLDLHKNTFIDLQKSGNFKHMSYC

SEQ ID NO: 9829 - protein, 1253 aa, Galerucella pusilla
MSNCKTRLPQVGRAKCSESHTASVPSTSAVCSTDSGGSNNSIVNSGTLNLRNRQVNRHCNTLNSCRVQAGARRACSKNDESTSSSVSGRRSVTPSRATVTHTHEENNINPHPPASAVSGVTQVGTSTTTKAGKPKKRMKWTIELNSFIMRSYFKITKMETDMTTYRYALHRAFIEHFPEFQHLTEQRIADQRRSIVKNNLLPDPTLQQIRGEVLLDLQNEENDIITDHDTHEPENAQEDNNGVEKTNIDCDKTPDNDYNTELCKALVEFNGTNPIHRPKLPKLRTNKSTNSIIAAVNLLLQNHAKDCKALEQLHTLIYCGAVTVLRIHNQPIQFPGNNQSKDYKQLKPWWQRRLESSIDDIRKELGQLTEFKNSLKPSRRLTNRVRKIYRKIKTYTGHPQHEQHVFEYMDSLRQKLKAKSKRLSRYVKCTKRKQQNHLFNNNQKLFYRQLSGTVNNQNQSPPNKDELTEYWSSLWSKPVEHKSNAHWIRTEEEKINIEPMPFVNLTTTEVTEAIKSTSNWKTPGVDHVQNFWYKKFDSLHEAMATSFSHILQHPEDTPPFLTLGSTHLLPKTHQTHDPSQYRPITCLPTIYKILTACITNRIYRHVDQNNILSEEQKGCRRDHQGCKEQLIIDSVILKQAQKEKRNIHTAFVDYRKAFDSVPHSWLVKVLQIYKVHPTVVTFLESAMKHWRTNLHLQINGQYLQTDEISIRRGIFQGDSLSPLWFCLAMNPLSNLLNDTDYGYKLKANRNTSCTVSHLLYMDDIKIYASNQRQIQHLLNITETFSSDIQMGFGLDKCKTLNIEKGKIVNGDVLLPNGNIITAMQNGETYKYLGFHQAKLLDQKQAKIKIRSQFTQRVTTLLKSQLNAGNLAKAINTHAIPILTYSFGILKWTKTELEDIQRTTRTMMTKHKCHHPTSSVIRTTLPRREGGRGLVDIVNLHNKQISRLQEFFIAKAETSELHEMVAKADKNYSPLNLVSPDMRLEIVTDSDKQVEWAQKALHGRHHHDLNQPHIDKEASNKWLSDGTLFPETEGFMTAIQDQVISTNNYKKFVMKDPNIATDKCRRCQQTTETIQHITSGCSALANIDYLRRHNQLCNIIHQKLANKFGLVNTYTPYYKYHPNSVLENADFRLYYDRSIITDRRVTNNRPDIVVVDKKANSVYLVDVAVPNNNNILDKYNEKIAKYTDLAIEVRQMWHAEKIEVVPIIVSSTGLIPKTLQDSLTKLGLHKNTYIDLQKAAILNTCHTVRKFLNM

SEQ ID NO: 9830 - protein, 1105 aa, Galerucella calmariensis
MRSYFKITKMETDMTTYRYALHRAFIEHFPEFQHLTEQRIADQRRSIVKNNLLPDPTLQQIRGEVLLDLQNEENDIITDHDTHEPENAQEDNNGVEITNIDCDKTPDNDYNTELCKALAEFNGTNPIHRPKLPKLRTNKSTNSIIAAVNLLLQNHAKDCKALEQLHTLIYCGAVAVLRIHNQRIQFPGNNQSKDYKQLKPWWQRRLESSIDDIRRELGQLTEFKNNLKPSRRLTNRVRKIYRKIKTYTGHPQHERHVFEYIDSLRQKLKAKSKRLSRYVKCTKRKQQNYLFNNNQKLFYRQLSGTENNQNQSPPNKDELTEYWSSLWSKPVEHKSNAHWIRTEEEKINIEPMSFVDLTTSEVTEAIKSTSNWKTPGVDHVQNFWYKKFDSLHEAMATSFSHILQHPEDTPPFLTLGSTHLLPKTHQTHDPSQYRPITCLPTIYKILTACITNRIYRHVDQNNILSEEQKGCRRDHQGCKEQLIIDSVILKQAQKEKRNIHTAFVDYRKAFDSVPHSWLVKVLQIYKVHPTVVTFLESAMKHWRTNLHLQINGQYLQTDEISIRRGIFQGDSLSPLWFCLAMNPLSNLLNDTDYGYKLKANRNTSCTVSHLLYMDDIKIYASNQRQIQHLLNITEKFSSDIQMGFGLDKCKTLNIEKGKIVNGDVLLPNGNIITAMQNGETYKYLGFQQAKLLDQKQAKIKIRSQFTQRVTTLLKSQLNAGNLAKAINTYAIPILTYSFGILKWTKTELEDIQRTTRTMMTKHKCHHPTSSVIRTTLPRREGGRGLVDIVNLHNKQISRLQEFFIAKAETSELHEMVAKADKNYSPLNLVSPDMRLEIVTDSDKQVEWAQKALHGRHHHDLNQPHIDKEASNKWLSDGTLFPETEGFMMAIQDQVINTNNYKKFVMKDPNIATDKCRRCQQTTETIQHITSGCSALANIDYLRRHNQLCNIIHQKLANKFGLVNTYTPYYKYHPNSVLENADFRLYYDRSIITDRRVTNNRPDIVVVDKKANSVYLVDVAVPNNNNILDKYNEKIAKYTDLAIEVIQMWHAEKIEVIPIIVSSTGLIPKTLQDSLTKLGLHKNTYIDLQKAAILNTCHTVRKFLNM

SEQ ID NO: 9831 - protein, 1253 aa, Galerucella tenella
MSNCKTRLPQVGRAKCSESHTASVPSTSAVCSTDSGGSNNSIVNSGTLNLRNRQVNRHCNTLNSCRVQAGARRACSKNDESTSSSVSGRRSVTPSRATVTHTHEENNINPHPPASAVSGVTQVGTSTTTKAGKPRKRMKWTIELNSFIMRSYFKITKMETDMTTYRYALHRAFIEHFPEFQHLTEQRIADQRRSIVKNNLLPDPTLQQIRGEVLLDLQNEENDIITDHDTHEPENAQEDNNGVEKTNIDCDKTPDNDFNTELCKALAEFNGTNPIHRPKLPKLRTNKSTNSIIAAVNLLLQDHAKDCKALEQLHTLIYCGAVAVLRIHNQRIQLPGKNQSKDYKQLKPWWQRRLESSIDDIRRELGQLTEFKNNLKPSRRLTNRVRKIYGKIKTYTGHPQHEQHVFEYMDSLRQKLKAKSKRLSRYVKCTKRKQQNYLFNNNQKLFYRQLSGTVNNQNQSPPNKDELTEYWSSLWSKPVEHKSNAHWIRTEEEKINIEPMSFVDLTTSEVTEAIKSTSNWKTPGVDHVQNFWYKKFDSLHEAMAASFSHILQHPEDTPPFLTLGSTHLLPKTHQTHDPSQYRPITCLPTIYKILTACITNRIYRHVDQNNILSEEQKGCRRDHQGCKEQLIIDSVILKQAQKEKRNIHTAFVDYRKAFDSVPHSWLVKVLQIYKVHPTVVTFLESAMKHWRTNLHLQINGQYLQTDEISIRRGIFQGDSLSPLWFCLAMNPLSNLLNDTDYGYKLKANRNTSCTVSHLLYMDDIKIYASNQRQIQHLLNITEKFSSDIQMGFGLDKCKTLNIEKGKIVNGDVLLPNGNIITAMQNGETYKYLGFQQAKLLDQKQAKIKIRSQFTQRVTTLLKSQLNAGNLAKAINTYAIPILTYSFGILKWTKTELEDIQRTTRTMMTKHKCHHPTSSVIRTTLPRREGGRGLVDIVNLHNKQISRLQEFFIAKAETSELHEMVAKADKNYSPLNLVSPDMRLEIVTDSDKQVEWAQKALHGRHHHDLNQPHIDKEASNKWLSDGTLFPETEGFMTAIQDQVINTNNYKKFVMKDPNIATDKCRRCQQTTETIQHITSGCSALANTDYLRRHNQLCNIIHQKLANKFGLVNTYTPYYKYHPNSVLENADFRLYYDRSIITDRRVTNNRPDIVVVDKKANSVYLVDVAVPNNNNILDKYNEKIAKYADLAIEVRQMWHAEKIEVVPIIVSSTGLIPKTLQDSLTKLGLHKNTYIDLQKAAILNTCHTVRKFLNM

SEQ ID NO: 9832 - protein, 1261 aa, Ophraella communa
MSSFKTKLPQVGRVLRLQSHTAGVPGMSAVCSTDFGGSNNSIVTDTLSLRNRQVNRHCNTYNSCRVQVDDRRACSKNDASSSSVSGMRSVTPSMATATTQEENNTKSPQTVSAVSGVSQDGTSTTTKAGKPRKRMKWTIEMNSFIIRSYFKITKIETDLTTYRFALHRAFIEQYPELQHVTEQRIADQRRTILKNNLLPGPLMQQIRSEVLLELQTEDNHNVIQHTNDQLDNVRLDDHTSDDTPNIDQDENPNTDSNTQPDEHENAVAELSKAILEFDGSSPIHRPILPKLKTNKNTNRILAVINLLLNDRAKNYRTLEEIHTLIYCGAVAVLRCHNQHVRVPNKKYTEKQKSYKPWWQQRLEKSINDIRKELGQLTEFNNNAKPSRRLINRVKKILKKIKTNTGHPRYKEHLCSYMDLLRQKLKAKSKRLSRYVKCTKKKQQNHLFNTNEKLFYRQLSSAGTNNYHNLPSKDELTDYWSSVWSNPQNHNEGAAWIESETDKSNIAAMVFDNITTAEVNQAVGETNSWKAPGIDNIQNFWYKKFDSLHEVMASKFTHILQHPEDIPAFLTHGLTHMLPKTANTQDPSQYRPITCLPTLYKILTSCITNRIYRHVDQNNILAEEQKGCKRGHQGCKEQLVIDSVILRQAQKQCRNISTAFVDYRKAFDSVPHSWLIRVLNIYKVHPTIVTFLEASMKQWRTNLQLNINGQHFKTDEIAIRRGIFQGDSLSPLWFCLAMNPLSHMLNDTKYGFNLKTNRNTNCTVSHLLYMDDIKIFASNQQQIQHLLDITERFSSDIRMEFGLDKCRTLNIEKGKIVNGDVALPNGDIIAAMQNGETYKYLGFQQARLLDQKQSKSKIKDQYTQRVCSLLKSELNAGNLNRAINTYAIPVLTYSFGILRWTKTELEDIQKTTRTMMTKYRYHHPTSSVLRTTLPRKEGGRALCDIINLHNKQINKLRDFFITKSTSSNLHKFIVGADKNYSPLNLAGPNVDLEITTDAEKHVKWSQKALHGRHHHDLNQPHIDKLASNRWLADGTLFPETEGFMMAIQDQVINTNNYKKFVIRDPTITSDKCRRCQQTSETIQHITSGCSTIANTDYLRRHNQLCNIIHQKLANKYGLLNTYTPYYKYNPQAVLENADFRLYYDRSIITDRQVTNNRPDIVVVDKKANSVLLVDVAVPNNNNILDKYNEKIAKYTDLAIEVGQMWHAEKVEVVPIIVSSTGLIPRSLEDSLKKLSLHKNTFIDLQKAAILNTCHTVRKFLNM

SEQ ID NO: 9833 - protein, 762 aa, Ophraella communa
MDKSNIAPMMFDKITTAEVNQAIGETNSWKAPGIDNIQNFWYKKFDSLHELLASKFTHILQHPEDIPAFFTHGLTHMLPKTANTQDPSQYRPITCLPTLYKILTSCITNRIYRHVDQNNILAEEQKGCKRGHQGCKEQLIIDSVILKQAQKQSRNISTAFVDYRKAFDSVPHSWLISILKIYKVHPSIVNFLETSMKQWRTNLQFNINGQYLKTDEIAIRRGIFQGDSLSPLWFCLAMNPLSALLNNTKYGFNLKTNRNTNCTVSHLLYMDDIKIFAANQQQVQHLLDITERFSSDIHMEFGLDKCRTLNIEKGKIVNGDVALPNGDIIAAMQNGETYKYLGFQQARLLDQKQSKSKIKDQYTQRVSSLLKSELNAGNLNRAINTYAVPVLTYSFGILRWTKTELEDIQRTTRTMMTKYRYHHPISSVFRTTLPRKEGGRALCDIINLHNKQINKLRDFFITKSTSSNLHKFVVGSDKNYSPLNLAGPNVDLEVTTDTEKHVKWAQKALHGRHHHDLNQPHIDKIASNRWLADGTLFPETEGFMMAIQDQVINTNNYKKFVIRDQTITSDKCRRCQQTSETIQHITSGCSTIANTDYLRRHNQLCNIIHQKLANKYGLLNTYTPYYKYNPQAVLENADFRLYYDRSIITDRQVTNNRPDIVVVDKKANSVLLVDVAVPNNNNILDKYNEKIAKYTDLAIEVGQMWHAEKVEVVPIIVSSTGLIPKSLEDSLKKLDLHKNTFIDLQKAAILNTCHTVRKFLNM

SEQ ID NO: 9834 - protein, 1238 aa, Ophraella communa
MSSFKTKLPQVGRVLRSQSHTAGVPSMSAACSTDSGGSNNSIITDTLTLRNRQVNRHGNTYNSCRVQVDDRRACSKNDASSSSVSGMRSVTSSMATATTQEETITEDPPPVSAVSGVPQDGTSMTTKTGKPRKRMKWTTEMNSFIIRSYFKITKIETDLTTYRFALHQAFIEQYPDFQHVTEQRIADQRRTIIKNNLLPGPLMQQIRSEVLLELQTEDDHNVIQHTNDQLDNVRLDDHTSDETPNIDQDENPNTDSNTQPDEHENAAAELSKAILEFDGSNPIHRPILPKLKSNKNTNRILASINSLLKDRAKDYRTLEEIHTLIYCGAVTVLRCHNQQVRFPNKKCTEKQKPYKPWWQQRLEKSINDIRKELGQLTEFNNNAKPSRRLTNRVKKIFKKIKTNTGHPRYKEHLCSYMDLLRQKLKAKSKRLSRYVKCTKKKQQNHLFNTNEKLFYRQLSSAGTNNYHNLPSKDELFDYWSSIWSNPQKHNEGAAWIESEADKSNIAPMMFDNITTADLNQAIGQINSWKAPGIDNIQNFWYKKFSSLHEVLASKFTHILQHPEDIPAFLTNGLTHMLPKTANTQDPSQYRPITCLPTLYKILTSCITNRIYRHVDQNNILTEEQKGCKRGHQGCKEQLIIDSVILRQAQKQCRNISTAFVDYRKEFDSVPHSWLISVLNIYKINLTIVSFLEASMKQWRTSLQVNINGQYIKTNDISIRRGIFQGDSLSPLWFCLAMNPLSTMLNNTQLGFNLKINKNTNCTVSHLLYMDDIKIFASNQQQIQHLLDVTERFSKDVHMKFGLDKCRTLNIEKGKIINGDLALPNGDIIAAMQNGETYKYLGFQQARLLDQKQSKSKIRDEFSQRVSSILKSELNAGNLNRAINTYAVPVLTYSFGILQWTKTELEDIQRTNRTMMTKYRCHHPTSSVLRTTLPRKEGGRALCDIRNLHNKQINKLRDFFVTKSLSSNLHKSVIGADKKYSPLNLADPNIDLEITTDAEKQVKWAQKALHGRHHHDLNQPHIDKIASNRWLADGTLFPETEGFMLAIQDQVISTNNYKKFVIKDQTIISDKCRRCQQTSETIQHITSGCSTIANTDYLRRHNQLCNIIHQKLANKYGLLNTYTPYYKYNPQAVLENAEFRLYYDRSIITDRQVTNNRPDIVVVDKKANSVLLVDVAVPNNNNILDKYNEKIAKYTDLAIEVGQMWHAEKVEVVPIIVSSTGLIPRSLEDSLKKLVCVCV

SEQ ID NO: 9835 - protein, 1253 aa, Galerucella pusilla
MSNCKTRLPQVGRAKCSESHTASVPSTSAVCSTDSGGSNNSIVNSGTLNLRNRQVNRHCNTLNSCRVQAGARRACSKNDESTSSSVSGRRSVTPSRATVTHTHEENNINPHPPASAVSGVTQVGTSTTTKAGKPRKRMKWTIELNSFIMRSHFKITKMETDMTTYRYALHRAFTEHFPEFQHLTEQRIADQRRSIVKNNLLPDPTLQQIRGEVLLDLQNEENDIITDHDTHEPENAQEDNNGVEKTNIDCDKTPDNDYNTELCKALVEFNGTNPIHRPKLPKLRTNKSTNSIIAAVNLLLQNHAKDCKALEQLHTLIYCGAVTVLRIHNQPIQFPGNNQSKDYKQLKPWWQRRLESSIDDIRRELGQLTEFKNSLKPSRRLTNRVRKIYRKIKTYTGHPQHEQHVFEYMDSLRQKLKAKSKRLSRYVKCTKRKQQNYLFNNNQKLFYRQLSGTVNNQNQSPPNKDELTEYWSSLWSKPVEHKSNPHWIRTEEEKINIEPMPFVNLTTTEVTEAIKSTSNWKTPGVDHVQNFWYKKFDSLHEAMATSFSHILQHPEDTPPFLTLGSTHLLPKTHQTHDPSQYRPITCLPTIYKILTACITNRIYRHVDQNNILSEEQKGCRRDHQGCKEQLIIDSVILKQAQKEKRNIHTAFVDYRKAFDSVPHSWLVKVLQIYKVHPTVVTFLESAMKHWRTNLHLQINGQYLQTDEISIRRGIFQGDSLSPLWFCLAMNPLSNLLNDTDYGYKLKANRNTSCTVSHLLYMDDIKIYASNQRQIQHLLNITEKFSSDIQMGFGLDKCKTLNIEKGKIVNGDVLLPNGNIITAMQNGETYKYLGFQQAKLLDQKQAKIKIRSQFTQRVTTLLKSQLNAGNLAEAINTHAIPILTYSFGILKWTKTELEDIQRTTRTMMTKHKCHHPTSSIIRTTLPRREGGRGLVDIVNLHNKQISRLQEFFIAKAETSELHEMVAKADKNYSPLNLVSPDMRLEIVTDSDKQVEWAQKALHGRHHNDLNQPHIDKEASNKWLSDGTLFPETEGFMTAIQDQVINTNNYKKFVMKDPNIATDKCRRCQQTTETIQHITSGCSALANIDYLRRHNQLCNIIHQKLANKFGLVNTYTPYYKYHPNSVLENADFRLYYDRSIITDRRVTNNRPDIVVVDKKANSVYLVDVAVPNNNNILDKYNEKIAKYTDLAIEVRQMWHAEKIEVVPIIVSSTGLIPKTLQDSLTKLGLHKNTYIDLQKAAILNTCHTVRKFLNM

SEQ ID NO: 9836 - protein, 1253 aa, Galerucella calmariensis
MSNCKTRLPQVGRAKCSESHTASVPSTSAVCSTDSGGSNNSIVNSGTLNLRNRQVNRHCNTLNSCRVQVGARRACSKNDESTSSSVSGRRSVTPSRATVTHTHEENNINPHPPASAVSGVTQVSTSTTTKAGKPRKRMKWTIELNSFIMRSYFKITKMETDMTTYRYALHCAFIEHFPEFQHLTEQRIADQRRSIVKNNLLPDPTLQQIRGEVLLDLQNEENDIITDHDTHEPENAQEDNNGVEKTNIDCDKTPDNDYNTELCKALAEFNGTNPIHRPKLPKLRTNKSTNSIIAAVNLLLQNHAKDCKALEQLHTLIYCGAVAVLRIHNQRIQFPENNQSKDYKQLKPWWQRRLESSIDDIRRELGQLTEFKNNLKPSRRLTNRVRKIYRKIKTYAGHPQHEQHVSEYMDLLRQKLKAKSKRLSRYVKCTKRKQQNYLFNNNQKLFYRQLSGTVNNQNQSPPNKDELTEYWSSLWSKPVEHKSNAHWIRTEEEKINIEPMPFVNLTTTEVAEAIKSTSNWKTPGVDHVQNFWYKKFDSLHEAMATSFSHILQHPEDTPSFLTLGSTHLLPKTHQTHDPSQYRPITCLPTIYKILTACITNRIYRHVDQNNILSEEQKGCRRDHQGCKEQLIIDSVILKQAQKEKRNIHTAFVDYRKAFDSVPHSWLVKVLQIYKVHPTIVTFLESSMKHWRTNLHLQINGQYLQTDEISIRRGIFQGDSLSPLWFCLAMNPLSNLLNDTDYGYKLKANRNTSCTVSHLLYMDDIKIYASNQRQIQHLLNITEKFSSDIQMGFGLDKCKTLNIEKGKIVNGDVLLPNGNIITAMQNGETYKYLGFQQAKLLDQKQAKIKIRSQFTRRVTTLLKSQLNAGNLAKAINTYAIPILTYSFGILKWTKTELEDIQRTTRTMMTKHKCHHPTSSVIRTTLPRREGGRGLVDIVNLHNKQISRLQEFFIAKAETSELHEMVAKADKNYSPLNLVNPDMRLGIVTDSDKQVEWAQKALHGRHHHDLNQPHIDKEASNKWLSDGTLFPETEGFMMAIQDQVINTNNYKKFVMKDPNIATDKCRRCQQTTETIQHITSGCSALANIDYLRRHNQLCNIIHQKLANKFGLVNTYTPYYKYHPNSVLENADFRLYYDRSIITDRRVTNNRPDIVVVDKKANSVYLVDVAVPNNNNILDKYNEKIAKYTDLAIEVRQMWHAEKIEVVPIIVSSTGLIPKTLQDSLTKLGLHKNTYIDLQKAAILNTCHTVRKFLNM

SEQ ID NO: 9837 - protein, 1253 aa, Galerucella tenella
MSNCKTRLPQVGRAKCSESHTASVPSTSAVCSTDSGGSNNSIVNSGTLNLRNRQVNRHCSTLNSCRVQAGARRACSKNDESTSSSVSGRRSVTPSRATVTHTHEENNINPHPPASAVSGVTQVGTSTTTKAGKPRKRMKWTIEVNSFIMRSYFKITKMETDMTTYRYALHCAFIEHFPEFQHLTEQRIADQRRSIVKNNLLPDPTLQQIRGEVLLDLQNEENDIITDHDTHEPENAQEDNNGVEKTNIDCDKTPDNDFNTELCKALAEFNGTNPIHRPKLPKLRTNKSTNSIIAAVNLILQDHAKDCKALEQLHTLIYCGAVAVLRIHNQRIQLPGNNQSKDYKQLKPWWQRRLESSIDDIRRELGQLTEFKNNLKPSRRLTNRVRKIYGKIKTYTGHPQHEQHVFEYMDSLRQKLKAKSKRLSRYVKCTKRKQQNYLFNNNQKLFYRQLSGTVNNQNQSPPNKDELTEYWSSLWSKPVEHKSNADWIRTEEEKINIEPISFVDLTTSEVTEAIKSTSNWKTPGVDHVQNFWYKKFDSLHEAMATSFSHILQHPEDTPPFLTLGSTHLLPKTHQTHDPSQYRPITCLPTIYKILTACITNRIYRHVDQNNILSEEQKGCRRDHQGCKEQLIIDSVILKQAQKEKRNIHTAFVDYRKAFDSVPHSWLVKVLQIYKVHPTIVTFLESSMKHWRTNLHLQINGQYLQTDEISIRRGIFQGDSLSPLWFCLAMNPLSNLLNDTDYGYKLKANRNTSCTVSHLLYMDDIKIYASNQRQIQHLLNITEKFSSDIQMGFGLDKCKTLNIEKGKIVNGDVLLPNGNIITAMQNGETYKYLGFQQAKLLDQKQAKIKIRSQFTQRVTTSLKSQLNAGNLAKAINTYAIPILTYSFGILKWTKTELEDIQKTTRTMMTKHKCHHPTSSVIRTTLPRREGGRGLVDIVNLHNKQISRLQEFFIAKAETSELHEMVAKADKNYSPLNLVSPDMRLGIVTDSDKQVEWAQKALHGRHHHDLNQPHIDKEASNKWLSDGTLFPETEGFMMAIQDQVIHTNNYKKFVMKDPNIATDKCRRCQQTTETIQHITSGCSALANIDYLRRHNQLFNIIHQKLANKFGLVNTYTPYYKYHPNSVLENADFRLYYDRSIITDRRVTNNRPDIVVVDKKANSVYLVDVAVPNNNNILDKYNEKIAKYTDLAIEVRQMWHAEKIEVVPIIVSSTGLIPKTLQDSLTKLGLHKNTYIDLQKAAILNTCHTVRKFLNM

SEQ ID NO: 9838 - protein, 845 aa, Ophraella communa
MDLLRQKLKAKSKRLSRYVKCTKKKQQNHLFNTNEKLFYRQLSSAGTNNYHNLPSKDDFTDYWSLIWSNPQKHNEGAAWIESETDKLNIAPMLFNNITTAEVNQAVEETNSWKAPGIDNIQNFWYKKFDSLHEVMASKFTHILQHPEDIPAFLTHGLTHMLPNTANTQDPSQYRPITCLPTLYKILTSCITNRIYRHVDQNNILAEEQKGCKRGHQGCKEQLIIDSVILRQAQKKCRNISTAFVDYRKAFDSVPHSWLISVLNIYKINPTIVSFLEASMKQWRTSLQVNINGQYIKTNDISIRRGIFQGDSLSPLWFCLAMNPLSTMLNNIKLGFNLKINKNTNCTVSHLLYMDDIKIFASNQQQIQHLLDVTERFSRDVRMKFGLDKCRTLNIEKGKIINGDLALPNGDIIAAMQNGETYKYLGFQQARLLDQKQSKSKIRDEFSQRVSSILKSELNAGNLNQAINTYAVPVLTYSFGILQWTKTELEDIQRTTRTMMTKYRCHHPTSSVLRTTLPRKEGGRALCDIINLHNKQINKLRDFFVTKSLSSNLHKSVIGADKKYSPLNLADPNMDLEITTDVEKQVKWTQKALHGRHHHDLNQPHIDKIASNRWLADGTLFPETEGFMMAIQDQVISTNNYKKFVIRDPTITSDKCRRCQQTSETIQHITSGCSTIANTDYLRRHNQLCNIIHQKLANKYALLNTYTPYYKYNPQAVLENADFRLYYDRSIITDRQVTNNRPDIVVVDKKAKSVLLVDVAVPNNNNVLDKYNEKMAKYTDLAIEVGQMWHAEKVEVVPVIVSSTGLIPKSLEESLKKLDLHKNTFIDLQKAAILNTCHTVRKFLNM

SEQ ID NO: 9839 - protein, 1116 aa, Ophraella communa
MNSFIIRSYFKITKIETDLTTYRYALHRAFIEQYPEFQHVTEQRIADQRRTIIKNNLLPGPLLQQIRSEVLLELQTEIDHNVIQHTNDQLDNIRLDDHTSEDTPNMDQNENIDNDTQTDEHENAVAELSKAIAEFDGTNPIQRPILPKLRSNKNTNRILFNLLLNDRAKDCQTLEEIHTVIYCGAVAVLRSHNQQIRFPNKRSTEKQKLFKPWWQQRLEKSINDIRKELGQLTEFNNTKPSRRLINRVKKILKKIKTNTGHPRYKEHLCSYMDLLRQKLKAKSKRLSRYVKCTKKKQQNHLFNTNEKLFYRQLSSAGTNNYHNLPSKDELTDYWSSIWSNPQKHNEGAAWIESETDKSNIASMVFDNITTAEVNQVVRETNSWKAPGIDNIQNFWYKKFDSLHEVMASKFTHILQHPEEIPAFLTHGLTHMLPKTANTQDPSQYRPITCLPTLYKILTSSITNRIYRHVDQNNILAEEQKGCKRGHQGCKEQLIIDSVILRQAQKQCRNISTAFVDYRKAFDSVPHSWLISILNIYKIKPTIVSFLEASMKQWRTSLQVNINGQYIKTNDISIRRGIFQGDSLSPLLFCLAMNPLSTMLNNTKLGFNLKINKNTNCTVSHLLYMDDIKIFASNQQQIQHLLDVTERFSRDVRMQFGLDKCRTLNIEKGKIINGDLALPNGEIIAAMQNGETYKYLGFQQARLLDQKQSKSKIRNEFSQRVSSILKSELNAGNLNRAISTYAVPVLTYSFGILQWTKTELEDIQRTTRTMMKKYRCHHPTSSVLRTTLPRKEGGRALCDIINLHNKQINKLRDFFVTKSLSSNLHKSVIGADKKYSPLNLADPNMDLEITTDAEKHVKWAQKALHGRHHHDLNQPHIDKIASNRWLADGTLFPETEGFMMDIQDQVINTNNYKKCVIRDPTITTDKCRRCQQTSETIQHITSGCSTIANTDYLRRHNQLCNIIHQKLANKYGLLNTYTPYYKYNPQAVLENADFRLYYDRSIITDRQVTNNRPDIVVVDKKAKSVLLVDVAVPNNNNVLDKYNEKMAKYTDLAIEVGQMWHAEKVEVVPIIVSSTGLIPKSLEDSLKKLDLHKNTFIDLQKAAILNTCHTVRKVLNM

SEQ ID NO: 9840 - protein, 877 aa, Galerucella pusilla
MIIIIIIIIYRIYRKIKTYTGHPQHEQHVFEYMDSLRQKLKAKSKRLSRYVKCTKRKQQNYLFNNNQKLFYRQLSGTVNNQNQSPPNKDELTEYWSSLWSKPVEHKSNAHWIRTEEEKINIEPMPFVNLTTTEVTEAIKSTSNWKTPGVDHVQNFWYKKFDSLHEAMATSFSHILQHPEDTPPFLTLGSTQLLPKTHQTHDPSQYRPITCLPTIYKILTACITNRIYRHVDQNNILSEEQKGCRRDHQGCKEQLIIDSVILKQAQKEKRNIHTAFVDYRKAFDSVPHSWLVKVLQIYKVHPTVVTFLESAMKHWRTNLHLQINGQYLQTDEISIRRGIFQGDSLSPLWFCLAMNPLSNLLNDTDYGYKLKANRNTSCTVSHLLYMDDIKIYASNQRQIQHLLNITEKFSSDIQMGFGLDKCKTLNIEKGKIVNGDVLLPNGNIITAMQNGETYKYLGFQQAKLLDQKQAKIKIRSQFTQRVTTLLKSQLNAGNLAKAINTYAIPILTYSFGILKWTKTELEDIQRTTRTMMTKHKCHHPTSSVIRTTLPRREGGRGLVDIVNLHNKQISRLQEFFIAKAETSELHEMVAKADKNYSPLNLVSPDMRLEIVTDSDKQVEWAQKALHGRHHHDLNQPHIDKEASNKWLSDGTLFPETEGFMTAIQDQVINTNNYKKFVMKDPNIATDKCRRCQQTTETIQHITSGCSALANIDYLRRHNQLCNIIHQKLANKFGLVNTYTPYYKYHPNSVLENADFRLYYDRSIITDRRVTNNRPDIVVVDKKADSVYLVDVAVPNNNNILDKYNEKTAKYTDLAIEVRQMWHAEKIEVVPIIVSSTGLIPKTLQDSLTKLGLHKNTYIDLQKAAILNTCHTVRKFLNM

SEQ ID NO: 9841 - protein, 1253 aa, Galerucella calmariensis
MSNCKTRLPQVGRAKCSESHTASVPSTSAVCSTDSGGSNNSIVNSGTLNLRNRQVNRHCNTLNSCRVQVGARRACSKNDESTSSSVSGRRSVTPSRATVTHTHEENNINPHPPASAVSGVTQVGTSTTTKAGKPRKRMKWTIELNSFIMRSYFKITKMETDMTTYRYALHCAFIEHFPEFQHLTEQRIADQRRSIVKNNLLPDPTLQQIRGEVLLDLQNEENDIITDHDTHEPENAQEDNNGVEKTNIDCDKTPDNDYNTELCKALAEFNGTNPIHRPKLPKLRTNKSTNSIIAAVNLLLQNHAKDCKALEQLHTLIYCGAVAVLRIHNQRIQFPENNQSKDYKQLKPWWQRRLESSIDDIRRELGQLTEFKNNLKPSRRLTNRVRKIYRKIKTYAGHPQHEQHVSEYMDLLRQKLKAKSKRLSRYVKCTKRKQQNYLFNNNQKLFYRQLSGTVNNQNQSPPNKDELTEYWSSLWSKPVEHKSNAHWIRTEEEKINIEPMPFVNLTTTEVTEAIKSTSNWKTPGVDHVQNFWYKKFDSLHEAMATSFSHILQHPEDTPPFLTLGSTHLLPKTHQTHDPSLYRPITCLPTIYKILTACITNRIYRHVDQNNILSEEQKGCRRDHQGCKEQLIIDSVILKQAQKEKRNIHTAFVDYSKAFDSVPHSWLVKVLQIYKVHPTIVTFLESSMKHWRTNLHLQINGQYLQTDEISIRRGIFQGDSLSPLWFCLAMNPLSNLLNDTDYGYKLKANRNTSCTVSHLLYMDDIKIYASNQRQIQHLLNITEKFSSDIQMGFGLDKCKTLNIEKGKIVNGDVLLPNGNIITAMQNGETYKYLGFQQAKLLDQKQAKIKIRSQFTQRVTTLLKSQLNAGNLAKAINTYAIPILTYSFGILKWTKTELEDIQRTTRTMMTKHKCHHPTSSVIRTTLPRREGGRGLVDIVNLHNKQISRLQEFFIAKAETSELHEMVAKADKNYSPLNLVSPDMRLGIVTDSDKQVEWAQKALHGRHHHDLNQPHIDKEASYKWLSDGTLFPETEGFMMAIQDQVINTNNYKKFVMKDPNIATDKCRRCQQTTETIQHITSGCSALANIDYLRRHNQLCNIIHQKLANKFGLVNTYTPYYKYHPNSVLENADFRLYYDRSIITDRRVTNNRPDIVVVDKKANSVYLVDVAVPNNNNILDKYNEKIAKYTDLAIEVRQMWHAEKIEVVPIIVSSTGLIPKTLQDSLTKLGLHKNTYIDLQKAAILNTCHTVRKFLNM

SEQ ID NO: 9842 - protein, 1259 aa, Ophraella communa
MSSFKTKLPQVGRVLRSQSHTAGVPGMSAVCSTDSGGSSNSIVTDTLTLRNRLVNRHGNTYNSCRVQVDDRRACSKNDASSSSVSGMRSVTPSMATATTEEENNTKSPPPVSAVSGVSQDGTSMTTKAGKPRKRMKWTTEMNSFIIRSYFKITKSETDLTTYRFALHRAFIEQYPEFQHVTEQRIADQRRTIIKNNLIPGPLIQQIRSEVLLELQTEDDHNVIQHTNDQLDNIRLDDHTSEDTPNMDQNENIDNDTQTDEHKNAVAELSKAIVEFDGTNPIQRPILPKLRSNKNTNRILALFNLLLNDRAKDCQTLEEIHTLIYCGAVAVLRSHNQQIRFPNKNCSEKKKQHKPWWQQRLEKSINDIRKELGQLTEFKTSTKPSRRLTNRVKKIFKKIKTNTEHPRHKEHLCSYMDLLRQKLKAKSKRLSRYVKCTKKKQQNHLFDNNEKLFYRQLSSVGTNSNDNLPSKHELTDYWSSIWSNPQKHNEGAEWIQSEKDKSNIAPMLFNNITTAEVNQAVGETNSWKAPGIDNIQNFWYKKFDSLHEIIASKFTHILQHPEDIPAFLTHGLTHMLAKTANTQDPSQYRPITCLPTLYKILTSCITNRIYRHVDQNNILAEEQKGCKRGHQGCKEQLVIDSVILRQAQKQCRNISTAFVDYRKAFDSVPHSWLLSVLNIYKVHPTIVTFLETSMKQWRTSLQVNINGQYIKTNEIVIRRGIFQGDSLSPLWFCLAMNPLSTMLNDTKYGFNLKTNRNTNCTVSHLLYMDDIKIFAANQQQIEHLLDITERFSSDIHMEFGLDKCRTLNIEKGKIVNGDVALPNGDIIAAMQHGETYKYLGFQQARLLDQKQSKSKIKDQYTQRVSSLLKSELNAGNLNRAINTYAVPVLTYSFGILRWTKTELEDIQRTTRTMMTKYRYHHPISSVFRTTLPRKEGGRALCDIINLHNKQINKLRDFFITKSTSSNLHKFIVGADKNYSPLNLAGPNVDLEVTTDAEKHVKWAQKALHGRHHHDLNQPHIDKIASNRWLADGTLFPETEGFMMAIQDQVINTNNYKKFVIRDQTITSDKCRRCQQTSETIQHITSGCSTIANTDYLRRHNQLCNIIHQKLANKYGLLNTYTPYYKYNPQAVLENADFRLYYDRSIITDRQVTNNRPDIVVVDKKANSVLLVDVAVPNNNNILDKYNEKIAKYTDLAIEVGQMWHAEKVEVVPIIVSSTGLIPKSLEDSLKKLDLHKNTFIDLQKAAILNTCHTVRKFLNM

SEQ ID NO: 9843 - protein, 1154 aa, Ophraella communa
MSNFKTILPPVGRALRSQSHTAGVPGMSTVCSTDSGGSNNSIFTDTLSLRNRQVNPHCNTYNSCRVQVDDRRACSKNDASSSSVSGMRSVTPSMATAITQEENITDSPSPVSAVSGVLQDGTSMTTKAGKPRKRMKWTTEMNSFIIRSYFKITKIETDLTTYRYALHRAFIEQYPEFQHVTEQRIADQRRTIIKNNLLPGPLLQQIRSEVLLELQTEIDHNVIQHTNDQLDNVRLDDHTGEDTPNIDHDENPNTDSNTQPDEHEDAVTELSKAILEFDGSNPLHRPIVPKLKSNKNTNRIIAVINSLLKDRAKDYRTLEEIHTLIYCGAVAVVRSHNQQVRFPNRKCTEKQKPYKPWWQQRLEKSINDIRKELGQLTEFNNNAKSSRRLTNRVKKIFKKIKTNTGHPRYKEHLCSYMDLLRQKLKAKSKRLARYVKCTKKKQQNHLFNTNEKLFYRQLSSAGTNNYHNLPSKDELFDYWSSIWSYPQKHNEGAAWIESEAGKSNIAPMMFDNITTADVNQAIGQINSWKAPGIDNIQNFWYKKFSSLHEVLASKFTHILQHPEDIPAFLTHGLTHMLPKTANTQDPSQYRPITCLPTLYKILTSCITNRIYRHVDQNNILAEEQKGCKRGHQGCKEQLIIDSVILRQAQKQCRNISTAFVDYRKAFDSVPHSWLISVLNIYKINPTIVSFLEASMKQWRTSLQVNINGQYIKTNDISIRRGIFQGDSLSPLWFCLAMNPLSTMLNNTKLGFNLKINKNTNCTVSHLLYMDDIKIFASNQQQIQHLLDVTERFSRDVRIQFGLEKCQNLNIEKGKIINGDLALPNGEIIAAMQNGETYKYLGFQQARLLDQKQSKSKIRNEFSQRVSSILKSELNAGNLNRAINTYAVPVLTYSFGILQWTKTELEDIQRTTRTMMTKYRCHHPTSSVLRTTLPRKEEGRALCDIINLHNKQINKLLDFFITKSMSSNLHKFVIGADKNFSPLNLAGPNVDLEITTDAKKHFKWAQKALHGRHYHDLNQPHIDKLASNRWLADGTLFPETEGFMMAIQDQVISTNNYKKFVIRDPTIISDKCRRCQQTSETIQHITSGCSTIANTDYLRRHNQLCNIIHQKLANKYGLLNTYTPYYKYNPQAVLENADFRLYYDRSIITDRQVNE

SEQ ID NO: 9844 - protein, 1181 aa, Galerucella pusilla
MACSKNDESTSSSVSGRRSVTPSRATVAHTHKENNINPHPPASAVSGVTQVGTSTTTKAGKPRKRMKWTIELNSFIMRSYFKITKMETDMTTYRYALHRAFIEHFPEFQHLTEQRIADQRRSIVKNNLLPDPTLQQIRGEVLLDLQNEENDIITDHDTHEPENAQEDNTGVEKTNIDCDKTPDNDYNTELCKALVEFNGTNPIHRPKLPKLRTNKSTNSITAAVNLLLQNHAKDCKALEQLHTLIYCGAVTVLRIHNQPIQFPGNNQSKDYKQLKPWWQRRLESSIDDIRRELGQLTEFKNSLKPSRRLTNRVRKIYRKIKTYTGHPQHEQHVFEYMDSLRQKLKAKSKRLSRYVKCTKRKQQNYLFNNNQKLFYRQLSGTVNNQNQSPPNKDELTEYWSSLWSKPVEHKPNAHWIRTEEEKINIEPMPFVNLTTTEVTEAIKSTSNWKTPGVDHVQNFWYKKFDSLHGAMATSFSHILQHPEDTPPFLTLGSTHLLPKTHQTHDPSQYRPITCLPTIYKILTACITNRIYRHVDQNNILSEEQKGCRRDHQGCKEQLIIDSVILKQAQKEKRNIHTAFVDYRKAFDSVPHSWLVKVLQIYKVHPTVVTFLESAMKHWRTNLHLQINGQYLQTDEISIRRGIFQGDSLSPLWFCLAMNPLSNLLNDTDYGYKLKANRNTSCTVSHLLYMDDIKIYASNQRQIQHLLNITEKFSSDIQMGFGLDKCKTLNIEKGKIVNGDVLLPNGNIITAMQNDETYKYLGFQQAKLLDQKQAKIKIRSQFTQRVTTLLKSQLNAGNLAKAINTHAIPILTYSFGILKWTKTELEDIQRTTRTMMTKHKCHHPTSSVIRTTLPRREGGRGLVDIVNLHNKQISRLQEFFIAKAETSELHEMVAKADKNYSPLNLVSPDMRLEIVTDSDKQVEWAQKALHGRHHHDLNQPHIDKEASNKWLSDGTLFPETEGFMTAIQDQVINTNNYKKFVMKDPNIATDKCRRCQQTTETIQHITSGCSALANIDYLRRHNQLCNIIHQKLANKFGLVITYTPYYKYHPNSVLENADFRLYYDRSIITDRRVTNNRPDIVVVDKKANSVYLVDVAVPNNNNILDKYNEKIAKYTDLAIEVRQMWHAEKIEVVPIIVSSTGLIPKTLQDSLTKLGLHKNTYIDLQKAAILNTCHTVRKFLNM

SEQ ID NO: 9845 - protein, 1145 aa, Galerucella calmariensis
MSNCKTRLPQVGRAKCSESHTASVPSTSAVCSTDSGGSNNSIVNSGTLNLRNRQVNRHCNTLNSCRVQAGARRACSKNDESTSSSVSGRRSVTPSRATVTHTHEENNINPHPPASAVSGVTQVGTSTTTKAGKPRKRMKWTIELNSFIMRSYFKITKMETDMTTYRYALHRAFIEHFPEFQHLTEQRIADQRRSIVKNNLLPDPTLQQIRGEVLLDLQNEENDIITDHDTHEPENAQEDNDGVEITNIDCDKTPDNDYNTELCKALAEFNGTNPIHRPKLPKLRTNKSTNSIIAAVNLLLQNHAKDCKALEQLHTLIYCGAVAVLRIHNQRIQFPGNNQSKDYKQLKPWWQRRLESSIDDIRRELGQLTEFKNNLEPSRRLTNRVRKIYRKIKTYTGHPQHEQHVFEYIDSLRQKLKAKSKRLSRYVKCTKRKQQNYLFNNNQKLFYRQLSGTENNQNQSPPNKDELTEYWSSLWSKPVEHKSNAHWIRTEEEKINIEPMSFVDLTTSEVTEAIKSTSNWKTPGVDHVQNFWYKKFDSLHEAMATSFSHILQHPEDTPPFLTLGSTHLLPKTHQTHDPSQYRPITCLPNIYKILTACITNRIYRHVDQNNILSEEQKGCRRDHQGCKEQLIIDSIILKQAQKEKRNIHTAFVDYRKAFDSVPHSWLVKVLQIYKVHPTVVTFLESAMKHWRTNLYLQINGQYLQTDEISIRRGIFQGDSLSPLWFCLAMNPLSNLLNDTDYGYKLKANRNTSCTVSHLLYMDDIKIYASNQRQIQHLLNITEKFSSDIQMGFGLDKCKTLNIEKGKIVNGDVLLPNGNIITAMQNGETYKYLGFQQAKLLDQKQAKIKIRSQFTQRVTTLLKSQLNAGNLAKAINTYAIPILAYSFGILKFTKTELEDIQRTTRTMMTKHKCHHPTSSVIRTTLPRREGGRGLVDIVNLHNKQISRLQEFFIAKAETSELHEMVAKADTNYSPLNLVSPDMRLEIVTDSDKQVEWAQKALHGRHHHDLNQPHIDKEASNKWLSDGTLFPETEGFMMAIQDQVINTNNYKKFVIKDPNIATDKCRRCQQTTETRQHITSGCSALANIDYLRRHNQLCNIIHQKLANKFGLVNTYTPYYKYHPNSVLENADFRLYYDRSIITDRRVT

SEQ ID NO: 9846 - protein, 1116 aa, Galerucella tenella
MKWTIELNSFIMRSYFKITKMETDMTTYRYALHCAFIEHFPEFQHLTEQRIADQRRSIVKNNLLPDPTLQQIRGEVLLDLQNEENDIITDHDTHEPENAQEDNNGVEKTNIDCDKTPDNDYNTELCKALAEFNGTNPIHRPKLPKLRTNKSTNSIIAAVNLLLQNHAKDCKALEQLHTLIYCGAVAVLRIHNQRIQFPENNQSKDYKQLKPWWQRRLESSIDDIRRELGQLTEFKNNLKPSRRLTNRVRKIYRKIKTYTGHPQHEQHVSEYMDLLRQKLKAKSKRLSRYVKCTKRKQQNYLFNNNQKLFYRQLSGTVNNQNQSPPNKDELAEYWSSLWSKPVEHKSNAHWIRTEEEKINIEPMPFVNLTTTEVTEAIKSTSNWKTPGVDHVQNFWYKKFDSLHEAMATSFSHILQHPEDTPPFLTLGSTHLLPKTHQTHDPSQYRPITCLPTIYKILTACITNRIYRHVDQNNILSEEQKGCRRDHQGCKEQLIIDSVILKQAQKEMRNIHTAFVDYRKAFDSVPHSWLVKVLQIYKVHPTIVTFLESSMKHWRTNLHLQINGQYRQTDEISIRRGIFQGDSLSPLWFCLAMNPLSNLLNNTDYGYKLKANRNTSCTVSHLLYMDDIKIYASNQRQIQHLLNITEKFSSDIQMGFGLDKCKTLNIEKGKIVNGDVLLPNGNIITAMQNGETYKYLGFQQAKLLDQKQAKIKIRSQFTQRVTTLLKSQLNAGNLAKAINTYAIPILTYSFGILKWTKTELEDIQRTTRTMMTKHKSHHPTSSVIRTTLPRREGGRGLVDIVNLHNKQISRLQEFFIAKAETSELHEMVAKADKNYSPLNLVSPDMRLGIVTDSDKQVEWSHKALHGRHHHDLNQPHIDKEASNKWLSDRTLFPETEGFMMAIQDQVINTNNYKKFVMKDPNIATDKCRRCQQTTETIQHITSGCSALANIDYLRRHNQLCNIIHQKLANKFGLVNTYTPYYKYHPNSVLENADFRLYYDRSIITDRRVTNNRPDIVVVDKKANSVYLVDVAVPNNNNILDKYNEKIAKYTDLAIEVRQMWHAEKIEVVPIIVSSTGLIPKTLQDSLTKLGLHKNTYIDLQKAAILNTCHTVRKFLNM

SEQ ID NO: 9847 - protein, 1259 aa, Ophraella communa
MSSFKTKLPQVGRVLRSQSHTAGVPGMSAVCSTDSGGSSNSIVTDTLTLRNRLVNRHGNTYNSCRVQVDDRRACSKNDASSSSVSGMRSVTPSMATATTEEENNTKSPPPVSAVSGVSQDGTSMTTKAGKPRKRMKWTTEMNSFILRSYFKITKSETDLTTYRFALHRAFIEQYPEFQHVTEQRIADQRRTIIKNNLIPGPLIQQIRSEVLLELQTEDDHNVIQHTNDQLDNIRLDDHTSKDTPNMDQNENIDNDTQTDEHKNAVAELSKAIVEFDGTNPIQRPILPKLRSNKNTNRILALFNLLLNDRAKDCQTLEEIHTLIYCGAVAVLRSHNQQIRFPNKNCSEKKKQHKPWWQQRLEKSINDIRKELGQLTEFKTSTKPSRRLTNRVKKIFKKIKTNTEHPRHKEHLCSYMDLLRQKLKAKSKRLSRYVKCTKKKQQNHLFDNNEKLFYRQLSSVGTNSNDNLPSKHELTDYWSSIWSNPQKHNEGAEWIQSEKDKSNIAPMLFNNITTAEVNQAVGETNSWKAPGIDNIQNFWYKKFDSLHEIIASKFTHILQHPEDIPAFLTHGLTHMLAKTANTQDPSQYRPITCLPTLYKILTSCITNRIYRHVDQNNILAEEQKGCKRGHQGCKEQLVIDSVILRQAQKQCRNISTAFVDYRKAFDSVPHSWLLSVLNIYKVHPTIVTFLETSMKQWRTSLQVNINGQYIKTNEIVIRRGIFQGDSLSPLWFCLAMNPLSTMLNDTKYGFNLKTNRNTNCTVSHLLYMDDIKIFAANQQQNEHLLDITERFSSDIHMEFGLDKCRTLNIEKGKIVNGDVALPNGDIIAAMQHGETYKYLGFQQARLLDQKQSKSKIKDQYTQRVSSLLKSELNAGNLNRAINTYAVPVLTYSFGILRWTKTELEDIQRTTRTMMTKYRYYHPISSVFRTTLPRKEGGRALCDIINLHNKQINKLRDFFITKSTSSNLHKFIVGADKNYSPLNLADPNVDLEVTTDAEKHVKWVQKALHGRHHHDLNQPHIDKIASNRWLADGTLFPETEGFMMAIQDQVINTNNYKKFVIRDQTITSDKCRRCQQTSETIQHITSGCSTIANTDYLRRHNQLCNIIHQKLANKYGLLNTYTPYYKYNPQAVLENADFRLYYDRSIITDRQVTNNRPDIVVVDKKANSVLLVDVAVPNNNNILDKYNEKIAKYTDLAIEVGQMWHAEKVEVVPIIVSSTGLIPKSLEDSLKKLDLHKNTFIDLQKAAILNTCHTVRKFLNM

SEQ ID NO: 9848 - protein, 1160 aa, Ophraella communa
MSSFKTKLPQVGRVLRSQSHTAGVPSMSVVCSTDSGGSNNSIITDTLTLRNRQVNRHGNTYNSCRVQVDDRRTCSKNDASSSSVSGMRSVTSSMATATTQEETITEDPPPVSAVSGVSQDGTSMTTKAGKPRKRMKWTTEMNSFIIRSYFRTTKNETDLTTYRFALHRAFIQQYPEFQHVTEQRIADQRRTIIKNNLLPGPLMQQIRSEVLLELQTEIDHNVIQHTNDQLDNVRLDDHTGEDTPNIDQDENPNTDSNTQPDEHENVVTELSKAILEFDGSNPLHRPILPKLKSNKDTNKILAVINSLLKDRAKDYRTLEEIHTLIYCGAVAVVRSHNQQVRFPNRKCTEKQKPYKPWWQQRLEKSINDIRKELGQLTEFNNNAKPSRRLTNRVKKILKKIKTNTGHPRYKEHLCSYMDLLRQKLKAKSKRLSRYVKCTKKKQQNHLFNTNEKLFYRQLSSAGTNNYHNLPSKDELFDYWSSIWSNPQKHNEGAAWIESEADKSNIAPMMFDNITTADVNQAIGQINSWKAPGIDNIQNFWYKKFSSLHEVLASKFTHILQHPEDIPAFLTHGLTRMLPKTANTQDPSQYRPITCLPTLYKILTSCITNRIYRHVDQNNILAEEQKGCKRGHQGCKEQLIIDSVILRQAQKQCRNISTAFVDYRKAFDSVPHSWLISVLNIYKINPTIVSFLEASMKQWRTSLQVNINGQYIKTNDISIRRGIFQGDSLSPLWFCLAMNPLSTMLNNTKLGFNLKINKNTNCTISHLLYMDDIKIFASNQQQIQHLLDITERFSSDIHMEFGLDKCRTLNIEKGKIVNGDVALPNGDIIAAMQNGETYKYLGFQQARLLDQKQSKAKIRDEFSQRVSSLLKSELNAGNLNRAINTYAVPVLTYSFGILQWTKTELEDIQRTTRTMMTKYRCHHPTSSVLRTTLPRKEGGRALCDIVNLHNKQINRLRDFFITKSLSSNLHKSVIGADKKYSPLNLADPHMDLEITTDAEKQVKWAQKALHGRHHHDLNQPHIDKIASNRWLADGTLFPETEGFMMAIQDQVISTNNYKKFVIRDPTIISDKCRRCQQTSETIQHITSGCSTIANTDYLRRHNQLCNIIHQKLANKYGLLNTYTPYYKYNPQAVLENADFRLYYDRSIITDRHSTWSTSSRP

SEQ ID NO: 9849 - protein, 1261 aa, Ophraella communa
MSSFKTKLPQVGRVLRSQSHTAGVPGMSAVCSTDSGGSNNSIVTDTLSLRNRQVNRHCNTYNSCRVQVDDRRACSKNDASSSSVSGMRSVTPSMATATTQEENNTKSPQTVSAVSGVSQDGTSTTTKAGKPRKRMKWTIEMNSFIIRSYFKITKIETDLTTYRFALHRAFIEQYPEFQHVTEQRIADQRRTILKNNLLPGPLMQQIRSEVLLELQTEDNHNVIQHTNDQLDNVRLDDHTSDDTPNIDQDENPNTDSNTQPDEHENAVAELSKAILEFDGSSPIHRPILPKLKTNKNTNRILAVINLLLNDRVKNYRTLEEIHTLIYCGAVAVLRCHNQHVRVPNKKYTEKQKSYKPWWQQRLEKSINDIRKELGQLTEFNNNAKPSRRLINRVKKILKKIKTNTGHPRYKEHLSSYMDLLRQKLKAKSKRLSRYVKCTKKKQQNHLFNTNEKLFYRQLSSAGTNNYHNLPSKDELTDYWSSIWSNPQNHNEGAAWIESETDKSNIAAMVFDNITTAEVNQAVGETNSWKAPGIDNIQNFWYKKFDSLHEVMASKFTHILQHPEDIPAFLTHGLTHMLPKTANTQDPSQYRPITCLPTLYKILTSCITNRIYRHVDQNNILAEEQKGCKRGHQGCKEQLVIDSVILRQAQKQCRNISTAFVDYRKAFDSVPHSWLIRVLNIYKVHPTIVTFLEASMKQWRTNLQLNINGQHFKTDEIAIRRGIFQGDSLSPLWFCLAMNPLSHMLNDTKYGFNLKTNRNTNCTVSHLLYMDDIKIFASNQQQIQHLLDITERFSSDIRMEFGLDKCRTLNIEKGKIVNGDVALPNGDIIAAMQNGETYKYLGFQQARLLDQKQSKSKIKDQYTQRVCSLLKSELNAGNLNRAINTYAVPVLTYSFGILRWTKTELEDIQRTTRTMMTKYRYHHPTSSVLRTTLPRKEGGRALCDIINLHNKQINKLRDFFITKSTSSNLHKFIVGADKNYSPLNLAGPNVDLEITTDAEKHVKWAQKALHGRHHHDLNQPHIDKLASNRWLADGTLFPETEGFMMAIQDQVINTNNYKKFVIRDPTITSDKCRRCQQTSETIQHITSGCSTIANTDYLRRHNQLCNIIHQKLANKYGLLNTYTPYYKYNPQAVLENADFRLYYDRSIITDRQVTNNRPDIVVVDKKANSVLLVDVAVPNNNNILDKYNEKIAKYTDLAIEVGQMWHAEKVEVVPIIVSSTGLIPRSLEDSLKKLELHKNTFIDLQKAAILNTCHTVRKFLNM

SEQ ID NO: 9850 - protein, 1253 aa, Galerucella pusilla
MSNCKTRLPQVGIAKCSESHTASVPSTSAVCSTDSGGSNNSIVNSGTLNLRNRQVNRHCNTLNSCRVQAGARRACSKNDESTSSSVSGRRSVTPSRATVAHTHKENNINPHPPASAVSGVTQVGTSTTTKAGKPRKRMKWTIELNSFIMRSYFKITKMETDMTTYRYALHRAFIEHFPEFQHLTEQRIADQRRSIVKNNLLPDPTLQQIRGEVLLDLQNEENDIITDHDTHEPENAQEDNNGVEKTNIDCDKTPDNDYNTELCKALVEFNGTNPIHRPKLPKLRTNKSTNSITAAVNLLLQNHAKDCKALEQLHTLIYCGAVTVLRIHNQPIQFPGNNQSKDYKQLKPWWQRRLESSIDDIRRELGQLTEFKNSLKPSRRLTNRVRKIYRKIKTYTGHPQHEQHVFEYMDSLRQKLKAKSKRLSRYVKCTKRKQQNYLFNNNQKLFYRQLSGTVNNQNQSPPNKDELTEYWSSLWSKPVEHKPNAHWIRTEEEKINIEPMPFVNLTTTEVTEAIKSTSNWKTPGVDHVQNFWYKKFDSLHGAMATSFSHILQHPEDTPPFLTLGSTHLLPKTHQTHDPSQYRPITCLPTIYKILTACITNRIYRHVDQNNILSEEQKGCRRDHQGCKEQLIIDSVILKQAQKEKRNIHTAFVDYRKAFDSVPHSWLVKVLQIYKVHPTVVTFLESAMKHWRTNLHLQINGQYLQTDEISIRRGIFQGDSLSPLWFCLAMNPLSNLLNDTDYGYKLKANRNTSCTVSHLLYMDDIKIYASNQRQIQHLLNITEKFSSDIQMGFGLDKCKTLNIEKGKIVNGDVLLPNGNIITAMQNDETYKYLGFQQAKLLDQKQAKIKIRSQFTQRVTTLLKSQLNAGNLAKAINTHAIPILTYSFGILKWTKTELEDIQRTTRTMMTKHKCHHPTSSVIRTTLPRREGGRGLVDIVNLHNKQISRLQEFFIAKAETSELHEMVAKADKNYSPLNLVSPDMRLEIVTDSDKQVEWAQKALHGRHHHDLNQPHIDKEASNKWLSDGTLFPETEGFMTAIQDQVINTNNYKKFVMKDPNIATDKCRRCQQTTETIQHITSGCSALANIDYLRRHNQLCNIIHQKLANKFGLVITYTPYYKYHPNSVLENADFRLYYDRSIITDRRVTNNRPDIVVVDKKANSVYLVDVAVPNNNNILDKYNEKIAKYTDLAIEVRQMWHAEKIEVVPIIVSSTGLIPKTLQDSLTKLGLHKNTYIDLQKAAILNTCHTVRKFLNM

SEQ ID NO: 9851 - protein, 1253 aa, Galerucella calmariensis
MSNCKTRLPQVGRAKCSESHTASVPSTSAVCSTDSGGSNNSIVNSGTLNLRNRQVNRHCNTLNSCRVQAGARRACSKNDESTSSSVSGRRSVTPSRATVTHTHEENNINPHPPASAVSGVTQVGISTTTKAGKPRKRMKWTIELNSFIMRSYFKITKMETDMTTYRYALHCAFIEHFPEFQHLTEQRIADQRRSIVKNNLLPDPTLQQIRGEVLLDLQNEENDIITDHDTHEPENAQEDNNGVEKTNIDCDKTPDNDYNTELCKVLAEFNDTNPIHRPKLPKLRTNKSTNSIIAAVNLLLQNHARDCKALEQLHTLIYCGAVAVLRIHNQRIQFPGNNQSKDYKQLKPWWQRRLESSIDDIRRELGQLTEFKNNLKPSRRLTNRVRKIYRKIKTYTGHPQHEQHVFEYMDSLRQKLKAKSKRLSRYVKCTKRKQQNYLFNNNQKLFYRQLSSTVNNQNQSPPNKDELTEYWSSLWSKPVEHKSNAHWIRTEEEKINIEPMSFVDLTTSEVTEAIKSTSNWKTPGVDHVQNFWYKKFDSLHEAMATSFSHILQHPEDTPPFLTPGSTHLLPKTHQTHDPSQYRPITCLPTIYKILTACITNRIYRHVDQNNILSEEQKGCRRDHQGCKEQLIIDSVILKQAQKEKRNIHTAFVDYRKAFDSVPHSWLVKVLQIYKVHPTVVTFLESAMKHWRTNLHLQINGQYLQTDEISIRRGIFQGDSLSPLWFCLAMNPLSNLLNDTDYGYKLKANRNTSCTVSHLLYMDDIKIYASNQRQIQHLLNITEKFSSDIQMGFGLDKCKTLNIEKGKIVNGDVLLPNGNIITAMQNSETYKYLGFQQAKLLDQKQAKIKIRSQFTQRVTTLLKSQLNAGNLAKAINTYAIPILTYSFGILKWTKTELEDIQRTTRTMMTKHKCHHPTSSVIRTTLPRREGGRGLVDIVNLHNKQISRLQEFFIAKAETSELHEMVAKADKNYSPLNLVSPDMRLEIVTDSDKQVEWAQKALHGRHHHDLNQPYIDKEASNKWLSDGTLFPETEGFMMAIQDQVINTNNYKKFVIKDPNIATDKCRRCQQTTETIQHITSGCSALANIDYLRRHNQLCNIIHQKLANKFGLVNTYTPYYKYHPNSVLENADFRLYYDRSIITDRRVTNNRPDIVVVDKKANSVYLVDVAVPNNNNILDKYNEKIAKYTDLAIEVRQMWHADKIEVVPIIVSSTGLIPKTLQDSLTKLGLHKNTYIDLQKAAILNTCHTVRKFLNM

SEQ ID NO: 9852 - protein, 1173 aa, Ophraella communa
MRSVTPSMATATTEEENNTKSPPPVSAVSGVSQDGTSMTTKAGKPRKRMKWTTEMNSFIIRSYFKITKSETDLTTYRFALHRAFIEQYPEFQHVTEQRIADQRRTIIKNNLIPGPLIQQIRSEVLLELQTEDDHNVIQHTNDQLDNIRLDDHTSEDTPNMDQNENIDNDTQTDEHKNAVAELSKAIVEFDGTNPIQRPILPKLRSNKNTNRILALFNLLLNDRAKDCQTLEEIHTLIYCGAVAVLRSHNQQIRFPNKNCSEKKKQHKPWWQQRLEKSINDIRKELGQLTEFKTSTKPSRRLTNRVKKIFKKIKTNTEHPRHKEHLCSYMDLLRQKLKAKSKRLSRYVKCTKKKQQNHLFDNNEKLFYRQLSSVGTNSNDNLPSKHELTDYWSSIWSNPQKHNEGAEWIQSEKDKSNIAPMLFNNITTAEVNQAVGETNSWKAPGIDNIQNFWYKKFDSLHEIIASKFTHILQHPEDIPAFLTHGLTHMLAKTANTQDPSQYRPITCLPTLYKILTSCITNRIYRHVDQNNILAEEQKGCKRGHQGCKEQLVIDSVILRQAQKQCRNISTAFVDYRKAFDSVPHSWLLSVLNIYKVHPTIVTFLETSMKQWRTSLQVNINGQYIKTNEIVIRRGIFQGDSLSPLWFCLAMNPLSTMLNDTKYGFNCKTNRNTNCTVSHLLYMDDIKIFAANQQQIEHLLDITERFSSDIHMEFGLDKCRTLNIEKGKIVNGDVALPNGDIIAAMQHGETYKYLGFQQARLLDQKQSKSKIKDQYTQRVSSLLKSELNAGNLNRAINTYAVHVLTYSFGILRWTKTELEDIQRTTRTMMTKYRYHHPISSVFRTTLPRKEGGRALCDIINLHNKQINKLRDFFITKSTSSNLHKFIVGADKNYSPLNLAGPNVDLEVTTDAEKHVKWAQKALHGRHHHDLNQPHIDKIASNRWLADGTLFPETEGFMMAIQDQVINTNNYKKFVIRDQTITSDKCRRCQQTSETIQHITSGCSTIANTDYLRRHNQLCNIIHQKLANKYGLLNTYTPYYKYNPQAVLENADFRLYYDRSIITDRQVTNNRPDIVVVDKKANLVLLVDVAVPNNNNILDKYNEKIAKYTDLAIEVGQMWHAEKVEVVPIIVSSTGLIPKSLEDSLKKLDLHKNTFIDLQKAAILNTCHTVRKFLNM

SEQ ID NO: 9853 - protein, 1253 aa, Galerucella pusilla
MSNCKTRLPQVGRAKCSESHTASVPSTSAVCSTDSGGSNNSIVNSGTLNLRNRQVNRHCNTLNSCRVQAGARRACSKNDESTSSSVSGRRSVTPSRATVTHTHEENNINPHPPASAVSGVTQVGTSTTTKAGKPRKRMKWTIELNSFIMRSYFKITKMETDMTTYRYALHCAFIEQFPEFQHLTEQRIADQRRSIVKNNLLPDPTLQQIRGEVLLDLQNGENDIITDHDTHEPENAQEDNNGVEKTNIDCDKTPDNDYNTELCKALAEFDGTNPIHRPKLPKLRTNKSTNSMIAEVNLLLQNHAKDCKALEQLHTLLYCGAVAVLRIHNQRIQFPENNQSKNYKQLKPWWQRRLESSIDDIRRKLGQLTEFKNNLLPSRRLTNRVRKIYRKIKTYTGHPQHEQHVSEYMDLLRQKLKAKSKRLSRYVKCTKRKQQNYLFNNNQKLFYRQLSGTVNNQNQSPPNKDELTEYWSSLWSKPVEHKSNAHWIRTKEEKINIEPMPFVNLTTTEVTEAIKSTSNWKTPGVDHVQNFWYKKFDSLHEAMATSFSHILQHPEDTPPFLTLGSTHLLPKTHQTHDPSQYRPITCLPTIYKILTACITNRIYRHVDQNNILSEEQKGCRRDHQGCKEQLIIDLVILKQAQKEKRNIHTAFVDYRKAFDSVPHSWLVKVLQIYKVHPTVITFLESAMKHWRTNLHLQINGQYLQTDEISIRRGIFQGDSLSPLWFCLAMNPLSNLLNDTDYGYKLKANRNTSCTVSHLLYMDDIKIYASNQRQIQHLLNITEKFSSDIQMGFGLDKCKTLNIEKGKIVNGDVLLPNGNIITAMQNGETYKYLGFQQAKLLDRKQAKIKIRNQFTQRVTTLLKSQLNAGNLAKAINTYAIPILTYSFGILKWTKTELEDIQRTTRTMMTKHKCHHPTSSVIRTTLPRKEGGRGLVDIVNLHNKQISRLQEFSIAKAETSELHEMVAKADKSFSPLNLVSPDMRLGIVTDSDKQVEWAQKALHGRHHHDLNQPHIDKEASNKWLSDGTLFPETEGFMIAIQDQVINTNNYKKFIMKDPNIATGKCRRCQQTTETIQHITSGCSALANIDYLRRHNQLCNIIHQKLANKFGLVNTYTPYYKYHPNSVLENADFRLYYDRSIITDRRVTNNRPDIVVVDKKANSVYLVDVAVPNNNNILDKYNEKIAKYTDLAIEVGQMWHAEKIEVVPIIVSSTGLIPKTLQDSLTKLGLHKNTYIDLQKAAILNTCHSVRKFLNM

SEQ ID NO: 9854 - protein, 1272 aa, Galerucella calmariensis
MEGAAESSPGSRSKMQQSRCRIVKLDYPRWVERNAQNPTLLVYLVHRLSAPRILGGSNNSIVNSGTLNLRNRQVNRHCNTLNSCRVQAGARRACSKNDESTSSSVSGRRSVTPSRATVTHTHEENNINPHPPASAVSGVTQVGTSTTTKAGKPRKRMKWTIELNSFIMRSYFKITKMETDMTTYRYALHRAFTEHFPEFQHLTEQRIADQRRSIVKNNLLPDPTLQQIRGEVLLDLQNEENDSITDHDTHEPENAQEDNNGVEITNIDCDKTPDNDYNTELCKALAEFNGTNPIHRPKLPKLRTNKSTNSIIAAVNLLLQNHAKDCKALEQLHTLIYCGAVAVLRIHNQRIQFPGNNQSKDYKQLKPWWQRRLESSIDDIRRELGQLTEFKNNLKPSRRLTNRVRKIYRKIKTYTGHPQHERHVFEYIDSLRQKLKAKSKRLSRYVKCTKRKQQNYLFNNNQKLFYRQLSGTESNQNQSPPNKDELTEYWSSLWSKPVEHKSNAHWIRTEEEKINIEPMSFVDLTTSEVTEAIKSTNNWKTPGVDHVQNFWYKKFDSLHEAMATSFSHILQHPEDTPPFLTLGSTHLLPKTHQTHDPSQYRPITCLPTIYKILTACITNRIYRHVDQNNILSEEQKGCRRDHQGCKEQLIIDSVILKQAQKEKRNIHTAFVDYRKAFDSVPHSWLVKVLQIYKVHPTVVTFLESAMKHWRTNLHLQINGQYLQTDEISIRRGIFQGDSLSPLWFCLAMNPLSNLLNDTDYGYKLKANRNTSCTVSHLLYMDDIKIYASNQRQIQHLLNITEKFSSDIQMGFGLDKCKTLNIEKGKIVNGDVLLPNGNIITAMQNGETYKYLGFQQAKLLDQKQAKIKIRSQFTQRVTTLLKSQLNAGNLAKAINTYAIPILTYSFGILKWTKTELEDIQRTTRTMMTKHKCHHPTSSVIRTTLPRREGGRGLVDIVNLHNKQISRLQEFFIAKGETSELHEMVAKADKNYSPLNLVSPDMRLGIVTDSDKQVEWAQKALHGRHHHDLNQPHIDKEASNKWLSDGTLFPETEGFMTAIQDQVINTNNYKKFVMKDPNIATDKCRRCQQTTETIQHITSGCSALANIDYLRRHNQLCNIIHQKLANKFGLVNTYTPYYKYHPNSVLENADFRLYYDRSIITDRRVTNNRPDIVVVDKKANSVYLVDVAVPNNNNIMEKYNEKIAKYTDLAIEVRQMWHAEKIEVVPIIVSSTGLIPKTLQASLTKLGLHKNTYIDLQKAAILNTCHTVRKFLNM

SEQ ID NO: 9855 - protein, 1139 aa, Ophraella communa
MTTKAGKPRKRMKWTTEMNSFIIRSYFRITKNETDLTTYRFALHRGFTQQYPEFQHVTEQRIADQRRTIIKNNLLPGPIMQQIRSEVLLELQTEIDHNVIQHTNDQQDNVRLDDHTGEDKPNIDQDENPNTDSNTQPDEHENAVTELSKAILEFDGSNPLHRPILPKLKSNRNTNGILALFNLLLKDRAKNCRTLEEIHTLIYCGAVAVIRSHNQQVRFSNQKSIEHHKQHKPWWQQRLEKSINDIRKELGQLTEFKNSIKPSRRLTNRVRKIFKKIKTHTGHPKYKEHLCSYMDLLRQKLKAKSKRLSRYVKCTKKKQQNHLFNNNEKLFYRQLSSAGGTNNNSNLPTKNEFTDYWSSIWSNPQKHNEGAAWIESEMDKSNIAPMMFDKITRAEVNQAIGETNSWKAPGIDNIQNFWYKKFDSLHELLASKFTHILQHPEDIPAFFTHGLTHMLPKTANTQDPSQYRPITCLPTLYKILTSCITNRIYRHVDQNNILAEEQKGCKRGHQGCKEQLIIDSVILKQAQKQSRNISTAFVDYRKAFDSVPHSWLISILKIYKVHPSIVNFLETSMKQWRTNLQFNINGQYLKTDEIAIRRGIFQGDSLSPLWFCLAMNPLSAFLNNTKYGFNLKTNRNTNCTVSHLLYMDDIKIFAANQQQVQHLLDITERFSSDIHMEFGLDKCRTLNIEKGKIVNGDVALPNGDIIAAMQNGETYKYLGFQQARLLDQKQSKSKIKDQYTQRVSSLLKSELNAGNLNRAINTYAVPVLTYSFGILRWTKTELEDIQRTTRTMMTKYRYHHPISSVFRTTLPRKEGGRALCDIINLHNKQINKLRDFFITKSTSSNLHKFIVGADKNYSPLNLAGPNVDLEVTTDTEKHVKWAQKALHGRHHHDLNQPHIDKIASNRWLADGTLFPETEGFMMAIQDQVINTNNYKKFVIRDQTITSDKCRRCQQTSETIQHITSGCSTIANTDYLRRHNQLCNIIHQKLANKYGLLNTYTPYYKYNPQAVLENADFRLYYDRSIITDRQVTNNRPDIVVVDKKANSVLLVDVAVPNNNNILDKYNEKIAKYTDLAIEVGQMWHAEKVEVVPIIVSSTGLIPKSLEDSLKKLDLHKNTFIDLQKAAILNTCHTVRKFLNM

SEQ ID NO: 9856 - protein, 1053 aa, Galerucella calmariensis
MKWTIELNSFIMRSYFKITKMETDMTTYRYALHRAFIEHFPEFQHLTEQRIADQRRSIVKNNLLPDPTLQQIRGEVLLDLQNEENDIITDHDTHEPENAQEDNNGVEKTNIDCDKTPDNDYNTELSKALAEFNGTNPIHRPKLPKLRTNKSTNSIIAAVNLLLQNHAKDCKALEQLHTLIYCGAVAVLRIHNQRIQFPGNNQSKDYKQLKPWWQRRLESSIDDIRRELGQLTEFKNNLKPSRRLTNRVRKIYRKIKTYTGHPQHEQHVFEYMDSLRQKLKAKSKRLSRYVKCTKRKQQNYLFNNNQKLFYRQLSGTVNNQNQSPPNKDELTEYWSSLWSKPVEHKSNAHWIRTEEEKINIEPMSFVDLTTSEITEAIKSTSNWKTPGVDHVQNFWYKKFDSLHEAMATSFSHILQHPEDTPPFLTLGSTHLLPKTHQTHDPSQYRPITCLPTIYKILTACITNRIYRHVDQNNILSEEQKGCRRDHQGCKEQLIIDSVILKQAQKEKRNIHTAFVDYRKAFDSVPHSWLVKVLQIYKVHPTVVTFLESAMKHWRTNLHLQINGQYLQTDEISIRRGIFQGDSLSPLWFCLAMNPLSNLLNDTDYGYKLKANRNTSCTVSHLLYMDDIKIYASNQRQIQHLLNITEKFSSDIQMGFGLDKCKTLNIEKGKIVNGDVLLPNGNIITAMQNGETYKYLGFQQAKLLDQKQAKIKIRSQFTQRVTTLLKSQLNAGNLAKAINTYAIPILTYSFGILKWTKTELEDIQRTTRTMMTKHKCHHPTSSVIRTTLPRREGGRGLVDIVNLHNKQISRLQEFFIAKGETSELHGMVAKADKNYSPLNLVSPDMRLEIVTDSDKQVEWAQKALHGRHHHDLNQPHIDKEASNKWLSDGTLFPETEGFMTAIQDQVINTNNYKKFVMKDPNIATDKCRRCQQTTETIQHITSGCSALANIDYLRRHNQLCNIIHQKLANKFGLVNTYAPYYKYHPNSVLENADFRLYYDRSIITDRRVTNNRPDIVVVDKKANSVYLVDVAVPNNNNVMDKYNEKIAKYTDLAI

SEQ ID NO: 9857 - protein, 1251 aa, Galerucella pusilla
MSNCKTRLPQVGRAKCSESHTASVPSTSAVCSTDSGGSNNSIVYSGILNLRNRQVNRHCNTLNSCRVQAGARRACSKNDESTSSSVSGRRSVTPSRATVTHTHEENNINPHPPASAVSGVTQVGTSTTTKAGKPRKRMKWTIELNSFIMRSYFKITKMETDMTTYRYALHRAFIEHFPEFQHLTEQRIADQRRSIVKNNLLPDPTLQQIRGEVLLDLQNEENDIITNHDTHEPENAQEDNNGVEKTNIDCDKTPDNDYNTELCKALVEFNGTNPIHRPKLPKLRTNKSTNSIIAAVNLLLQNHAKDCKALEQLHTLIYCGAVAVLRIHNQLIQFPGNNQSKDYKQLKPWWQRRLESSIDDIRGELGQLTEFKNSLKPSRRLTNRVRKIYRKIKTYTGHPQHEQHVFEYMDSLRQKLKAKSKRLSRYVKCTKRKQQNYLFNNNQKLFYRQLSGTVNNQNQSPPNKDELTEYWSSLWSKPVEHKSNAHWIRTEEEKINIEPMPFVNLTTTEVTEAIKSTSNWKTPGVDHVQNFWYKKFDSLHEAMATSFSHILQHPEDTPPFLTLGSTHLLPKTHQTHDPSQYRPITCLPTIYKILTACITNRIYRHVDQNNILSEEQKGCRRDHQGCKEQLIIDSVILKQAQKEKRNIHTAFVDYRKAFDSVPHSWLVKVLQIYKVHPTVVTFLESAMKHWRTNLHLQINGQYLQTDEISIRRGIFQGDSLSPLWFCLAMNPLSNLLNDTDYGYKLKANRNTSCTVSHLLYMDDIKIYASNQRQIQHLLNITEKFSSDIQMGFGLDKCKTLNIEKGKIVNGDVLLPNGNIITAMQNGETYKYLGFQQAKLLDQKQAKIKIRSQFTQRVTTLLKSQLNAGNLAKAINTYAIPILTYSFGIPKWTKTELEDIQRTTRTMMTKHKCHHPTSSVIRTTLPRREGGRGLVDIVNLHNKQISKLQEFFIAKASELHEMVAKADKNYSPLNLVSPDMRLEIVTDSDKQVEWAQKALHGRHRHDLNQPHIDKEASNKWLSDGTLFPETEGFMMAIQDQVINTNNYKKFVMKDPNIDTDKCRRCQQTTETIQHITSGCSALANIDYLRRHNQLFNIIHQKLANKFGLVNTYTPYYKYHPNSVLENADFRLYYDRSIITDRRVTNNRPDIVVVDKKANSVYLVDVAVPNNNNILDKYNEKIAKYTDLAIEVRQMWHAEKIEVVPIIVSSTGLIPKTLQDSLTKLGLHKNTYIDLQKAAILNTCHTVRKFLNM

SEQ ID NO: 9858 - protein, 1118 aa, Ophraella communa
MTTKAGKPRKRMKWTTEMNSFIIRSYFKITKSETDLTTYRFALHRAFIEQYPEFQHVTEQRIADQRRTIIKNNLIPGPLIQQIRSEVLLELQTEDDHNVIQHTNDQLDNIRLDDHTSEDTPNMDQNENIDNDTQTDEHKNAVAELSKAIVEFDGTNPIQRPILPKLRSNKNTNRILALFNLLLNDRAKDCQTLEEIHTLIYCGAVAVLRSHNQQIRFPNKNCSEKKKQHKPWWQQRLEKSINDIRKELGQLTEFKTSTKPSRRLTNRVKKIFKKIKTNTEHPRHKEHLCSYMDLLRQKLKAKSKRLSRYVKCTKKKQQNHLFDSNEKLFYRQLSSVGTNSNDNLPSKHELTDYWSSIWSNPQKHNEGAEWIQSEKDKSNIAPMLFNNITTAEVNQAVGETNSWRAPGIDNIQNFWYKKFDSLHEIIASKFTHILQHPEDIPAFLTHGLTHMLPKTANTQDPSQYRPITCLPTLYKILTSCITNRIYRHVDQNNILAEEQKGCKSGHQGCKEQLVIDSVILRQAQKQCRNISTAFVDYRKAFDSVPHSWLLSVLNIYKVHPTIVTFLETSMKQWRTSLQVNINGQYIKTNEIVIRRGIFQGDSLSPLWFCLAMNPLSTMLNDTKYGFNLKTNRNTNCTVSHLLYMDDIKIFAANQQQIEHLLDITERFSSDIHMEFGLDKCRTLNIEKGKIVNGDVALPNGDIIAAMQNGETYKYLGFQQARLLDQKQSKSKIKDQYTQRVSSLLKSELNAGNLNRAINTYAVPVLTYSFGILRWTKTELEDIQRTTRTMMTKYRYHHPISSVFRTTLPRKEGGRALCDIINLHNKQINKLRADKNYSPLNLAGPNVDLEVTTDAEKHVKWAQKALHGRHHHDLNQPHIDKIASNRWLADGTLFPETEGFMMAIQDQVINTNNYKKFVIRDQTITSDKCRRCQQTSETIQHITSGCSTIANTDYLRRHNQLCNIIHQKLANKYGLLNTYTPYYKYNPQAVLENADFRLYYDRSIITDRQVTNNRPDIVVVNKKANSVLLVDVAVPNNNNILDKYNEKIAKYTDLAIEVGQMWHAEKVEVVPIIVSSTGLIPKSLEDSLKKLDLHKNTFIDLQKAAILNTCHTVRKFLNM

SEQ ID NO: 9859 - protein, 1200 aa, Galerucella calmariensis
MSNCKTRLPQVGRAKCSESHTASVPSTSAVCSTDSGGSNNSIVNSGTLNLRNRQVNRHCNTLNSCRAQAGARRACSKNDESTSSSVSGRRSVTPSRATVTHTHEENNINPHPPASAVSGVTQVGTSTTTNAGKPRKRMKWTIELNSFIMRSYFKITKMETDMTTYRYALHRAFIEHFPEFQHLTEQRIADQRRSIVKNNLLPDPTLQQIRGEVLLDLQNEENDIITDHDTHEPENAQEDNNGVEKTNIDCDKTPDNDYNTELSKALAEFNGTNPIHRPKLPKLRTNKSTNSIIAAVNLLLQNHAKDCKALEQLHTLIYCGAVTVLRIHNQRIQFPGNNQSKDYKQLKPWWQRRLESSIDDIRRELGQLTEFKNNLKPSRRLTNRVRKIYRKIKTYTGHPQHEQHVFEYMDSLRQKLKAKSKRLSRYVKCTKRKQQNYLFNNNQKLFYRQLSGTVNNQNQSPPNKDELTEYWSSLWSKPVEHKSNAHWIRTEEKKINIEPMSFVDLTTSEVTEAIKSTSNWKTPGVDHVQNFWYKKFDSLHEAMATSFSHILQHPEDTPPFLTLGSTHLLPKTHQTHDPSQYRPITCLPTIYKILTACITNRIYRHVDQNNILSEEQKGCRRDHQGCKEQLIIDSVILKQAQKEKRNIHTAFVDYRKAFDSVPHSWLVKVLQIYKVHPTVVTFLESAMKHWRTNLHLQINGQYLQTDEISIRRGIFQGDSLSPLWFCLAMNPLSNLLNDTDYGYKLKANRNTSCTVSHLLYMDDIKIYASNQRQIQHLLNITEKFSSDIQMGFGLDKCKTLNIEKGKIVNGDVLLPNGNIIIAMQNGETYKYLGFQQAKLLDQKQAKQRTTRTMMTKHKCHHPTSSVIRTTLPRREGGRGLVDIVNLHNKQISRLQEFFIAKAETSELHEMVAKADKNYSPLNLVSPDMRLEIVTDSDKQVEWAQKALHGRHHHDLNQPHIDKEASNKWLSDGTLFPETEGFMMAIQDQVINTNNYKKFVMKDPNIATDKCRRCQQTTETIQHITSGCSALANIDYLRRHNQLCNIIHQKLANKFGLVNTYTTYYKYHPNSVLENADFRLYYDRSIITDRRVTNNRPDIVVVDKKANSVYLVDVAVPNNNNILDKYNEKIAKYTDLAIEVRQMWHAEKIEVVPIIVSSTGLIPKTLQDSLTKLGLHKNTYIDLQKAAILNTCHTVRKFLNM

SEQ ID NO: 9860 - protein, 1257 aa, Ophraella communa
MSSFKTKLPQVDRVLRSQSHTAGVPGMSAVCSTDSGGSNNSIVTDTLSLRNRQVNRHCNTYNSCRVQVDDRRACSKNDASSSSVSGMRSVTPSMATAITQEENITDSPPPVSAVSGVSQDGTSMTTKAGKPRKRMKWTTEMNSFIIRSYFKITKIETDLTTYRYALHRAFIEQYPEFQHVTEQRIADQRRTIIKNNLLPGPLLQQIRSEVLLELQTEIDHNVIQHTNDQLDNIRLDDHTSEDTPNMDQNENIDNDTQTDEHENAVAELSKAIAEFDGTNPIQRPILPKLRSNKNTNRILALFNLLLNDRAKDCQTLEEIHTLIYCGAVAVLRSHNQQIRFPNKRSTEKQKPFKPWWQQRLEKSINDIRKELGQLTEFNNNTKPSRRLINRVKKILKKIKTNTGHPRYKEHLCSYTDLLRQKLKAKSKRLSRYVKCTKKKQQNHLFNTNEKLFYRQLSSAGTNNYHNLPSKNEFTDYWSSIWSNPQKHNEGAAWIESETDKSNIASMVFDNITTAEVNQVVEETNSWKAPGIDNIQNFWYKKFDSLYEVMASKFTHILQHPGEIPAFLTHGLTHMLPKTANTQDPSQYRPITCLPTLYKILTSCITNRIYRHVDQNNILAEEQKGCKRGHQGCKEQLVIDSVILRQAQKQCRNISTAFVDYRKAFDSVPHSWLIRILNIYKVHPTIVTFLEASMKQWRTNLQLNINGQHFKTDEIAIRRGIFQGDSLSPLWFCLAMNPLSHLLNDTKYGFNLKTNRNTNYTVSHLLYMDDIKIFASNQQQIQHLLDITERFSSDIHMEFGLDKCRTLNIEKGKIVNGDVALPNGDIIAAMQNGETYKYLGFQQARLLDQKQSKIRDEFSQRVSSLLKSELNAGNLNRAINTYAVPVLTYSFGILQWTKTELEDIQRTTRTMMTKYRCHHPTSSVLRTTLPRKEGGRALCDIVNLHNKQINRLRDFFITKSLSSNLHKSVIGADKKYSPLNLADPHMDLEITTDAEKQVKWAQKALHGRHHHDLNQPHIDKIASNRWLADGTLFPETEGFMMAIQDQVINTNNYKKFVIRDPTITTDKCRRCQQISETIQHITSGCSTIANTDYLRRHNQLCNIIHQKLANKYGLLNTYTPYYKYNPQAVLENADFRLYYDRSIITDRQVTNNRPDIVVVDKKAKSVLLVDVAVPNNNNVLDKYNEKMAKYTDLAIEVGQMWHAEKVEVVPIIVSSTGLIPKSLEDSLKKLDLHKNTFMDLQKAAILNTCHTVRKFLNM

SEQ ID NO: 9861 - protein, 1154 aa, Ophraella communa
MRSVTPSMATATTEEENNTKSPPPVSDVSGVSQDGTSMTTKAGKPRKRMKWTIEMNSFIIRSYFKITKIETDLTTYRFALHRAFIEQYPEFQHVTEQRIADQRRTIIKNNLLPGPLMQQIRSEVLLELQTEDDHNVIQHTNDQLDNIRLDDHTSEDTPNMDQNENIDNDTQTDEHENAVAELSKAIAEFDGTNPIQRPILPKLRSNKNTNRILALFNLLLNDRAKDCQTLEEIHTLIYCGAVAVLRSHNQQIRFPNKNCSERKKQHKPWWQQLLEKSINDIRKELGQLTEFITNTKPSRRLTNRVKKIFKKSKTNTEHPRHKEHLSSYMDLLRQKLKAKSKRLSRYVKCTKKKQQNHLFDNNEKLFYTQLSSVGTNSNDNLPSKHELTDYWSSIWSNPQKHNEGAEWIQSEKDKSNIAPMFFNNITTAEVNQAVGETNSWKAPGIDNIQNFWYKKFDSLHEIIASKFTHILQHPEDIPAFLTHGLTHMLPKTANTQDPSQYRPITCLPTLYKILTFCITNRIYRHVDQNNILAEEQKGCKRGHQGCKEQLVIDSVILRQAQKQCRNISTAFVDYRKAFDSVPHSWLLSVLNIYKVHPTIVTFLETSMKQWRTSLQVNINGQYIKTNEIVIRRGIFQGDSLSPLWFCLAMSTMLNYTKYGFNLKTNRNTNCTVSHLLYMDDIKIFAANQQQIQHLLDITERFSSDIHMEFGLDKCRTLNIEKGKIVNGNVALSNGDIIAAMQNGETYKYLGFQQARLLDQKQSKSKIKDQYTQRVSSLLKSELNAGNLNRAINTYAVPVLTYSFGILRWTKTELEDIQRTTRTMMTKYRYHHPISSVFRTTLPRKEGGRALCDIINLHNKQINKLQDFFITKSTSSNLHKFIVGANKNYSTLNLAGPNVDLEVTTDAEKHVKWAQKALHGRHHHDLNQPHIDEIASNRWLADGTLFPETEGFMMAIQDQVINTNNYKKFVIRDQTITSDKCRRCQQTSETIQHITSGCSTIANTDYLRRHNQLCNIIHQKLANKYGLLNTYTPYYKYNPQAVFENANFRLYYDRSIITDRQVTNNRPDIVVVDKKANSVLLVDVAVPNNNNILDKYNEKIAKYTDLAIEVGQMWHAEKVEVVPIIVSSTGLIPKSLEDSLKKLDLHKNTCKKRKF

SEQ ID NO: 9862 - protein, 842 aa, Ophraella communa
MDLVRQKLKAKSKRLSRYVKCTKKKQQNHLFDNNEKLFYRQLSSVGTNSNDNLPSKHELTDYWSSIWSNPQKHNEGAEWIQSEKDKSNIAPMLFNNITTTEVNQAVGETNSWKAPGIDNIQNFWYKKFDSLHEIIASKFTHILQHPEDIPAFLTHGLTHMLPKTAKTQDPSQYRPITCLPTLYKILTSCITNRIYRHVDQNNILAEEQKGCKRGHQGCKEQLVIDSVILRQAQKQCRNISTAFVDYSKAFDSVPHSWLLSVLNIYKVHPTIVTFLETSMKQWRTSLQVNINGQYIKTNEIVIRRGIFQGDSLSPLWFCLAMNPLSTMLNDTKYGFNLKTNRNTVSHLLYMDDIKIFAANQQQIEHLLDITERFSSDIHMEFGLDKCRTLNIEKGKIVNGDVALPNGDIIAAMQNGETYKYLGFQQARLLDQKQSKSKIKDQYTQRVSSLLKSELNAGNLNRAINTYAVPVLTYSFGILRWTKTELEDIQRTTRSMMTKYRYHHPISSVFRTTLPRKEGGRALCDIINLHNKQINKLRDFFITKSTSSNLHKFIVGADKNYSPLNLAGPNVDLEVTTDAEKHVKWAQKALHGRHHHDLNQPHIDKIASNRWLADGTLFPETEGFMMAIQDQVINTNNYKKFVIRDQTITSDKCRRCQQTSETIQHITSGCSTIANTDYLRRHNQLCNIIHQKLANKYGLLNTYTPYYKYNPQAVLENADFRLYYDRSIITDRQVTNNRPDIVVVDKKANSVLLVDVAVPNNNNILDKYNEKIAKYTDLAIEVGQMWHAEKVEVVPIIVSSTGLIPKSLEDSLKKLDLHKNTFIDLQKAAILNTCHTVRKFLNM

SEQ ID NO: 9863 - protein, 1212 aa, Pissodes strobi
MMYNLRKKRVNRHCTTETSCRVQASGSGTCSKNELPSPSASGKRSVTPSRATANPTNLEEHNNDAPPPAFDVFAATQVNLPLTTKAGLPRKRMKWTTEMNSFIMRSYFKITKMETDLITYRYALHLAFVEKYPELQHLTEQRIADQRRAILSKNLLAAPILQQIRAEVMLELQNQEELPSTVNVVDEDHTGANENNTENDINPISDNNTQTEMADRVTYEFSRALAEFDGTDPTRRPKLPKLKTSKNTNVIIAAVDALLQNNIRDCYNLERLQSLVYCGAVAVLRSHNQQVRLSGGGCSGNDNKSLKPWWQRRLEGAIDNIRGELGRLTEFHNNPKPSRRLRNRVRKIFKKIGTHTKHPEHRQHVCEYIDLLKQKLKAKAKRLSRYVKCTKRKQQNALFNNNQKVFYRKLGSQTNNISQAMPSKEDLMNYWSSLWSNPKEHKNAPWIVSEMDKVNIPPMIFEELTAEEISEAIKCTNNWKAPGVDNIQNFWYKKFTSIHHSLALQYTNILHHPEDTPGFLTLGMTNMLPKSENTEDPTQYRPITCLPTLYKILTSCLTNRIYRHVELNNVLAEEQKGCRREHHGCKEQLIIDSVILKQAQNNQRNICTAFVDYKKAFDSVPHSWLVKVLEIYKIHPTIITFLSTIMKTWRTNLHLNLNGKYLTTDEISIRRGIYQGDSLSPLWFCLAMNPLSTMLNDTKYGFKITANRNTNCVVSHLLYMDDIKLYAANQQQMRQLLDITQKFSSDIHMEFGLTKCKTLNIERGVIVDGDVKLPNGDIIQAMENGETYKYLGFQQARLLEDKQAKTRIKDQYTQRIRFLLKSELNAGNLIQAINTYAMPVLTYSFGILKWTKTDLEEIQRLTRTLMTKHSCHHPKSSTLRMTLARREGGRGLVDVSNLHSRQVSNLREFFYTKARTSSLHNTVAKADKNYTPLNLASPDLTSEVKSDTTKMEEWAQKELHGRHYHDLNQPHIDKEASNRWLSRGELFPETEGFMMAIQDQVINTNNYKKFIIREPNIESDKCRKCHQVSETIQHITSGCSLLANTDYLHRHNQVCNIIHQKLANKYGLINTYTPYYKYQPQKVLENDNFKLYYDRPIITDRQVTNNRPDIVVVDKGVNSILLIDIAIPNNNNVLSKYQEKVSKYADLAFEIRQMWHANRVEVVPVILSSTGLIPKSLETSLLKLGLHRNTYIDLQKAVILNTCRTVRQFLQV

SEQ ID NO: 9864 - protein, 1212 aa, Pissodes strobi
MMYNLRKKRVNRHCTTETSCRVQASGSGTCSKNELPSPSASGKRSVTPSRATANPTNLEEHNNDAPPPAFDVFAATQVNLPLTTKAGLPRKRMKWTTEMNSFIMRSYFKITKMETDLITYRYALHLAFVEKYPELQHLTEQRIADQRRAILSKNLLAAPMLQQIRAEVMLELQNQEELPSTVNVVDEDHTGANENNTENDINPISDNNTQTEMADRVTYEFSRALAEFDGTDPTRRPKLPKLKTSKNTNVIIAAVDALLQNNIRDCYNLERLQSLVYCGAVAVLRSHNQQVRLSGSGCSGNDNKSLKPWWQRRLEGAIDNIRGELGRLTEFHNNPKPSRRLRNRVRKIFKKIGTHTKHPEHRQHVCEYIDLLKQKLKAKAKRLSRYVKCTKRKQQNALFNNNQKVFYRKLGSQTNNISQAMPSKEDLMNYWSSLWSNPKEHKNAPWIVSEMDKVNIPPMIFEELTAEEISEAIKCTNNWKAPGVDNIQNFWYKKFTSIHHSLALQYTNILHHPEDTPGFLTLGMTNMLPKSENTEDPTQYRPITCLPTLYKILTSCLTNRIYRHVELNNVLAEEQKGCRREHHGCKEQLIIDSVILKQAQNNQRNICTAFVDYKKAFDSVPHSWLVKVLEIYKIHPTIITFLSTIMKTWRTNLHLNLNGKYLTTDEISIRRGIYQGDSLSPLWFCLAMNPLSTMLNDTKYGFKITANRNTNCVVSHLLYMDDIKLYAANQQQMRQLLDITQKFSSDIHMEFGLTKCKTLNIERGVIVDGDVKLPNGDIIQAMENGETYKYLGFQQARLLEDKQAKTRIKDQYTQRIRFLLKSELNAGNLIQAINTYAMPVLTYSFGILKWTKTDLEEIQRLTRTLMTKHSCHHPKSSTLRMTLARREGGRGLVDVSNLHSRQVSNLREFFYTKARTSSLHNTVAKADKNYTPLNLASPDLTSEVKSDTTKMEEWAQKELHGRHYHDLNQPHIDKEASNRWLSRGELFPETEGFMMAIQDQVINTNNYKKFIIREPNIESDKCRKCHQVSETIQHITSGCSLLANTDYLHRHNQVCNIIHQKLANKYGLINTYTPYYKYQPQKVLENDNFKLYYDRPIITDRQVTNNRPDIVVVDKGVNSILLIDIAIPNNNNVLSKYQEKVSKYADLAFEIRQMWHANRVEVVPVILSSTGLIPKSLETSLLKLGLHRNTYIDLQKAVILNTCRTVRQFLQV

SEQ ID NO: 9865 - protein, 1120 aa, Pissodes strobi
MQIIIIIILIIIIIIIIITKMETDLITYRYALHLAFVEKYPELQHLTEQRIADQRRAILSKNLLAAPMLQQIRAEVMLELQNQEELPSTVNVVDEDHTGANENNTENDINPISDNNTQTEMADRVTYEFSRALAEFDGTDPTRRPKLPKLKTSKNTNVIIAAVDALLQNNIRDCYNLERLQSLVYCGAVAVLRSHNQQVRLSGGGCSGNDNKSLKPWWQRRLEGAIDNIRGELGRLTEFHNNPKPSRRLRNRVRKIFKKIGTHTKHPEHRQHVCEYIDLLKQKLKAKAKRLSRYVKCTKRKQQNALFNNNQKVFYRKLGSQTNNISQAMPSKEDLMNYWSSLWSNPKEHKNAPWIVSEMDKVNIPPMIFEELTAEEISEAIKCTNNWKAPGVDNIQNFWYKKFTSIHHSLALQYTNILHHPEDTPGFLTLGMTNMLPKSENTEDPTQYRPITCLPTLYKILTSCLTNRIYRHVELNNVLAEEQKGCRREHHGCKEQLIIDSVILKQAQNNQRNICTAFVDYKKAFDSVPHSWLVKVLEIYKIHPTIITFLSTIMKTWRTNLHLNLNGKYLTTDEISIRRGIYQGDSLSPLWFCLAMNPLSTMLNDTKYGFKITANRNTNCVVSHLLYMDDIKLYAANQQQMRQLLDTTQKFSSDIHMEFGLTKCKTLNIERGVIVDGDVKLPNGDIIQAMENGETYKYLGFQQARLLEDKQAKTRIKGQYTQRIRFLLKSELNAGNLIQAINTYAMPVLTYSFGILKWTKTDLEEIQRLTRTLMTKHSCHHPKSSTLRMTLARREGGRGLVDVGNLHSRQVSNLREFFYTKARTSSLHNTVAKADKNYTPLNLASPDLTSEVKSDTTKMEEWAQKELHGRHYHDLNQPHIDKEASNRWLSRGELFPETEGFMMAIQDQVINTNNYKKFIIREPNIESDKCRKCHQVSETIQHITSGCSLLANTDYLHRHNQVCNIIHQKLANKYGLINTYTPYYKYQPQKVLENDNFKLYYDRPIITDRQVTNNRPDIVVVDKGVNSILLIDIAIPNNNNVLSKYQEKVSKYADLAFEIRQMWHANRVEVVPVILSSTGLIPKSLETSLLKLGLHRNTYIDLQKAVILNTCRTVRQFLQV

SEQ ID NO: 9866 - protein, 1212 aa, Pissodes strobi
MMYNLRKKRVNRHCTTETSCRVQASGSGTCSKNELPSPSASGKRSVTPSRATANPTNLEEHNNDAPPPAFDVFAATQVNLPLTTKAGLPRKRMKWTTEMNSFIMRSYFKITKMETDLITYRYALHLAFVEKYPELQHLTEQRIADQRRAILSKNLLAAPMLQQIRAEVMLELQNQEELPSTVNVVDEDHTGANENNTENDINPISDNNTQTEMADRVTYEFSRALAEFDGTDPTRRPKLPKLKTSKNTNVIIAAVDALLQNNIRDCYNLERLQSLVYCGAVAVLRSHNQQVRLSGSGCSGNDNKSLKPWWQRRLEGAIDNIRGELGRLTEFHNNPKPSRRLRNRVRKIFKKIGTHTKHPEHRQHVCEYIDLLKQKLKAKAKRLSRYVKCTKRKQQNALFNNNQKVFYRKLGSQTNNISQAMPSKEDLMNYWSSLWSNPKEHKNAPWIVSEMDKVNIPPMIFEELTAEEISEAIKCTNNWKAPGVDNIQNFWYKKFTSIHHSLALQYTNILHHPEDTPGFLTLGMTNMLPKSENTEDPTQYRPITCLPTLYKILTSCLTNRIYRHVELNNVLAEEQKGCRREHHGCKEQLIIDSVILKQAQNNQRNICTAFVDYKKAFDSVPHSWLVKVLEIYKIHPTIITFLSTIMKTWRTNLHLNLNGKYLTTDEISIRRGIYQGDSLSPLWFCLAMNPLSTMLNDTKYGFKITANRNTNCVVSHLLYMDDIKLYAANQQQMRQLLDITQKFSSDIHMEFGLTKCKTLNIERGVIVDGDVKLPNGDIIQAMENGETYKYLGFQQARLLEDKQAKTRIKDQYTQRIRFLLQSELNAGNLIQAINTYAMPVLTYSFGILKWTKTDLEEIQRLTRTLMTKHSCHHPKSSTLRMTLARREGGRGLVDVSNLHSRQVSNLREFFYTKARTSSLHNTVAKADKNYTPLNLASPDLTSEVKSDTTKMEEWAQKELHGRHYHDLNQPHIDKEASNRWLSRGELFPETEGFMMAIQDQVINTNNYKKFIIREPNIESDKCRKCHQVSETIQHITSGCSLLANTDYLHRHNQVCNIIHQKLANKYGLINTYTPYYKYQPQKVLENDNFKLYYDRPIITDRQMTNNRPDIVVVDKGVNSILLIDIAIPNNNNVLSKYQEKVSKYADLAFEIRQMWHANRVEVVPVILSSTGLIPKSLETSLLKLGLHRNTYIDLQKAVILNTCRTVRQFLQV

SEQ ID NO: 9867 - protein, 1223 aa, Ophraella communa
MQICFRMYNLRNKRVNRHCTTITSCRVPDLGRGSGSKNELRSPSASDSSSVTPSMATATTTPEDFDTSHPQPAADVSRATQVNMPATTKAGKPRKRMKWTSELNSFIMRSYYRITKMETDLTTYRYALHRAVLEKYPDLLHLTEQRIADQRRAIVRNNLLPAPTLQQIRGEVLLELQREEDANSTGGAGEVAQIAREGDHNGDDETNTNHVITVDLDIHAAVSIDDSAVVEFRRALAEFDGTNPIRRPKLPKLKTGKNTKNIISAVNSIVQEYSRDCSTLEQLHCIIYCGAVAVLRSHNQKVQQPTQKRNDDCKNLKPWWQRRLENAIDDIRRELGQLTEFQRNAHPSKRLKNRVGKIFKKLGTHSKHPQHQQHLREYIDLLKQKLKAKSKRLSRYIRCTKRKQQNRLFNNNQKLFYRELGTTTTINNQALPSKRDLTNYWSSLWSNPKDHKGDACWITSEQENVQIPQMHFDEITTNEVTEAIVNTNNWKAPGVDNIQNFWYKKFTSLHKSLAVQFTHILHYPEDTPTFLTLCSTYMLPKSSQTEDPTQYRPITCLPTLYKILTSCITKCIYRHIDQNNVLSEEQKGCRRDHQGCKEQLIIDSVILKQAQKEQRNIYTAFVDYKKAFDSVPHSWLVKVLQIYRIHPTITTFLSAIMKNWRTNLHLNVNGKYLSTNEIPIRRGIYQGDSLSPLWFCLAMNPLSIMLNNTEYGFKIKASRNNSCTVSHLLYMDDIKLYAANQHQMQHLLNITQKFSSDIHMEFGLNKCKTLNIESGKVVNGDVLLPNGEIINAMVNGETYKYLGFQQARLLDHKQAKVRIKEQFTQRVRSLLKSELNAGNLTQAINTYATPVLTYSFGILKWTNTELEDIQRLIRTMLTKHNSHHPKSSTLRTTLPRKEGGRGLTDIVNLHSSQVGKLRDFFFRKAQTSALHKLVMKADKNYSPLNLASPGANPEIISDSEKKEKWSQKALHGRHYHDLNKSHINKEASNKWLTNGTLFPETEGFLIAIQDQVINTNNYKKFIIRDANTKSDKCRKCHQMPETIQHITSGCTYLANTDYLHRHNQICNIIHQKLANKFGLVNTYTPYYKYQPQKVLENNNFRLYYDRPIITDRQVTNNRPDIVVVNKRSNSVLLVDVAVPNNNNIEDKYQEKIVKYNDLAFEIRQMWHADKVEVVPVIVSSTGLIPRTLEDSLARLELHKNTYIDIQKAVILNTCHSVRKFFNT

SEQ ID NO: 9868 - protein, 1212 aa, Pissodes strobi
MMYNLRKKRVNRHCTTETSCRVQASGSGTCSKNELPSPSASGKRSVTPSRATANPTNLEEHNNDAPPPAFDVFAATQVNLPLTTKAGLPRKRMKWTTEMNSFIMRSYFKITKMETDLITYRYALHLAFVEKYPELQHLTEQRIADQRRAILSKNLLAAPMLQQIRAEVMLELQNQEELPSTVNVVDEDHTGANENNTENDINPISDNNTQTEMADRVTYEFSRALAEFDGTDPTRRPKLPKLKTSKNTNVIIAAVDALLQNNIRDCYNLERLQSLVYCGAVAVLRSHNQQVRLSGSGCSGNDNKSLKPWWQRRLEGAIDNIRGELGRLTEFHNNPKPSRRLRNRVRKIFKKIGTHTKHPEHRQHVCEYIDLLKQKLKAKAKRLSRYVKCTKRKQQNALFNNNQKVFYRKLGSQTNNISQAMPSKEDLMNYWSSLWSNPKEHKNAPWIVSEMDKVNIPPMIFEELTAEEISEAIKCTNNWKAPGVDNIQNFWYKKFTSIHHSLALQYTNILHHPEDTPGFLTLGMTNMLPKSENTEDPTQYRPITCLPTLYKILTSCLTNRIYRHVELNNVLAEEQKGCRREHHGCKEQLIIDSVILKQAQNNQRNICTAFVDYKKAFDSVPHSWLVKVLEIYKIHPTIITFLSTIMKTWRTNLHLNLNGKYLTTDEISIRRGIYQGDSLSPLWFCLAMNPLSTMLNDTKYGFKITANRNTNCVVSHLLYMDDIKLYAANQQQMRQLLDITQKFSSDIHMEFGLTKCKTLNIERGVIVDGDVKLPNGDIIQAMENGETYKYLGFQQARLLEDKQAKTRIKDQYTQRIRFLLKSELNAGNLIQAINTYAMPVLTYSFGILKWTKTDLEEIQRLTRTLMTKHSCHHPKSSTLRMTLARREGGRGLVDVSNLHSRQVSNLREFFYTKARTSSLHNTVAKADKNYTPLNLASPDLTSEVKSDTTKMEEWAQKELHGRHYHDLNQPHIDKEASNRWLSRGELFPETEGFMMAIQDQVINTNNYKKFIIREPNIESDKCRKCHQVSETIQHITSGCSLLANTDYLHRHNQVCNIIHQKLANKYGLINTYTPYYKYQPQKVLENDNFKLYYDRPIITDRQMTNNRPDIVVVDKGVNSILLIDIAIPNNNNVLSKYQEKVSKYADLAFEIRQMWHANRVEVVPVILSSTGLIPKSLETSLLKLGLHRNTYIDLQKAVILNTCRTVRQFLQV

SEQ ID NO: 9869 - protein, 754 aa, Ophraella communa
MHFDEITTNEVTEAIVNTNNWKAPGVDNIQNFWYKKFTSLHKSLAVQFTHILHHPEDTPTFLTLGSTYMLPKSSQTEDPTQYRPITCLPTLYKILTSCITKCIYRHIDQNNVLSEEQKGCRRDHQGCKEQLIIDSVILKQAQKEQRNIYTAFVDYKKAFDSVPHSWLVKVLQIYRIHPTITTFLSAIMKNWRTNLHLNVNGKYLSTNEIPIRRGIYQGDSLSPLWFCLAMNPLSIMLNNTEYGFKIKASRNNSCTVSHLLYMDDIKLYAANQHQMQHLLNITQKFSSDIHMEFGLNKCKTLNIESGKVVNGDVLLPNGEIINAMVNGETYKYLGFQQARLLDHKQAKVRIKEQFTQRVRSLLKSELNAGNLTQAINTYATPVLTYSFGILKWTNTELEDIQRLIRTMLTKHNSHHPKSSTLRTTLPRKEGGRGLTDIVNLHSSQVGKLRDFFFRKAQTSALHKLVMKADKNYSPLNLASPGANPEIISDSEKKEKWSQKALHGRHYHDLNKSHINKEASNKWLTNGTLFPETEGFLIAIQDQVINTNNYKKFIIRDANTKSDKCRKCHQMPETIQHITSGCTYLANTDYLHRHNQICNIIHQKLANKFGLVNTYTPYYKYQPQKVLENNNFRLYYDRPIITDRQVTNNRPDIVVVNKRSNSVLLVDVAVPNNNNIEDKYQEKIVKYNDLAFEIRQMWHADKVEVVPVIVSSTGLIPRTLEDSLARLELHKNTYIDIQKAVILNTCHSVRKFFNT

SEQ ID NO: 9870 - protein, 1000 aa, Pissodes strobi
MADRVTYEFSRALAEFDGTDPTRRPKLPKLKTSKNTNVIIAAVDALLQNNIRDCYNLERLQSLVYCGAVAVLRSHNQQVRLSGGGCSGNDNKSLKPWWQRRLEGAIDNIRGELGRLTEFHNNPKPSRRLRNRVRKIFKKIGTHTKHPEHRQHVCEYIDLLKQKLKAKAKRLSRYVKCTKRKQQNALFNNNQKVFYRKLGSQTNNISQAMPSKEDLMNYWSSLWSNPKEHKNAPWIVSEMDKVNIPPMIFEELTAEEISEAIKCTNNWKAPGVDNIQNFWYKKFTSIHHSLALQYTNILHHPEDTPGFLTLGMTNMLPKSENTEDPTQYRPITCLPTLYKILTSCLTNRIYRHVELNNVLAEEQKGCRREHHGCKEQLIIDSVILKQAQNNQRNICTAFVDYKKAFDSVPHSWLVKVLEIYKIHPTIITFLSTIMKTWRTNLHLNLNGKYLTTDEISIRRGIYQGDSLSPLWFCLAMNPLSTMLNDTKYGFKITANRNTNCVVSHLLYMDDIKLYAANQQQMRQLLDITQKFSSDIHMEFGLTKCKTLNIERGVIVDGDVKLPNGDIIQAMENGETYKYLGFQQARLLEDKQAKTRIKDQYTQRIRFLLKSELNAGNLIQAINTYAMPVLTYSFGILKWTKTDLEEIQRLTRTLMTKHSCHHPKSSTLRMTLARREGGRGLVDVSNLHSRQVSNLREFFYTKARTSSLHNTVAKADKNYTPLNLASPDLTSEVKSDTTKMEEWAQKELHGRHYHDLNQPHIDKEASNRWLSRGELFPETEGFMMAIQDQVINTNNYKKFIIREPNIESDKCRKCHQVSETIQHITSGCSLLANTDYLHRHNQVCNIIHQKLANKYGLINTYTPYYKYQPQKVLENDNFKLYYDRPIITDRQVTNNRPDIVVVDKGVNSILLIDIAIPNNNNVLSKYQEKVSKYADLAFEIRQMWHANRVEVVPVILSSTGLIPKSLETSLLKLGLHRNTYIDLQKAVILNTCRTVRQFLQV

SEQ ID NO: 9871 - protein, 1212 aa, Pissodes strobi
MMYNLRKKRVNRHCTTETSCRVQASGSGTCSKNELPSPSASGKRSVTPSRATANPTNLEEHNNDAPPPAFDVFAATQVNLPLTTKAGLPRKRMKWTTEMNSFIMRSYFKITKMETDLITYRYALHLAFVEKYPELQHLTEQRIADQRRAILSKNLLAAPMLQQIRAEVMLELQNQEELPSTVNVVDEDHTGANENNTENDINPISDNNTQTEMADRVTYEFSRALAEFDGTDPTRRPKLPKLKTSKNTNVIIAAVDALLQNNIRDCYNLERLQSLVYCGAVAVLRSHNQQVRLSGGGCSGNDNKSLKPWWQRRLEGAIDNIRGELGRLTEFHNNPKPSRRLRNRVRKIFKKIGTHTKHPEHRQHVCEYIDLLKQKLKAKAKRLSRYVKCTKRKQQNALFNNNQKVFYRKLGSQTNNISQAMPSKEDLMNYWSSLWSNPKEHKNAPWIVSEMDKVNIPPMIFEELTAEEISEAIKCTNNWKAPGVDNIQNFWYKKFTSIHHSLALQYTNILHHPEDTPGFLTLGMTNMLPKSENTEDPTQYRPITCLPTLYKILTSCLTNRIYRHVELNNVLAEEQKGCRREHHGCKEQLIIDSVILKQAQNNQRNICTAFVDYKKAFDSVPHSWLVKVLEIYKIHPTIITFLSTIMKTWRTNLHLNLNGKYLTTDEISIRRGIYQGDSLSPLWFCLAMNPLSTMLNDTKYGFKITANRNTNCVVSHLLYMDDIKLYSANQQQMRQLLDITQKFSSDIHMEFGLTKCKTLNIERGVIVDGDVKLPNGDIIQAMENGETYKYLGFQQARLLEDKQAKTRIKDQYTQRIRFLLKSELNAGNLIQAINTYAMPVLTYSFGILKWTKTDLEEIQRLTRTLMTKHSCHHPKSSTLRMTLARREGGRGLVDVSNLHSRQVSNLREFFYTKARTSSLHNTVAKADKNYTPLNLASPDLTSEVKSDTTKMEEWAQKELHGRHYHDLNQPHIDKEASNRWLSRGELFPETEGFMMAIQDQVINTNNYKKFIIREPNIESDKCRKCHQVSETIQHITSGCSLLANTDYLHRHNQVCNIIHQKLANKYGLINTYTPYYKYQPQKVLENDNFKLYYDRPIITDRQVTNNRPDIVVVDKGVNSILLIDIAIPNNNNVLSKYQEKVSKYADLAFEIRQMWHANRVEVVPVILSSTGLIPKSLETSLLKLGLHRNTYIDLQKAVILNTCRTVRQFLQV

SEQ ID NO: 9872 - protein, 1212 aa, Pissodes strobi
MMYNLRKKRVNRHCTTETSCRVQASGSGTCSKNELPSPSASGKRSVTPSRATANPTNLEEHNNDAPPPAFDVFAATQVNLPLTTKAGLPRKRMKWTTEMNSFIMRSYFKITKMETDLITYRYALHLAFVEKYPELQHLTEQRIADQRRAILSKNLLAAPMLQQIRAEVMLELQNQEELPSTVNVVDEDHTGANENNTENDINPISDNNTQTELADRVTYEFSRALAEFDGTDPTRRPKLPKLKTSKNTNVIIAAVDALLQNNIRDCYNLERLQSLVYCGAVAVLRSHNQQVRLSGGGCSGNDNKSLKPWWQRRLEGAIDNIRGELGRLTEFHNNPKPSRRLRNRVRKIFKKIGTHTKHPEHRQHVCEYIDLLKQKLKAKAKRLSRYVKCTKRKQQNALFNNNQKVFYRKLGSQTNNISQAMPSKEDLMNYWSSLWSNPKEHKNAPWIVSEMDKVNIPPMIFEELTAEEISEAIKCTNNWKAPGVDNIQNFWYKKFTSIHHSLALQYTNILHHPEDTPGFLTLGMTNMLPKSENTEDPTQYRPITCLPTLYKILTSCLTNRIYRHVELNNVLAEEQKGCRREHHGCKEQLIIDSVILKQAQNNQRNICTAFVDYKKAFDSVPHSWLVKVLEIYKIHPTIITFLSTIMKTWRTNLHLNLNGKYLTTDEISIRRGIYQGDSLSPLWFCLAMNPLSTMLNDTKYGFKITANRNTNCVVSHLLYMDDIKLYAANQQQMRQLLDITQKFSSDIHMEFGLTKCKTLNIERGVIVDGDVKLPNGDIIQAMENGETYKYLGFQQARLLEDKQAKTRIKDQYTQRIRFLLKSELNAGNLIQAINTYAMPVLTYSFGILKWTKTDLEEIQRLTRTLMTKHSCHHPKSSTLRMTLARREGGRGLVDVSNLHSRQVSNLREFFYTKARTSSLHNTVAKADKNYTPLNLASPDLTSEVKSDTTKMEEWAQKELHGRHYHDLNQPHIDKEASNRWLSRGELFPETEGFMMAIQDQVINTNNYKKFIIREPNIESDKCRKCHQVSETIQHITSGCSLLANTDYLHRHNQVCNIIHQKLANKYGLINTYTPYYKYQPQKVLENDNFKLYYDRPIITDRQVTNNRPDIVVVDKGVNSILLIDIAIPNNNNVLSKYQEKVSKYADLASEIRQMWHANRVEVVPVILSSTGLIPKSLETSLLKLGLHRNTYIDLQKAVILNTCRTVRQFLQV

SEQ ID NO: 9873 - protein, 1212 aa, Pissodes strobi
MMYNLRKKRVNRHCTTETSCRVQASGSGTCSKNELPSPSASGKRSVTPSRATANPTNLEEHNNDAPPPAFDVFAATQVNLPLTTKAGLPRKRMKWTTEMNSFIMRSYFKITKMETDLITYRYALHLAFVEKYPELQHLTEQRIADQRRAILSKNLLAAPMLQQIRAEVMLELQNQEELPSTVNVVDEDHTGANENNTENDINPISDNNTQTEMADRVTYEFSRALAEFDGTDPTRRPKLPKLKTSKNTNVIIAAVDALLQNNIRDCYNLERLQSLVYCGAVAVLRSHNQQVRLSGGGCSGNDNKSLKPWWQRRLEGAIDNIRGELGRLTEFHNNPKPSRRLRNRVRKIFKKIGTHTKHPEHRQHVCEYIDLLKQKLKAKAKRLSRYVKCTKRKQQNALFNNNQKVFYRKLGSQTNNISQAMPSKEDLMNYWSSLWSNPKEHKNAPWIVSEMDKVNIPPMIFEELTAEEISEAIKCTNNWKAPGVDNIQNFWYKKFTSIHHSLALQYTNILHHPEDTPGFLTLGMTNMLPKSENTEDPTQYRPITCLPTLYKILTSCLTNRIYRHVELNNVLAEEQKGCRREHHGCKEQLIIDSVILKQAQNNQRNICTAFVDYKKAFDSVPHSWLVKVLEIYKIHPTIITFLSTIMKTWRTNLHLNLNGKYLTTDEISIRRGIYQGDSLSPLWFCLAMNPLSTMLNDTKYGFKITANRNTNCVVSHLLYMDDIKLYAANQQQMRQLLDITQKFSSDIHMEFGLTKCKTLNIERGVIVDGDVKLPNGDIIQAMENGETYKYLGFQQARLLEDKQAKTRIKDQYTQRIRFLLKSELNAGNLIQAINTYAMPVLTYSFGILKWTKTDLEEIQRLTRTLMTKHSCHHPKSSTLRMTLARREGGRGLVDVSNLHSRQVSNLREFFYTKARTSSLHNTVAKADKNYTPLNLASPDLTSEVKSDTTKMEEWAQKELHGRHYHDLNQPHIDKEASNRWLSRGELFPETEGFMMAIQDQVINTNNYKKFIIREPNIESDKCRKCHQVSETIQHITSGCSLLANTDYLHRHNQVCNIIHQKLANKYGLINTYTPYYKYQPQKVLENDNFKLYYDRPIITDRQVTNNRPDIVVVDKGVNSILLIDIAIPNNNNVLSKYQEKVSKYADLAFEIRQMWHANRVEVVPVILSSTGLIPKSLETSLLKLGLHRNTYIDLQKAVILNTCRTVRQFLQV

SEQ ID NO: 9874 - protein, 1161 aa, Thalassophryne amazonica
MEFHDNDTGNVLNGQSSNQRQCQGCGCVFKSERGRKIHQTKMKCGRIVTDVQRSVQTDKSVVNEGLEFNHSALTELVVDEAKDRMKTKWTSSQNKADWKSMEEDLVPAIGMLRGKPMKRQCQGCGRVFKSEKGRKIHQTKMKCGRIVTDFQRSVQTDKSAVNGGLEFNHSALTEPVVDEAKDCMKIKWPSSQNKADWKSMEEDLVPAIGMLRGKPVKRMENFSKMVCEYGRSRFGVIEWRVQKKMEEKDQINRRRRKIKELRKEVQRLRRAKREASGEKVVAIDELVKLVRNGISKLAKAERKAVRRRESRKARKDFTEDPFKFTKKVFAEKTSGSLKISREQLEEALMTTYADPNRNIQVESIDGLNRPQEPEVPFDLCRIRLCEVQVVVRNARAKAAGGPNGITYAVYKNCPELTKCLWKLLASVWESGEIPDSWCIADGIYIPKEKDAVALGQFRPISLLNVEGKIFFTVLAKRLTQFLLANSLINTSIQKAGIPGFPGCLEHVSMIWNRIMQEKNVKKELHVIWLDLANAYGSVPHRMIPFALDFFHVPGKLQQAVEKYFGKFKFWFTTEEFTTKFMRLEKGIAMGCAISPVLFILVMEVIIRSCGGDEYQIKAFMDDLTILEAEEWRAKKLVERLQELVTWSGMVFKAKKSRYLTLRAGKVVDEVFMVEGERALKGVKSLGHWYSFPITDRHRGVEVQQQAEDGLKAIAKTKLPGKFKVWMVQFGLLLRLMWPLTVYEVALTRVESIEGKISKMVRKWLGVPKMLTDVALYSRSTKLQFPLSSVVEEYKVAKVRLQSMLNDSNDQVISNNPPALQVGRKWNAGVMVKEVEAVARQCEFVGVVREKGACLGVRRRQRFWSKVGAGERRKIREQETRRLVEAERVSRAAQQGQQGRWMTWDVEERKVTWKDIWRRSFGSLKRLLQMTYDVFPSPANLRRWGTGKSANCHLCGKYATFHHILSACHVALSRGWYTFRQNLVLKVAVKAVNDAFVPVKKSQPVKFVRAGEQVRSRKQKRMGTGPKRKWTVLEDKTLPVDVVVSDLRPDVTLIDREERRVILGELTVSWEEGIDGARQRKLNRYEDLRVEIGERGWKVEVIPFEVGCRGFPAASVGRFLRAAGVDGCRMVVKEMGERAEDGSTWILRAWAQQETAVAAPLS

SEQ ID NO: 9875 - protein, 817 aa, Thalassophryne amazonica
MTTYADPNRNIQVESIDGLNRPQEPEVPFDLCRIRLCEVQVVVRNARAKAAGGPNGITYAVYKNCLELTKCLWKLLASVWESGEIPDCWCIADGIYIPKEKDAVALGQFRPISLLNVEGKIFFTVLAKRLTQFLLANSLINTSIQKAGIPGFPGCLEHVSMIWNRIMQEKNAKKELHVIWLDLANAYGSVPHRMIRFALDFFHVPGKLQQAVEKYFGKFKFRFTTEEFTTKFMRLEKGIVMGCAISPVLFVLVMEVIIRSCGGDEYQLKAFMDDLTILEAEEWRAKKLVERLQELVTWSGLVFKAKKSRYLTLRAGNVVDKVFMVEGERIPSVKEKGVKSLGRWYSFPITDRHRGVEVQQQAEDGLKAIVKTKLPGKFKVWMVQFGLLPRLMWPLTVYEVALTRVESIEGKISKMVRKWLGVPKMLTDVALYSRSTKLQFPLSSVVEEYKVAKVRLQSMLNDSNDQVISNNPPALQVGRKWNVGGMVKEVEAVARQREFVGVVREKGACLGVRRRQQFWSKVGAGERRKIREQETRRLMEAGRVSRAAQQGQQGRWMTWDVEERKVTWKDIWGRSIGSLKRLLQMTYDVFPSPANLRRWGTGKSANCHLCGKYATLHHILSACHVALSRGWYTFRHNLVLKVAVKAVNDAFVPVKKSQPVKFVRAGEQVRSRKQKRMGTGPKRKWTVLEDKTLPVDVVVSDLRPDVTLIDREERRVILGELTVSWEEGIDGARQRKLNRYEDLRVEIGERGWKVEVIPFEVGCRGFPAASVGRFLRAAGVDGCRMVVKEMGERAEDGSTWILRAWAQQETAVADPLS

SEQ ID NO: 9876 - protein, 956 aa, Thalassophryne amazonica
MKIKWPSSHNKADWKSMEEDLVPAIGMLRGKPVKRMENFSKMVCEYGRSRFGVIEWRVQKKMEEKDQINRRRRKIKELRKEVQWLRRAKREASGEKVVAIDELVKLARNGISKLAKTERKAVRRRESRKARKDFTEDPFKFTKKVFAEKTSGSLKISREQLEEALMTTYADPNRNIQVESIDGLNRPQEPEVPFDLCRIRLCEVQVVVRNARAKAAGGPNGITYAVYKNCPELTKCLWKLLASVWESGEIPDCWCIADGIYIPKEKDAVALGQFRPISLLNVEGKIFFTVLAKRLTQFLLANSLINTSIQKAGIPGFPGCLEHVSMIWNRIMQEKNAKKELHVIWLDLANAYGSVPHRMIRFALDFFHVPGKLQQAVEKYFGKFKFRFTTEEFTTKFMRLEKGIAMGCAISPVLFVLVMEVIIRSCGGDEYQLKAFMDDLTILEAEEWRAKKLVERLQELVTWSGLVFKAKKSRYLTLRAGNVVDNVFMVEGERIPSVKEKGVKSLGRWYSFPITDRHRGVDVQQQAEDGLKAIAKTKLPGKFKVWMVQFGLLPRLMWPLTVYEVALTRVESIEGKISKMVRKWLGVPKMLTDVALYSRSTKLQFPLSSVVEEYKVAKVRLQSMLNDSNDQVISNNPPALQVGRKWNVGGMVKEVEAVARQREFVGVVREKGACLGVRRRQQFWSKVGAGERRKIREQETRRLVEAGRVSRAAQQGQQGRWMTWDVEERKVTWKDIWGRSFGSLKRLLQMTYDVFPSPANLRRWGTGKSANCHLCGKYATLHHILSACHVALSRGWYTFRHNLVLKVAVKAVNDAFVPVKKSQPVKFVRAGEQVRSRKQKRMGTGPKRKWTVLEDKTLPVDVVVSDLRPDVTLIDREERRVILGELTVSWEEGIDGARQRKLNRYEDLRVEIGERGWKVEVIPFEVGCRGFPAASVGRFLRAAGVDGCRMVVKEMG

SEQ ID NO: 9877 - protein, 1036 aa, Thalassophryne amazonica
MIYRLSILLYASKATFMLMSAVIHFTKPHLSLRLWHTEPQFKYKATVVDEAKDRMKIKCPSSQNKADWKSMEEDLVPAIGMLRGKPVKRMENFSKMVCEYGRSRFGVIEWRVQKKMEEKDQINRRRRKIKELRKEVQRLRRAKREASGEKVVVIDELVKLARNGISKLAKAERKAVRRRESRKARKDFTEDPFKFTKKVFAEKTSGSLKISREQLEEALMTTYADPNRNIQVESIDGLNRPQEPEVPFDLCRIRLCEVQVVVRNARAKAAGGPNGITYAVYKNCPELTKCLWKLLVSVWESGEIPDSWCIADGIYIPKEKDAVALGQFRPISLLNVEGKIFFTVLAKRLTQFLLANSLINTSIQKAGIPGFPGCLEHVSMIWNRIMQEKNVKKELHVIWLDLANAYGSVPHRMIRFALDFFHVPGKLQQAVEKYFGKFKFRFTTEEFTTKFMRLEKGIAMGCAISPVLFILVMEVIIRSCGGDEYQLKAFMDDLTILEAEEWRAKKLVERLQELVTWSDMVFKAKKSRYLTLRAGKVVDEVFMVEGERIPSVKEKGVKSLGRWYSFPITDRHRGVEVQQQAEDGLKAIAKTKLPGKFKVWMVQFGLLPRLMWPLTVYEVALTRVESIEGKISKMVRKWLGVPKMLTDVALYSRSTKLQFPLSSVVEEYKVAKVRLQSMLNDSNDQVISNNPPALQVGRKWNAGGMVKEVEAVARQREFVGVVREKGACLGVRRRQRFWSKVGAGERRKIREQETRRLVEAERVSRAAQQGQQGRWMTWDVEERKVTRKDIWGRSFGSLKRLLQMTYDVFPSPANLRRWGTGKSANCHLCGKYATLHHILSACHVALSRGWSTFRHNLVLKVAVKAVNDAFVPVKKSQPVKFVRAGEQVRSRKQKRMGTGPKRKWTVLEDKTLPVDVVVSDLLPDVTLIDREERRVILGELTVSWEEGIDGARQRKLNRYEDLRVEIGERGWKVEVIPFEVGCRGFPAASVGRFLRAAGVDGCCMVVKEMGERGEDGSTWILRAWAQQETAVADPLS

SEQ ID NO: 9878 - protein, 1165 aa, Thalassophryne amazonica
MDFHDDDTGNVLNGQSSNQRQCQGCGCVFKSERGRKIHQTKMKCGRIVIDVQRSVQADKSVVNEGLVANHSALTDFVVDEVKDRMKTKWTSSQNKADWESMEEDLVPAIAMLRGKPVKRQCQGCGRVFKSEKGRKIHQTKMKCGRIVTDFQRSVQTDKSAVNGGLEFNHSALIEPVVDEAKDRMKIKWPSSHNKADWKSMEEDLVPAIGMLRGKPVKRMENFSKMVCEYGRSRFGVIEWRVQKKMDEKDQISRRRRKIKELRKEVQRLRRAKREASGEKVVAIDELVKLARNGISKLAKAERKAVRRRESRKARKDFTEDPFKFTKKVFAEKTSGSLKISREQLEEVLMTTYADPNRNIQVESIDGLNRPQEPEVPFDLCRIRLCEVQVVVRNARAKAAGGPNGITYAVYKNCPELTKCLWKLLASVWESGEIPDCWCIADGIYIPKEKDAVALGQFRPISLLNVEGKIFFTVLAKRLTQFLLANSLVNTSIQKAGIPGFPGCLEHVSMIWNRIMQEKNAKKELHVIWLDLANAYGSVPHGMIRFALDFFHVPGKLQQAVEKYFGKFKFRFTTEEFTTKFMRLEKGIAMGCAISPVLFVLVMEVIIRSCGGDEYQLKAFMDDLTILEAKEWRAKKLVERLQELVTWSGLVFKAKKSRYLTLRAGNVVDKVFMVEGERIPSVKEKGVKSLGRWYSFPITDRHRGVEVQQQAEDGLKAIAKTKLPGKFKVWMVQFGLLPRLMWPLTVYEVALTRVESIEGKISKMVRKWLGVPKMLTDVALYSRSTKLQFPLSSVVEEYKVAKVRLQSMLNDSNDQVISNNPPALQVGRKWKVGGMVKEVEAVARQREFVGVVCEKGACLGVRRRQQFWSKVGAGERRKIREQETRRLVEAGRVSRAAQQGQQGRWMTWDVEERKVTWKDIWGRSFGSLKRLLQMTYDVFPSPANLRRWGTGKSANCHLCGKYATLHHILSACHVALSRGWYTFRHNLVLKVAVKAVNDAFVPVKKSHPVKFVRAGERVRSRKQKRMGTGPKRKWTVLEDKTLPVDVVVSDLRPDVTLIDREERRVILGELTVSWEEGIDGARQRKLNRYEDLRVEIGERGWKVEVIPFEVGCRGFPAASVGRFLRAAGVDGCRMVVKEMGERAEDGSTWILRAWAQQETAVADPLS

SEQ ID NO: 9879 - protein, 1165 aa, Thalassophryne amazonica
MEFYDDDTGNVLNGQSSNQRQCQGCGCVFKSERGRKIHQTKMKCGRIVIDVQRSVQADKSVVNEGLAANHSALTEFVVDEVKDRMKTKWTSSQNKADWESMEEDLVPAIVMLRGKPVKRQCQGCGRVFKSEKGRKIHQTKMKCGRIVTDFQRSVQTDKSAVNGGLEFNHSALIEPVVDEAKDRMKIKWPSSHNKADWKSMEEDLVPAIGMLRGKPVKRMENFSKMVCEYGRSRFGVIEWRVQKKMEEKDQISRRRRKIKELRKEVQRLRRAKREASGEKVVAIDELVKLARNGISKLAKAERKAVRCRESRKARKDFTEDPFKFTKKVFAEKTSGSLKISREQLEEALMTTYADPNRNIQVESIDGLNRPQEPEVPFDLCRIRLCEVQVVVRNARAKAAGGPNGIMYAVYKNCPELTKCLWKLLASVWESGEIPDCWCIADGIYIPKEKDAVALGQFRPISLLNVEGKIFFTVLAKRLTQFLLANSLINTSIQKVGIPGFPGCLEHVSMIWNRIMQEKNAKKELHVIWLDLANAYGSVPHGMIRFALDFFHVPGKLQQAVEKYFGKFKFRFTTEEFTTKFMRLEKGIAMGCAISPVLFVLVMEVIIRSCGGDEYQLKAFMDDLTILEAEEWRAKKLVERLQELVTWSGLVFKAKKSRYLTLRAGNVVDKVFMVEGERIPSVKEKGVKSLGRWYSFPITDRHRGVEVQQQAKDGLKAIAKTKLPGKFKVWMVQFGLLPRLMWPLTVYEVALTRVESIEGKISKMVRKWLGVPKMLTDVALYSRSTKLQFPLSSVVEEYKVAKVRLQSMLNDSNDQVISNNPPALQVGRKWNVGGMVKEVEAVARQREFVGVVCEKGACLGVRRRQQFWSKVGAGERRKIREQETRWLVEAGRVSRAAQQGQQGRWMTWDVKERKVTWKDIWGRSFGSLKRLLQMTYDVFPSPANLRRWGTGKSANCHLCGKYATLHHILSACHVALSRGWYTFRHNLVLKVAVKVVNDAFVPVKKSQPVKFVRAGEQVRSRKQKRMGTGPKRKWTVLEDKTLPVDVVVSDLRPDVTLIDREERRVILGELTVSWEEGIDGARQRKLNRYEDLRVKIGERGWKVEVIPFEVGCRGFPAASVGRFLRAAGVDGCRMVVKEMGERAEDGSTWILRAWAQQETAVADPLS

SEQ ID NO: 9880 - protein, 897 aa, Thalassophryne amazonica
MKIKWPSSHNKADWKSMEEDLVPAIGMLRGKPVKRMENFSKMVCEYGRSRFGVIEWRVQKKMEEKDQINRRRRKIKELRKEVQRLRRAKREASGEKVVAIDELVKLARNGISKLAKAERKAVRRRESRKARKDFTEDPFKFTKKVFAEKTSGSLKISREQLEEALMTTYADPNRNIQVESIDGLNRPQEPEVPFDLCRIRLCEVQLVVRNARAKAAGGPNGITYAVYKNCPELTKCLWKLLASVWESGEIPDCWCIADGIYIPKEKDAVALGQFRPISLLNVEGKIFFTVLAKRLTQFLLANSLINTSIQKAGIPGFPGCLEHVSMIWNRIMQEKNAKKELHVIWLDLANAYGSVPHRMIRFALYFFHVPGKLQQAVEKYFGKFKFRFTTEEFTIKFMRLEKGIAMGCAISPVLFVLVMEVIIRSCGGDEYQLKAFMDDLTILEAEEWRAKKLVERLQELVTWSGLVFKAKKSRYLTLRAGNVVDKVFMVEGERIPSVKEKGVKSLGRWYSFPITDRHRGVEVQQQAEDGLKAIAKTKLPGKFKVWMVQFGLLPRLMWPLTVYEVALTRVESIEGKISKMVRKWLGVPKMLTDVALYSRSTKLQFPLSSVVEEYKVAKVRLQSMLNDSNDQVISNNPPALQVGRKWNVGGMMKEVEAVARQREFVGVVREKGACLGVRRRQQFWSKVGAGERRKIREQETRRLVEAGRVSRAAQQGQQGRWMTWDVEERKVTWKDIWGRSFGSLKRLLQMTYDVFPSPANLRRWGTGKSANCHLCGKYATLHHILSACHVALSRGWYTFRHNLVLKVAVKAVNDAFVPVKKSQPVKFVRAGEQVRSRKQKRMGTGPKRKWTVLEDKTLPVDVVVSDLRPDVTLIDREERRVILGELTVSWEEGIDGA

SEQ ID NO: 9881 - protein, 949 aa, Maniola hyperantus
MSQDSVRCEQCSNPRFFKNHKGLKIHVGKVHKTLDPSSVPPISFSSIPINSPAAPLWESLSTFKNSVPIIRRIPRGSRHSVCSSLKKTIQHVLCHNTCHSWELLLTFAYRTLHVDKGQSLSLTQKIKNNCTNDNNYSNFPPPSHPPLKHSVTLNKLIENKIDDGDLKGAARILFSSDTVAPDTAETLEALRSKHPSPSHNSSFPDVPSSDDLVFQATTNDVLGALLAFRSGSAAGLDGLSPQHFKDLVCGPNIDADGTLLKAITDLVNLMLSGRVPQEIVETLYGANLCALKKKDGGIRPIAVGSTIRRVVSKICCKKILPLISSTFVPVQLGFGVKGGCEAAVHAARTFLLGSREEVLLKIDVKNAFNSIDRGVLLSEVKNKFPQLFPYLAQCYRNPSKLVYKKNLLISAVGCQQGDPLGPAVFSLAIHPIISTLNSKFNVWYLDDGTLGGEVNTVLAALIYLSSVISKFESIGLELNFDKCEIYVPNSFSADSKLDILEKFNMLAPGIKILNDESLRLLGAPVLDASVPQFVENTISKFSSNSHRLFEINPHMALTILRFCLFVPKFTYYLRCSPLWKFNTLLDNLDAFVKNILTSILNCPISNQAWSQASLPIRYGGLGIRKISSVSLPAFLSSVYSTHTLYGKIISNSLGSIEVSGLTEARNEWSMHSPSQVPVSLSSQRQWDDIICKTTFDTLLANANSKKDRARLLAVSAKESGYWLHALPSANLGTLLDHTTLSVLIGLRLGATINQPHRCHCGDCVDAFGHHGLSCSRSAGRFSRHSTLNDIIRRSLATAHVPAVLEPIGLARGDGKRPDGMTLVPWKMGRSLVWDATCVDTLAASHIQATSSMAGAAAISAEQAKRRKYENLDGSFVFVPFGVETLGPWGPGARALFEEIAKRVIESTGDPRAGSYLGQRISLAIQRGNAASILGTMPRCGGLDEVLDLI

SEQ ID NO: 9882 - protein, 958 aa, Junonia evarete
MHRAAGSQADVSLDNLMRCDLCSQPRIFKNEKGLNIHKGKFHKKSPPLLSTLNNSDNNFPIYTNPLWKILSDFKHNNPIIRRIPRGCRTVVANALKNSIDNVTKHNSTQSWEHLLTFAYRILHVNKNSNESLSLTQKIKDNCSVSLNNNNTSSHIPATPKKTFNFNKFIENKINDGDLKGAARILFSNDAIAPDTAETLDCLKSKHPSPINSTCFPDPPSISASPFQANVDDVLEAVMGFRNGSAGGLDGLTPQHFKDLLCKVNGEAGRALLKSITDLVNLMLSGRVPPEICSILYGANLCALKKKDGGIRPIAVGSTIRRIVSKICCKKILPFLSTYFQPIQLGFGSKGGCEAAVHAARTYLQNSDSHIMVKIDIQNAFNSVDRGFLLTEIQDKIPDFFPYLWQCYGQPSKLTYKSNLLDSAVGCQQGDPLGPAIFSLAIHPIISALNSKFNVWYLDDGTLGGEVSTILQDLTTLKNKFKDIGLQLNYSKCEIFIPNNVKQLDRDLIISKFNNQTPGIKILNDTSLRLLGAPVLDASITPFIQDQISKFNNNSDRLYEINSHMALVIVRFCLFLPKFMYALRCSPIWKFDSLLSILDNLVRNALTKILNCALDDTTWTQASLPIRFGGLGVRKISDVSLPAFLSSVHSTHTLYGKIISPSLGSVEVSSVNEAKNAWLMVCPSGQPVSASSQRQWDDILCKNIFEQLLSRSPTTTDRARLLAVSERESGYWLHALPSSHLGTLLDHSTLTLIIGLRLGAKINQPHLCHCGQKVDEYGHHGLSCLKSAGRFSRHNTINDIIRRSLVSINVPSTLEPLGLVRKDGKRPDGMTLVPWKLGKSLVWDATCVDTLAPSHIQSTASVAGAAAANAEHSKRRKYEGLGEGFIFAPFGVETLGPWGPEARSLFRELSKRLWETTGDPRAGSYLGQRISLAIQRGNAASILGTLPVCSGLDEEYDFL

SEQ ID NO: 9883 - protein, 965 aa, Hypolimnas misippus
MHRTIGSQADVSLENHIRCEQCSQPRFFKNQKGLNIHKGKFHKNSIPRPSLKSLNSNSSSVSQNNSSQHPNPVWEILSDYKSRIPLIRRIPRGCRATVANALKNNIDNVVKNNSTQSWELLLTFAYRILHVDKSNKESHSLTQIIKENCSNLLNENNVFNNTTKNFKKEVTYKKYIENKINDGDIKGAARLLFSNDTIAPNTAETLDCLKSKHPSPINTICFPDPLSISVSPFQATVEDVLGAVMAFRNGSAGGLDGLTPQHFKDLLCKVNGEAGGALLKSITDLVNLMLSGLVPSNICSILYGANLCALKKKDGGIRPIAVGSTIRRVVSKICCRKILPFLSSYFQPIQLGFGSKGGCEAAVHAARTYLHNSDSEIILKIDVQNAFNSIDRGFLLSEVKGKIPEFFPYLWQCYGRTSKLIYKKNLIDSAVGCQQGDPLGPAIFSLAIHPSISGLNSKFNVWYLDDGTFGGKATTVLKDLISLKAKFENIGLHLNYSKCEIYISKNISQTDRDTILNQFNSETPGIKILSDSSLRLLGAPVLDDSIPPFIVDQITKFNDSSDRLYEINSHMALVIIRFCLFLPKFMYALRCSPIWKFDSLLITLDNLIRNVLSEILNCPIDDSIWTQASLPIRFGGLGVRKISNVSLPAFLSSVHSTHMLYGKIISPSLGSVEVSSLKEAKSAWLEICPSGQPVSASIQKQWDDLLCKNIFNQLLNRSTTITDRARLLAVSERESGYWLHALPSSNLGTLLDHTTLTLLIGLRLGAKIIQPHFCHCGQKVDEYGHHGLSCFKSAGRLSRHHAINDIIRRSLASAKVPATLEPIGLIRKDGKRPDGMTLVAWRLGKSLVWDATCVDTLAASHIQSAASMAGAAAASAEHSKRRKYESLDEAFIFAPFGVETLGPWGPDARSLFKDLSKRLWESTGDPRAGSYLGQRISLAIQRGNAASILGTLPRCSGLDEVYNVL

SEQ ID NO: 9884 - protein, 965 aa, Hypolimnas misippus
MHRTIGSQADVSLENHIRCEQCSQPRFFKNQKGLNIHKGKFHKNSIPRPSLKSLNSNSSSVSQNNSSQHPNPVWEILSDYKSRIPLIRRIPRGCRATVANALKNNIDNVVKNNSTQSWELLLTFAYRILHVDKSNKESHSLTQIIKENCSNLLNENNVFNNTTKNFKKEVTYKKYIENKINDGDIKGAARLLFSNDTIAPNTAETLDCLKSKHPSPINTICFPDPLSISVSPFQATVDDVLGAVMAFRNGSAGGLDGLTPQHFKDLLCKVNGEAGGALLKSITDLVNLMLSGLVPSNICSILYGANLCALKKKDGGIRPIAVGSTIRRVVSKICCRKILPFLSSYFQPIQLGFGSKGGCEAAVHAARTYLHNSDSEIILKIDVQNAFNSIDRGFLLSEVKGKIPEFFPYLWQCYGRTSKLIYKNNLIDSAVGCQQGDPLGPAIFSLAIHPSISGLNSKFNVWYLDDGTFGGKATTVLKDLISLKAKFENIGLHLNYSKCEIYISKNISQTDRDTILNQFNSETPGIKILSDSSLRLLGAPVLDDSIPPFIVDQITKFNDSSDRLYEINSHMALVIIRFCLFLPKFMYALRCSPIWKFDSLLITLDNLIRNVLSEILNCPIDDSIWTQASLPIRFGGLGVRKISNVSLPAFLSSVHSTHMLYGKIISPSLGSVEVSSLKEAKSAWLEICPSGQPVSASIQKQWDDLLCKNIFNQLLNRSTTITDRARLLAVSERESGYWLHALPSSNLGTLLDHTTLTLLIGLRLGAKIIQPHFCHCGQKVDEYGHHGLSCFKSAGRLSRHHAINDIIRRSLASAKVPATLEPIGLIRKDGKRPDGMTLVAWRLGKSLVWDATCVDTLAASHIQSAASMAGAAAASAEHSKRRKYESLDEAFIFAPFGVETLGPWGPDARSLFKDLSKRLWESTGDPRAGSYLGQRISLAIQRGNAASILGTLPRCSGLDEVYNVL

SEQ ID NO: 9885 - protein, 965 aa, Hypolimnas misippus
MHRTIGSQADVSLENHIRCEQCSQPRFFKNQKGLNIHKGKFHKNSIPRPSLKSLNSNSSSVSQNNSSQHPNPVWEILSDYKSRIPLIRRIPRGCRATVANALKNNIDNVVKNNSTQSWELLLTFAYRILHVDKSNKESHSLTQIIKENCSNLLNENNVFNNTTKNFKKEVTYKKYIENKINDGDIKGAARLLFSNDTIAPNTAETLDCLKSKHPSPINTICYPDPLSISVSPFQATVDDVLGAVMAFRNGSAGGLDGLTPQHFKDLLCKVNGEAGGALLKSITDLVNLMLSGLVPSNICSILYGANLCALKKKDGGIRPIAVGSTIRRVVSKICCRKILPFLSSYFQPIQLGFGSKGGCEAAVHAARTYLHNSDSEIILKIDVQNAFNSIDRGFLLSEVKGKIPEFFPYLWQCYGRTSKLVYKNNLIDSAVGCQQGDPLGPAIFSLAIHPSISGLNSKFNVWYLDDGTFGGKATTVLKDLISLKAKFENIGLHLNYSKCEIYISKNISQTDRDTILNQFNSETPGIKILSDSSLRLLGAPVLDDSIPPFIVDQITKFNDSSDRLYEINSHMALVIIRFCLFLPKFMYALRCSPIWKFDSLLITLDNLIRNVLSEILNCPIDDSIWTQASLPIRFGGLGVRKISNVSLPAFLSSVHSTHMLYGKIISPSLGSVEVSSLKEAKSAWLEICPSGQPVSASIQKQWDDLLCKNIFNQLLNRSTTITDRARLLAVSERESGYWLHALPSSNLGTLSDHTTLTLLIGLRLGAKIIQPHFCHCGQKVDEYGHHGLSCFKSAGRLSRHHAINDIIRRSLASAKVPATLEPIGLIRKDGKRPDGMTLVAWRLGKSLVWDATCVDTLAASHIQSAASMAGAAAASAEHSKRRKYESLDEAFIFAPFGVETLGPWGPDARSLFKDLSKRLWESTGDPRAGSYLGQRISLAIQRGNAASILGTLPRCSGLDEVYNVL

SEQ ID NO: 9886 - protein, 957 aa, Junonia villida
MHRAAGSQADVSLDNLMRCDLCSQPRFFKNEKGLNIHKGKFHKKSPPLSTLNNSDNNLPIFTNPLWKILSDFKHNNPIIRRIPRGCRTVVANSLKNSIDNVTKHNNTQSWEHLLTFAYRILHVNKNNNESLSLTQKIKDNCSVSLNNNNTSSHIPATPKKTFNFNKFIENKINDGDLKGAARILFSNDAIAPDTAETLDCLKSKHPSSINNTRFPDPPSISVSPFQAKVDDVLEAVMGFRNGSAGGLDGLTPQHFKDLLCKVNGEAGRALLKSITDLVNLMLSGRVPSEICSILYGANLCALKKKDGGIRPIAVGSTIRRVVSKICCKKILPFLSTYFQPIQLGFGSKGGCEAAVHAARTYLQNSDSHIMVKIDIQNAFNSVDRGFLLTEIQDKIPDFFPYLWQCYGQPTKLTYKSNLLDSAVGCQQGDPLGPAIFSLAIHPIISALNSKFNVWYLDDGTLGGEASTILQDLTTLKNKFKDIGLQLNYSKCEIFIPNNGNQLDRDSILSKFNNQTPGIKILNDASLRLLGAPVLDASITPFIQDQISKFNNNSDRLYEINSHMALVIVRFCLFLPKFMYALRCSPIWKFDSLLSTLDNLVRNALTKILNCALDDTTWTQASLPIRFGGLGVRKISNVSLPAFLSSVHSTHALYGKIISPSLGSVEVSSVNEAKNAWLMVCPSGQPVSASSQRQWDDILCKNIFEQLLSRSPTTTDRARLLAVSERESGYWLHALPSSHLGTLLDHSTLTLIIGLRLGAKINQPHLCHCGQKVDEYGHHGLSCLKSAGRFCRHNTINDIIRRSLASINLPSTLEPLGLVRKDGKRPDGMTLVPWKLGKSLVWDATCVDTLAPSHIQSTASVAGAAAANAEHSKRRKYEGLGEAFIFAPFGVETLGPWGPEAKSLFKELSKRLWETTGDPKAGSYLGQRISLAIQRGNAASILGTLPACSGLDEVYDFL

SEQ ID NO: 9887 - protein, 965 aa, Hypolimnas misippus
MHRTIGSQADVSLENHIRCEQCSQPRFFKNQKGLNIHKGKFHKNSIPRPSLKSLNSNSSSVSQNNSSQHPNPVWEILSDYKSRIPLIRRIPRGCRATVANALKNNIDNVVKNNSTQSWELLLTFAYRILHVDKSNKESHSLTQIIKENCSNLLNENNVFNNTTKNFKKEVTYKKYIENKINDGDIKGAARLLFSNDTIAPNTAETLDCLKSKHPSPINTICYPDPLSISVSPFQATVDDVLGAVMAFRNGSAGGLDGLTPQHFKDLLCKVNGEAGGALLKSITDLVNLMLSGLVPSNICSILYGANLCALKKKDGGIRPIAVGSTIRRVVSKICCRKILPFLSSYFQPIQLGFGSKGGCEAAVHAARTYLHNSDSEIILKIDVQNAFNSIDRGFLLSEVKGKIPEFFPYLWQCYGRTSKLVYKNNLIDSAVGCQQGDPLGPAIFSLAIHPSISGLNSKFNVWYLDDGTFGGKATTVLKDLISLKAKFENIGLHLNYSKCEIYISKNISQTDRDTILNQFNSETPGIKILSDSSLRLLGAPVLDDSIPPFIVDQITKFNDSSDRLYEINSHMALVIIRFCLFLPKFMYALRCSPIWKFDSLLITLDNLIRNVLSEILNCPIDDSIWTQASLPIRFGGLGVRKISNVSLPAFLSSVHSTHMLYGKIISPSLGSVEVSSLKEAKSAWLEICPSGQPVSASIQKQWDDLLCKNIFNQLLNRSTTITDRARLLAVSERESGYWLHALPSSNLGTLLDHTTLTLLIGLRLGAKIIQPHFCHCGQKVDEYGHHGLSCFKSAGRLSRHHAINDIIRRSLASAKVPATLEPIGLIRKDGKRPDGMTLVAWRLGKSLVWDATCVDTLAASHIQSAASMAGAAAASAEHSKRRKYESLDEAFIFAPFGVETLGPWGPDARSLFKDLSKRLWESTGDPRAGSYLGQRISLAIQRGNAASILGTLPRCSGLDEVYNVL

SEQ ID NO: 9888 - protein, 678 aa, Junonia evarete
MLSGRVPPEIAEVLYGANLCALKKKDGGIRPIAVGSTIRRVVSKICCKKMLPFFSSYFQPTQLGFGTKGGCEAAVHAARTFLDKSNTDVLLKIDVKNAFNCVDRGFLLSEIKDKIPNFFPYLWQCYGQPSKLMYKSNILNSAVGCQQGDPLGPAIFSLAIHPFISGLNSKFNVWYLDDGTLGGEVSTVLDDLISLKNNFQNIGLVLNYSKCEIFIPNHINSEEKNDIISKFNNLTPGIKIVSDASLHLLGAPIFDASITPLIQDKISKFKENSHRLYEINSHMALSIVRFCLFTPKFLYILRCSPVWKFNSLLSTLDDLIRNTLTKILNCSLDETSWTQASLPIRLGGLGVRKMSNISLPAFLSSVYSTHTLYGKIISPSLGSVEVSSLAEAKNAWSMICPSGLLPESASSQRQWDDIICKNIYQQLLNQSPSPADRARLLAVSEPESGYWLHALPSANLGTLLDHTTLTLIIGLRLGAKINQPHRCHCSQEVDEFGHHGLSCIKSAGRLSRHNSLNDVIRRSLVSANIPATLEPIGLIRKDGKRPDGMTLVPWKFGRSLVWDATCVDTLAASHIQSTASMAGAAANSAEHSKRRKYEDIGDGYIFAPFGVETLGPWGPEAWKLVKELSRKLVEATGDPKAGSYLGQRISLAIQRGNAASILGSLPRCSGLEEAFDLL

SEQ ID NO: 9889 - protein, 643 aa, Junonia pacoma
MLSGRVPPEIAEVLYGANLCALKKKDGGIRPIAVGSTIRRVVSKICCKKMLPFFSSYFQPTQLGFGTKGGCEAAVHAARTFLDKSNTDVLLKIDVKNAFNCVDRGFLLSEIKDKIPNFFPYLWQCYGQPSKLMYKSNILNSAVGCQQGDPLGPAIFSLAIHPFISGLNSKFNVWYLDDGTLGGEVSTVLDDLISLKNNFQNIGLVLNYSKCEIFIPNHINSEEKNDIISKFNNLTPGIKIVSDASLHLLGAPIFDASITPLIQDKISKFKENSHRLYEINSHMALSIVRFCLFTPKFLYILRCSPVWKFNSLLSTLDDLIRNTLTKILNCSLDETSWTQASLPIRLGGLGVRKMSNISLPAFLSSVYSTHTLYGKIISPSLGSVEVSSLAEAKNAWSMICPSGHLPESASSQRQWDDIICKNIYQQLLNQSPSPADRARLLAVSEPESGYWLHALPSANLGTLLDHTTLTLIIGLRLGAKINQPHRCHCSQEVDEFGHHGLSCIKSAGRLSRHNSLNDVIRRSLVSANIPATLEPIGLIRKDGKRPDGMTLVPWKFGRSLVWDATCVDTLAPSHIQSTASMAGAAANSAEHSKRRKYEDIGDGFIFAPFGVETLGPWGPEAWKLVKELSRKLVEATGDPKAGS

SEQ ID NO: 9890 - protein, 963 aa, Junonia evarete
MLRSVGSQVDDSLENVRCDQCSQPRFFKNVKGLNIHKGKFHKNVTIQPIFHDSKIITNSQNNPSDPIIPLYESLSHFKTKIPVIRRIPRGCRNSVANSLKNVIDSIIKHNSIKNWELFFTFAYRILHVNKNNKESLSLTQIIKDNCVNSLNVLNVTNNNAANNRKPFNYCKYIESKISDGDLKGAARLLFSNDSIAPDTAETLDSLKTKHPSPINSNSFPDPSQVSVSPFQATVDDVLDAVLAFKNGSAGGLDGLSPQHFKDLLGKVNGEAGRALLKSITDLVNLMLSGRVPPEIAEVLYGANLCALKKKDGGIRPIAVGSTIRRVVSKICCKKMLPFFSSYFQPTQLGFGTKGGCEAAVHAARTFLDKSNTDVLLKIDVKNAFNCVDRGFLLSEIKDKIPNFFPYLWQCYGQPSKLMYKSNILNSAVGCQQGDPLGPAIFSLAIHPFISGLNSKFNVWYLDDGTLGGEVSTVLDDLISLKNNFQNIGLVLNYSKCEIFIPNHINSEEKNDIISKFNNLTPGIKIVSDASLHLLGAPIFDASITPLIQDKISKFKENSHRLYEINSHMALSIVRFCLFTPKFLYILRCSPVWKFNSLLSTLDDLIRNTLTKILNCSLDETSWTQASLPIRLGGLGVRKMSNISLPAFLSSVYSTHTLYGKIISPSLGSVEVSSLAEAKNAWSMICPSGHLPESASSQRQWDDIICKNIYQQLLNQSPSPADRARLLAVSEPESGYWLHALPSANLGTLLDHTTLTLIIGLRLGAKINQPHRCHCSQEVDEFGHHGLSCIKSAGRLSRHNSLNDVIRRSLVSANIPATLEPIGLIRKDGKRPDGMTLVPWKFGRSLVWDATCVDTLAPSHIQSTASMAGAAANSAEHSKRRKYEDIGDGFIFAPFGVETLGPWGPEAWKLVKELSRKLVEATGDPKAGSYLGQRISLAIQRGNAASILGSLPRCSGLEEAFDLL

SEQ ID NO: 9891 - protein, 889 aa, Junonia grisea
MLRSVGSQVDDSLENVRCDQCSQPRFFKNVKGLNIHKGKFHKNVTIQPIFHDSKIITNSQNNSSDPIIPLYESLSHFKTKIPVIRRIPRGCRNSVANSLKNVIDSIIKHNSIKNWELFFTFAYRILHVNKNNKESLSLTQIIKDNCVNSLNVLNVTNNNAANNRKPFNYCKYIESKISDGDLKGAARLLFSNDSIAPDTAETLDSLKTKHPSPINSNSFPDPSQVSVSPFQATVDDVLDAVLAFKNGSAGGLDGLSPQHFKDLLGKVNGEAGRALLKSITDLVNLMLSGRVPPEIAEVLYGANLCALKKKDGGIRPIAVGSTIRRVVSKICCKKMLPFFSSYFQPTQLGFGTKGGCEAAVHAARTFLDKSNTDVLLKIDVKNAFNCVDRGFLLSEIKDKIPNFFPYLWQCYGQPSKLMYKSNILNSAVGCQQGDPLGPAIFSLAIHPFISGLNSKFNVWYLDDGTLGGEVSTVLDDLISLKNNFQNIGLVLNYSKCEFFIPNHINSEEKNDIISKFNNLTPGIKIVSDASLHLLGAPIFDASITPLIQDKISKFKENSHRLYEINSHMALSIVRFCLFTPKFLYILRCSPVWKFNSLLSTLDDLIRNTLTKILNCSLDETSWTQASLPIRLGGLGVRKMSNISLPAFLSSVYSTHTLYGKIISPSLGSVEVSSLAEAKNAWSMICPSGHLPESASSQRQWDDIICKNIYQQLLNQSPSPADRARLLAVSEPESGYWLHALPSANLGTLLDHTTLTLIIGLRLGAKINQPHRCHCSQEVDEFGHHGLSCIKSAGRLSRHNSLNDVIRRSLVSANIPATLEPIGLIRKDGKRPDGMTLVPWKFGRSLVWDATCVDTLAPSHIQSTASMAGAATNSAEHSKRRKYEDIGDEL

SEQ ID NO: 9892 - protein, 963 aa, Junonia stemosa
MLRSVGSQVDDSLENVRCDQCSQPRFFKNVKGLNIHKGKFHKNVTIQPIFHDSKIITNSQNNSSDPIIPLYESLSHFKTKIPVIRRIPRGCRNSVANSLKNVIDSIIKHNSIKNWELFFTFAYRILHVNKNNKESLSLTQIIKDNCVNSLNVLNVTNNNAANNRKPFNYCKYIESKISDGDLKGAARLLFSNDSIAPDTAETLDSLKTKHPSPINSNSFPDPSQVSVSPFQATVDDVLDAVLAFKNGSAGGLDGLSPQHFKDLLGKVNGEAGRALLKSITDLVNLMLSGRVPPEIAEVLYGANLCALKKKDGGIRPIAVGSTIRRVVSKICCKKMLPFFSSYFQPTQLGFGTKGGCEAAVHAARTFLDKSNTDVLLKIDVKNAFNCVDRGFLLSEIKDKIPNFFPYLWQCYGQPSKLMYKSNILNSAVGCQQGDPLGPAIFSLAIHPFISGLNSKFNVWYLDDGTLGGEVSTVLDDLISLKNNFQNIGLVLNYSKCEIFIPNHINSEEKNYIISKFNNLTPGIKIVSDASLHLLGAPIFDASITPLIQDKISKFKENSHRLYEINSHMALSIVRFCLFTPKFLYILRCSPVWKFNSLLSTLDDLIRNTLTKILNCSLDETSWTQASLPIRLGGLGVRKMSNISLPAFLSSVYSTHTLYGKIISPSLGSVEVSSLAEAKNAWSMICPSGLLPESASSQRQWDDIICKNIYQQLLNQSPSPADRARLLAVSEPESGYWLHALPSANLGTLLDHTTLTLIIGLRLGAKINQPHRCHCSQEVDEFGHHGLSCIKSAGRLSRHNSLNDVIRRSLVSANIPATLEPIGLIRKDGKRPDGMTLVPWKFGRSLVWDATCVDTLAASHIQSTASMAGAAANSAEHSKRRKYEDIGDGFIFAPFGVETLGPWGPEAWKLVKELSRKLVEATGDPKAGSYLGQRISLAIQRGNAASILGSLPRCSGLEEAFDLL

SEQ ID NO: 9893 - protein, 963 aa, Junonia evarete
MLRSVGSQVDDSLENVRCDQCSQPRFFKNVKGLNIHKGKFHKNVTIQPIFHDSKIITNSQNNSSDPIIPLYESLSNFKNKIPVIRRIPRGCRNSVANSLKNVIDSIIKHNSIKNWELFFTFAYRILHVNKNNKGSLSLTQIIKDNCVNSLNVLNVTNNNAANNRKPFNYCKYIESKISDGDLKGAARLLFSNDSIAPDTAETLDSLKTKHSSPINSNSFPDPSQVSVSPFQATVDDVLDAVLAFKNGSAGGLDGLSPQHFKDLLGKVNGEAGRALLKSITDLVNLMLSGRVPPEIAEVLYGANLCALKKKDGGIRPIAVGSTIRRVVSKICCKKMLPFFSSYFQPTQLGFGTKGGCEAAVHAARTFLDKSNTDVLLKIDVKNAFNCVDRGFLLSEIKDKIPNFFPYLWQCYGQPSKLMYKSNILNSAVGCQQGDPLGPAIFSLAIHPFISGLNSKFNVWYLDDGTLEGEVSTVLDDLISLKNNFQNIGLVLNYSKYEIFIPNHINSEEKNDIISKFNNLTPGIKIVSDASLHLLGAPIFDASITPLIQDKISKFKENSHRLYEINSHMALSIVRFCLFTPKFLYILRCSPVWKFNSLLSTLDDLIRNTLTKILNCSLDETSWTQASLPIRLGGLGVRKMSNISLPAFLSSVYSTHTLYGKIISPSLGSVEVSSLAEAKNAWSMICPSGLLPESASSQRQWDDIICKNIYQQLLNQSPSPADRARLLDVSEPESGYWLHALPSANLGTLLDHTTLTLIIGLRLGAKINQPHRCHCSQEVDEFGHHGLSCIKSAGRLSRHNSLNDVIRRSLVSANIPATLEPIGLIRKDGKRPDGMTLVPWKFGRSLVWDATCVDTLAPSHIQSTASMAGAAANSAEHSKRRKYEDIGDGYIFAPFGVETLGPWGPEAWKLVKELSRKLVEATGDPKAGSYLGQRISLAIQRGNAASILGSLPRCSGLEEAFDLL

SEQ ID NO: 9894 - protein, 946 aa, Maniola hyperantus
MSQDSVRCEQCSNPRFFKNHKGLKIHVGKVHKTLDPSSVPPISFSSIPINSPAAPLWESLSTFKNSVPIIRRIPRGSRHSVCSSLKKTIQHVLCHNTCHSWELLLTFAYRTLHVDKVQSLSLTQKIKNNCTNDNNYSNFPPPSHPPLKHSVTLNKLIENKIDDGDLKGAARILFSSDTVAPDTAETLEALRSKHPSPSHNSSFPDVPSSDDLVFQATTNDMLGALLAFRSGSAAGLDGLSPQHFKDLVCGPNIDADGTLLKAITDLVNLMLSGRVPQEIVETLYGANLCALKKKDGGIRPIAVGSTIRRVVSKICCKKILPLISSTFVPVQLGFGVKGGCEAAVHAARTFLLGSREEVLLKIDVKNAFNSIDRGVLLSEVKNKFPQLFPYLAQCYRNPSKLVYKKNLLISAVGCQQGDPLGPPVFSLAIHPIISTLNSKFNVWYLDDGTLGGEVNTVLDDLSSVISKFESIGLELNFDKCEIYVPNSFSADSKLDILEKFNMLAPGIKILNDESLRLLGAPVLDASVPQFVENTISKFSSNSHRLFEINPHMALTILRFCLFVPKFTYYLRCSPLWKFNTLLDNLDAFVKNILTSILNCPISNQAWSQASLSIRYGGLGIRKISSVSLPAFLSSVYSTHTLYGKIISNSLGSIEVSGLTEARNEWSMHSPSQVPVSLSSQRQWDDIICKTTFDTLLANANSKKDRARLLAVSAKESGYWLHALPSANLGTLLDHTTLSVLIGLRLGATINQPHRCHCGDCVDAFGHHGLSCSRSAGRFSRHSTLNDIIRRSLATAHVPAVLEPIGLARGDGKRPDGMTLVPWKMGRSLVWDATCVDTLAASHIQATSSMAGAAAISAEQAKRRKYENLDGSFVFVPFGVETLGPWGPGARALFEEIAKRVIESTGDPRAGSYLGQRISLAIQRGNAASILGTMPRCGGLDEVLDLI

SEQ ID NO: 9895 - protein, 677 aa, Maniola hyperantus
MLSGRVPQEIVETLYGANLCALKKKDGGIRPIAVGSTIRRVVSKICCKNILPLISSTFVPVQLGFGVKGGCEAAVHAARTFLLGSREEVLLKIDVKNAFNSIDRGVLLSEVKNKFPQLFPYLAQCYRNPSKLVYKKNLLISAVGCQQGDPLGPAVFSLAIHPIISTLNSKFNVWYLDDGTLGGEVNTVLDDLSSVISKFESIGLELNFDKCEIYVPNSFSADSKLDILEKFNMLAPGIKILNDESLRLLGAPVLDASVPQFVENTISKFSSNSHRLFEINPHMALTILRFCLFVPKFTYYLRCSPLWKFNTLLDNLDAFVKNILTSILNCPISNQAWSQASLPIRYGGLGIRKISSVSLPAFLSSVYSTHTLYGKIISNSLGSIEVSGLTEARNEWSMHSPSQVPVSLSSQRQWDDIICKTTFDTLLANANSKKDRARLLAVSAKESGYWLHALPSANLGTLLDHTTLSVLIGLRLGATINQPHRCHCGDCVDAFGHHGLSCSRSAGRFSRHSTLNDIIRRSLATAHVPAVLEPIGLARGDGKRPDGMTLVPWKMGRSLVWDATCVDTLAASHIQATSSMAGAAAISAEQAKRRKYENLDGSFVFVPFGVETLGPWGPGARALFEEIAKRVIESTGDPRAGSYLGQRISLAIQRGNAASILGTMPRCGGLDEVLDLI

SEQ ID NO: 9896 - protein, 946 aa, Maniola hyperantus
MSQDSVRCEQCSNPRFFKNHKGLKIHVGKVHKTLDPSSVPPISFSSIPINSPAAPLWESLSTFKNSVPIIRRIPRGSRHSVCSSLKKTIQHVLCHNTCHSWELLLTFAYRTLHVDKGQSLSLTQKIKNNCTNDNNYSNFPPPSHPPLKHSVTLNKLIENKIDDGDLKGAARILFSSDTVAPDTAETLEALRSKHPSPSHNSSFPDVPSSDDLVFQATTNDVLGALLAFRSGSAAGLDGLSPQHFKDLVCGPNIDADGTLLKAITDLVNLMLSGRVPQEIVETLYGANLCALKKKDGGIRPIAVGSTIRRVVSKICCKKNLPLISSTFVPVQLGFGVKGGCEAAVHAARTFLLGSREEVLLKIDVKNAFNSIDRGVLLSEVKNKFPQLFPYLAQCYRNPSKLVYKKKLLISAVGCQQGDPLGPAVFSLAIHPIISTLNSKFNVWYLDDGTLGGEVNTVLDDLSSVISKFESIGLELNFDKCEIYVPNSFSADSKLDILEKFNMLAPGIKILNDESLRLLGAPVLDASVPQFVENTISKFSSNSHRLFEINPHMALTILRFCLFVPKLYLYLRCSPIWKFNTLLDNLDAFVKNILTSILNCPISNQAWSQASLPIRYGGLGIRKISSVSLPAFLSSVYSTHTLYGKIISNSLGSIEVSGLTEARNEWSTHSPSQVPVSLSSQRQWDDIICKTTFDTLLANANSKKDRARLLAVSAKESGYWLHALPSANLGTLLDHTTLSVLIGLRLGATINQPHRCHCGDCVDAFGHHGLSCSRSAGRFSRHSTLNDIIRRSLATAHVPAVLEPIGLARGDGKRPDGMTLVPWKMGRSLVWDATCVDTLAASHIQATSSMAGAAAISAEQAKRRKYENLDGSFVFVPFGVETLGPWGPGARALFEEIAKRVIESTGDPRAGSYLGQRISLAIQRGNAASILGTMPRCGGLDEVLDLI

SEQ ID NO: 9897 - protein, 951 aa, Pararge aegeria
MPLENVRCDRCSESRYFKNRKGLNIHIGRVHRSSDSSAIPVLSSNSQSLNIPVCPLWESLSNFKNSIPLIRRIPRGSRHSVLLSLKKTIDNVITHNTIRSWELLLTFAYRNLHADKDKNLSLTQKIKNSCLKNDSTVTSSSFELFSIPSHSTLNHNFNLNKLIENKIGDGDLKGAARLLFSSDTIAPDTPETLEALRSKHSSPSPNLSFPDAPLSTSFFQATTNDVLGALAAFRSGSAAGLDGLSPQHFKDLVCGTNVDTDGALLKSITNLVNLMLSGRVPEEITSTLYGANLCALRKKDGGIRPIAVGSTIRRIVSKICCKKILPSISSTFDPIQLGFGVKGGCEAAVHATRTFLLNSQEEVLLKIDVKNAFNSVDRGVLLSEVVNKLPQLFPYLAQCYQNPSRLVYKNNVLSSAVGCQQGDPLGPAIFSLAIHPIISTINSKFNIWYLDDGTLGGKVNTVLDDLKSIISKFELIGLQLNFDKCKIFIPNSFSDESKQHILEQFNNLAPGIKVLNDKSLRLLGAPILETSVPQFIDDLISQFSNNSDRLFEINPHMALTIIRFCLFVPKFTYFLRCSPLWKFNFLMEKLDTFIKDILVNILNCPISNQAWTQASLPIGYGGLGIRKISSVSLPAFLSSVYSTHTLFQKIISNSLGSIEVSYLAEARNSWSALSPSILPVSFSSQRQWDDIICKKTFDTLLDQMPSKRDGARLLALSAKESGYWLHALPSANLGTMLDHTTLSVVIGLRLGASIIQPHRCHCGDSVDTYGHHGLSCSRSAGRFSRHSTINDIIRRSLATAHVPAVLEPIGLARSDGKRPDGMTLIPWRLGRSLLWDATCVDTLAASHIQATSSVVGAAASSAEQAKRRKYENLDSSFIFVPFGVETLGPWGPEARALFKELSKRVIESTGDPRAGSYLGQRISLAIQRGNAASILGTVPRCGGFEDVLDFI

SEQ ID NO: 9898 - protein, 951 aa, Pararge aegeria
MPLENVRCDRCSESRYFKNRKGLNIHIGRVHRSSDSSAIPVLSSNSQSLNIPVCPLWESLSNFKNSIPLIRRIPRGSRHSVLSSLKKTIDNVITHNTIRSWELLLTFAYRTLHADKDKNLSLTQKIKNNCLKNDSTVTSSSFELFSIPSHSTLNHNFNLNKLIENKIGDGDLKGAARLLFSSDTIAPDTPETLEALRSKHSSPSPNLSFPDAPLSTSFFQATTNDVLGALAAFRSGSAAGLDGLSPQHFKDLVCVTNVDTDGALLKSITNLVNLMLSGRVPEEITSTLYGANLCALRKKDGGIRPIAVGSTIRRIVSKICCKKILPSISSTFDPIQLGFGVKGGCEAAVHATRTFLLNSQEEVLLKIDVKNAFNSVDRGVLLSEVVNKLPQLFPYLAQCYQNPSRLVYKDNVLSSAVGCQQGDPLGPAIFSLAIHPIISTINSKFNIWYLDDGTLGGKVNTVLDDLKSIISKFELIGLQLNFDKCEIFIPNSFSDESKQHILEQFNNLAPGIKVLNDKTLRLLGAPILETSVPQFIDDLISQFSNTSDRLFEINPHMALTIIRFCLFVPKFTYFFRYSPLWKFNFLMEKLDTFIKDILVNILNCPISNQAWTQASLPIGYGGLGIRKISSVSLPAFLSSVYSTHTLFQKIISNSLGSIEVSYLAEARNSWSALSPSILPVSFSSQRQWDDIICKKTFDTLLDQMPSKRDRARLLALSAKESGYWLHALPSANLGTMLDHTTLSVVIGLRLGASIIQPHRCHCGDSVDTYGHHGLSCSRSAGRFSRHSTINDIIRRSLATAHVPAVLEPIGLARSDGKRPDGMTLIPWRLGRSLLWDATCVDTLAASHIQATSSMVGAAASSAEQAKRRKYENLDSSFIFVPFGVETLGPWGPEARALFKELSKRVIESTGDPRAGSYLGQRISLAIQRGNAASILGTVPRCGGFEDVLDFI

SEQ ID NO: 9899 - protein, 955 aa, Apodemia duryi
MSQDSVRCDQCSQPRYFKNSKGLKIHVGRVHKSSFAPSIPPISFSSLPINGCVDNLCESLTFKNSIPLIRRIPRGSRHSVSCSLKKTIDNVISHNTCRSWELLLTFAYRTLHADKSQNLSLTQKIKNNCTINDSNIYNTTIQLNPLHVTHTQSHPYLKHNYDKKKIIENKISDGDLKGAARLLFSSDTIAPDTAETLEALRSKHPSPSPDSSFPDPPTNNDFLFQATTNDVLGALMSFRSGSAAGLDGLSPQHFKDLVCGANVDVGGTLLKSITDLVNLMLSGRVPHEITKTLYGANLCALKKKDGGIRPIAVGSTIRRVVSKICCKKILPLISSNFVPIQLGFGVKGGCEAAVHAARTFLLNSREEVLLKIDVKNAFNSVDRGVLLSEVKNKFPQFFPYLAQCYREPSKLVHKKNVLSSAVGCQQGDPLGPVIFSLAIHPIISVLNSKFNVWYLDDGTLGGEVNSVLEDLEIIISKFKSIGLELNFDKCEIYIPNSFSAESKLHTLNKFNSLAPGIKILNDESLRLLGAPVLEASVPKFFTDLISKFKNTSHHLFDINPHMAMTIIRFCLFVPKFTYFVRCSLLWKFNNLLENLDNFIQNILSEILNCPIDDQVWAQASLPIRYGGLGIRKISSVSLPAFLSSAYSTHTLFEKIISQSLGSIEVSYLAEARNGWSAISPNQLPVSLPSQRQWDDIICKKTFDAMLMQANSKDRARLLAVSAKESGHWLHAIPSANLGTLLNHATLAVVVGLRLGAKITQPHRCHCGDHVDAYGHHGLSCSKSAGRFSRHNALNDIIRRSLATAHVPAVLEPIGLARSDGKRPDGMTLVPWRTGRSLVWDATCVDTLAASHIHATSSVAGAAATSAEQAKRRKYEKLDSGFIFAPFGVETLGPWGPEARALFLEISKRVIESTGDPRAGSYLGQRISLAIQRGNAASILGTMPHCGGLDGVLDFN

SEQ ID NO: 9900 - protein, 1096 aa, Yoshiicerus persimilis
MSGWVVPNLTQAVVCITRINYLYVFMKQTICEEFRPVDLYTGVGSEKNNEYRCRIGGCNRSFSSKIGLGVHKARSHRDVPDVNGTSNGEEVIRDNDVHMTHTPSKQNNKVPRTRWSQEELRMVCKIEYEAKSAEKGLVTLIFNQLKSWGSTRSFSAVEKVRKTEQYWTLRKQLFALWDNVPNPNVQESSDGAQSESTPQESDDCMAPEEEVNGEPLNGDIRCMLEYLLGEEWMECDEVYASSKVDQMLKEAIEGKSIDTALCEYLDEWAARYEGSLLLPKVKPPFKGKPLTRKQLKRLKYKRLRTAWRKNRAKVARDILSGKIYSTGKPKEIEGFLEHWSETFKNESASSADITNMQHSGNSYEVWKSVGTLELEKALRDMAKDTASGPDGVPVKELKLMPIQILVKLFNLIIYSGKMPACLKKSNTIFIPKKDECKEPSDFRPISITSTILRLFNKIMARRIVANANFDYRQKAFLPIDGCRDNIVLLEALITKARKECKTLFLANLDMRNAYGSVYHTAVFEALKCNGASNGLIEYVQDLYADFHTTIVHNGEAVPITVEKGVLQGDPLSPVLFNMVIDQLLKKIPEEVGFSLTETVKVNGMAFADDTNLVSSSAIGLRVSLGLVESNGAQWGLEFNSKKCSYLAMVAKRGRKVVVERGHTFLINGSPMRGMREDEPMRYLGAHFTSRGIQSAPELVSVLLARLAKAPLKPQEKLYVLRVHLIPKLIHIFSMSKLSSVKLDKCDRMIRNSLRGKKGMLHIPGRNVPNDFFYTSVKDGGLGLMRLRHSIPSMVLARFTKFDNSEETIRVAASLAANSKRVKNAKARIVNFNGVSGTNPTNIAKINRERLLRFNDAKGLRYANEVTYVHDWVSNGSTAYLSGNQFVEALRIRINALPTRSKTAYGSKVIVRNCRAGCKVPESNTHAIQACHRSHGARVERHDAVVKILAKELQRQKYDVQVEYRAKTGVGLRKPDIVAVSDEKVFVIDPTIVGVYEHPDVFHDAKVAKYGNNPELREQLEKENPNKEILFGGLAITYQGIMSKKSEKLMRSMGVRKSALKRCVMETLRGSIKCYRTFTNSTMMGNGFAQELPASFI

SEQ ID NO: 9901 - protein, 1368 aa, Amphibalanus amphitrite
MKLMKSDQDSLRCAACRSLSVRKAAIICGGCGARWHTSCARLTVAQARDLSIWHCRVCLKSGSFTSTNDQSEGNIQKDSKETETTDRNQQIGDIPTKLAQLRESTKIVRLIPKAARAVVANSLSDRINAAVSSTSLDTWWRLFSFAFTALRSPDTNKRNCSLTTLIKRQATEEISSTQRVEADHGSTLYHNSNEKTAQTRQAHHAKDEDIARRVYAKCADGDVGAALRTLTSNEPLAEPTDEVISLLRLKHPPAPEDECIPPPPSSTDAPPMTVTESQVRQSVLSMPTGSSAGLDGIRPLHLRQLISAEAGEAGQRMLTSLTALTNLVLAGRLPSCARDALYSASLCAFRKKDGGLRPIAVGSVYRRLPARIAARFAADILGPELRPVQLGVGTPLGCEAAVHAARNFAKRSASQTETTRVLIKVDVKNAFNTVRRDVVLQCLKDNCPEVYAMAYQAYSTPTPLLIAGHTIMSSTGVQQGDPLGPLAFALAVNTCARSLKSPLNIWYLDDATIGGPVADVISDLQTVTKMLPEVGLHLNPAKCEVTILNDMREDQQKTAIYEVKRTLPEISETSVRSIQLLGSPLHEDGLSNAAKNVADMISKLCERTRLLDRHTGLFFLAHHVSAPRVTYLLRSSPLYIESAGLGKIDEIVRSTLADVTNVDISESTWIQASLPLRHGGIGIRSVESLALPCYLASLHAAASLMATISPMDVSIPTLSIVEPAMNEFMKLLSLDDVPEKHEKHLQRVWDDLACKTVRERLIDSANQVDRARLLAACKPHTAAWLQAMPAANLGLHLDAETVRVAVALRLGAPICKPHNCSQCSRPVDSQGHHGLSCKKSAGRLPRHANLNDVVRRALTSAGMPSILEPQGLDRGDGKRPDGVTLFPYRQGKSLVWDATCVDTFADSAVAKAALEPGSPAAAAEARKRTKYADIAERHIFVPVAVETTGVLGPAATALLAELGRRISELTGDRREVAWLRQRVSLAIIRGNAAAILATACSTQEGRVPRKPTKQVTSKTSTESSDARDSSCADSQKTNQPPSHPKFVESSKVQAQQRYDGVARTASREAQSLSATRQQEADWKSGDPLYIGLPNHGNTCYQNAALQSLLGLHPFLSEMMSLISGPCQWESGQCDTTSAVAKLMVLRQKALTESVATHLKQLHEVFADMDPVYGGTEMQDAGEFLLRLLGTMSDEIDACHLTDNPVREHFQHQILESKTCIKCGQTVMKHLNNICWFVNVPRRQNTDIPTLQEALHLSMCPERRTMLCQHCGHDESCVTSKISQLPRTLILQLNRCAFLGDRPKKIRASVGIPKILSLNKYVAGEVTDCPRSGMSFCRFLCPYSTSTRRCGRFGSVTRLPLPSRLLHET

SEQ ID NO: 9902 - protein, 932 aa, Diaphorina citri
MFEEVNKTNIEERTSLPKLFWTVKLAEEITHYDKVLDEIVRENNITDLGHLNNLMYSVAYLITKKFRKVDIKQQRQRNTLQDPPWKTRIRKRIEEKRKEISKINEWKRNNRTQRVQYKIKQIMDKYKPNNIDQIEEASKQRVSAWALRIRRYEKRRKAFTQNRSFENDKKKFYRELYHKNYGIEQPPSKEEFENFWTRIWGIREEVNIEADWITNEFERTKNLNEMNEFRIEESDITNTMKDAHNWKAPGIDKLTNFWLKYLKCMHKHLAASLQNIMEHPTLAPDWLTQGITYLLPKNENTHVTKNYRPITCLPVLYKLLTGIMKSKIHTHLQEKDLLPVEQKGGLTGSMGCKDHLLVNKLITEDSKQNKSLGMSWIDYQKAYDSVPHEWILTSLKIYKINAKTRDLLKSLMESWKTKILVQTNQGRIETEEIYIRKGIFQGDALSPLLFCIALIPLSTMLNNSRIGYKLRNQETKVNHLLYMDDVKLYANNERRLNTLIEIVKTFSDDIGMKFGLDKCAKVIIDKGKVRQRDNILEEESTLSIRELESGESYKYLGVLEDEHIDQKKMKVNIKKEYIRRVRLTLQTELNSKNKIEALNSLAVPVVEYGFGIIDWTKEEIRKFDRKTRKLLTMNKCLHPKSDVDRIYLPRKDGGKGLRSIEQAYEISILGLAEYIKHKENDYLIHLLKESHVNSNKNILRKAENIETQYIISRRVETTDLKKRMKQFKNQVKEQQRAKLLTNWKSKRLYGQFLKVLDNATFDKIKTFDWLRPSKLKGVTEAYIMAAQEQALRTRNYDRHILKLEVDDKCRLCHSQTENITHIISGCSQLAQHEYILRHDKVCKYLHYNICLALGMKPPAQKWYLEEPDPVITQDNVTILYNQPVQTDRTINANKPDIIVRDRKEKMCLIIDVAIPADMNIDRPEIEERRKTG

SEQ ID NO: 9903 - protein, 1176 aa, Astyanax mexicanus
MGWQSMVAATMVNHVCATKQATLKKKSAIPQESARAGLEDDSQADNMVTDSGTDMTTRSGLSIEAGGMVSGKELLTCVCGWSKVTSVRGLRIHQGKMRCLSEGVQGPHIEQYFEQNCLSQSAEVQRQVTCHSPQDINTFDTREANLSTEGVEDEGGVDRSKAKGKQMGREKGIGQRSKVKWPGTGDKMAWRSINDDLKGMLEGLKGTAESKLNRLGKVIYDYGMARFGVVQRNVKCQDVVKSRRQVEIEKLVKESRLLRKKWKKGNEAEREGIELLQEELRSKLVKLRRAEAMRKRRKKKERARIEFFRDPFRFVKSLFSKEKSGNLKVGKRELEEHFKSVYTEKERSSDLDLPADMPPLGDIEWKMDVNPPRWSEVQEVVKAAKAGSAPGPNGVPYRSYKSAPDVLKFLWKLMAIVWKKGIIPKEWHRAGGVLIPKEKDSVAIDQFRPISLLNVEGKIFFSVVARRLATYLKRNNLIDTSVQKAGIAGFSGCIEHNSMIWHQIQTARAEKKDLHVVFLDLANAFGSVPHALLWKAFNFFRVPEEISRLVKAYFEDIQFCFSVGECVTSWQRLEIGIMAGCTISLLAFTMAMEVIIRASKWVVGGERLHDGTRLPPVRAFMDDMTTLTTTVPCTRRLLGKLNDNLRLARMKVKPSKSRSVSIVKGKLIQERFMMEGEVIPSILEKPIKSLGRWYTAALNDKEQVEGLRTEMVEAINRIDKSFLPGKLKLWCLQFGLLPRLRWPLTVYDIPISEVERLERVMSKAIRTWLGVPRCLSSVAWCGRGMLELPLTSLVEEFKCAKVGREMQLLGSKDGLVKATAPVTRSGRKWNAREATQAARRALEHRDVVGQVQNGRAGLGLGDSWKAFGKATSPEKRHMVTGFIREQEEEARRAKAAGQSKQGQWMRWESVEKRRITWRELWGLDTGRIKFLLGATYDVLPTPQNLAQWVGEDPSCKLCAGSGTLKHILSACKVSLSQGHYTWRHNQVLRSLAGALDKKRLEVNNMPVVGCSRVITFVREGQHSGETAQCLKTAGKWANARDWKLLVDVGSKLQIPECILVTTLRPDVVLYSESKRIVYFIELTVPFEDEVDGAYERKRLKYTDLVAEVRERGWQAYIRPVEVGTRGFVAKSATRLLSEFGIRGRVLRTVLKELSDVAERSSQWLWFRRAEAVWGRE

SEQ ID NO: 9904 - protein, 1176 aa, Astyanax mexicanus
MGWQSMVAATMVNHVCATKQATLKKKKAIPQESARAGVEDDSQADNMVTDSGTDMTTRSGLSIEAGGMVSGKELLTCVCGWSKVTSVRGLRIHQGKMRCLSEGVQGPRIEQYFEQNCLSQSAEVQRQVTCHSPQDINTFDTREANLSTEGVEDEGGVDRSKAKGKQMGREKGIGQRSKVKWPGTGDKMAWRSINDDLKGMLEGLKGTAESKLNRLGKVIYDYGMARFGVVQRNVKCQDVVKSRRQVEIEKLVKESRLLRKKWKKGNEAEREGIELLQEELRSKLVKLRRAEAMRKRRKKKERARIEFFRDPFRFVKSLFSKEKSGNLKVGKRELEEHFKSVYTEKERSSDLDLPADMPPLGDIEWKMDVNPPRWSEVQEVVKAAKAGSAPGPNGVPYRLYKSAPDVLKFLWKLMAIVWKKGIIPKEWRRAGGVLIPKEKDSVAIDQFRPISLLNVEGKIFFSVVARRLATYLKRNNLIDTSVQKAGIAGFSGCIEHNSMIWHQIQTARAEKKDLHVVFLDLANAFGSVPHALLWKAFNFFRVPEEISRLVKAYFEDIQFCFSVGECVTSWQRLEIGIMAGCTISPLAFTMAMEVIIRASKWVVGGERLHDGTRLPPVRAFMDDMTTLTTTVPCTRRLLGKLNDNLRLARMKVKPSKSRSVSIVKGKLIQERFMMEGEVIPSILEKPVKSLGRWYTAALNDKEQVEGLRTEMVEAINRIDKSFLPGKLKLWCLQFGLLPRLRWPLTVYDIPISEVERLERVMSKAIRTWLGVPRCLSSVAWCGRGMLELPLTSLVEEFKCAKVGREMQLLGSKDGLVKATAPVTRSGRKWNAREATQAARRALEHRDVVGQVQNGRAGLGLGDSWKAFGKATSPEKRRMVTGFIREQEEEARRAKAAGQSKQGQWMRWESVEKRRITWRELWGLDTGRIKFLLGATYDVLPTPQNLAQWVGEDPSCKLCAGSGTLKHILSACKVSLSQGRYTWRHNQVLRSLAGALDKKRLEVNNMPVVGCSRVITFVREGQHSGETAQCLKTAGKWANARDWKLLVDVGSKLQIPECILVTTLRPDVVLYSESKRIVYFIELTVPFEDEVDGAYERKRLKYTDLVAEVRERGWQAYIRPVEVGTRGFVAKSATRLLSEFGIRGRVLRTVVKELSDVAERSSQWLWFRRAEAVWGRE

SEQ ID NO: 9905 - protein, 2148 aa, Caenorhabditis japonica
MTCRINYCCVTRESSEFGDFCVSCGVKRDPDVCTRYGQFSRQEVLPNAAEIVRFVIFEQTKTRSRMNIRLQSGDFWLKMPIIDFSFQKSDVHERRSDCDFCAAKHINHTVRCLRRRRDRFIRIFAENPRFSNDVLSEPKRPTFNVFWTETVGFYPILERSRPITVQFFGVCMENRSTVMSVRTSGSCEITLENFCFSVFLTVSQDEIQNDVLSEPKRPIFEVFWAENFGFHPILERPRPTSVQFFGILIENRSTTFSVRKSGYCEIFLENFSFSTILQVSQDQIQKYNPPGLVMTIFRQILIIFRRKPGNFDIFMLKNNDNWVSVYLTQNPEKKPVFFDEKGWCDWYFTRNYFSGKISFPRLQMIFDAHWAENFGFHPLMERSRSNFVQLFGNCGEIRSTISPVWTSEYCDICLIFFRFSDILQISDAQTQGEGHFGRTTTVFGRTTKIFARKSAKSDISELKTHDYWFFAFLTRNPLRNPVLRNVGDRCCWNSEHFFGNLPKFHSAIIETSRKRDHSCYLCLCMCCEKDNLLLAAELPGRKRFSGWEKNNSVMILKRISRKSVEKIDKEHFPIRGGGDNNKKKVGVVSLAVEKYIDSKSVILRLDYPTDDLYGCFVGDCPTKVRAGLGADHFRYLSKHMKDKHQMKVNLTYKCTLCKIDAPGTSTKATVWMKSHLLKVHGMTAETRTRKNDCIGTKFSGKPETVKEKTPEKIADLEGKIQTRSVSKRLSALKESAKKTAVEEGVAPAKAPKLVAILEEADERKKSSARRSLAPLINFDDKSKATPMLPKRSELPDSISTLQGVERLKASRKFFQEKDRRASNVRRESLVPPASKSSIPKKRFNTWCLDSESTADAWLTDEVIVWYIDKLITDVTTIKRKYKVLDPIWWPKYKIYGFEHIREELKGPETYFFPVCENNHWILLIMSPDKIWYSNSIPVEPEGDVEKFMRLTNKTRSYFDSPVPTQKDNVNCGVHVCLVAQSIIVNRFWYEELDVKLFRKIVKFTLLQAGYELYSEPYATLTSAEPDQNDASEANENDKDWADTTQTLDESTLNQRDDEVFLLRPTIVAENEQKVFEEAKIEADELLALDEQRVSELLTELTDDDEVFSERDQPEVVDRAAIPSLMALELMPPPKADPADGNPQRNIRKVGKQMGKKPKVPTGKPDELVIKVRDWFSREYESYLRDGRSFQRLQWITDVLTAAILKASVGDEQTVEKIRKRCPPMEMEEGEMATQTEVKKAPQNDKRHADSDNRMASGSLRELYSKNRPKAFNVIVGKDSKQCEIPIDKIEKFFLGTTSETNVPSEVLQKMGSKIPKLDIGDWIEQEFSEKEISEALKKTKDTAPGVDGLRYHHLSWFDPTSKLLAQLYNECRKHRKIPEHWKEAETVLLYKGGDESKPDNWRPISLMPTIYKLYSSLWNRRIRSVEGVMSKCQRGFQEREGCAESIGILRTAIEIAKGRRKNLSVAWLDLTNAFGSVPHELIESTLKAYGFPPMVIDIVMDMYKGASIRVKTRSEKSNQILIKSGVKQGDPISPTLFNMCLENVIRRHLETACGHKCLNTTIKVLAFADDMAVLSESKDQLQRELKKLDDDCTPLNLIFKPAKCASLIIDRGQVDGYAEIFLKGLQIRNLKETDTYKYLGVQTGIQTRTSALSLMTSVAKELDMVVNSDLLPHQKLDCTKSFVLPKMTYMYMNSVPKLTELREFTKVTMKAVKAMHNIPLRGSPLEYIQLPIGKGGLGVPSPKNVALIAYLASTMKRLWSDDAYIQRIYSDYLEEVAREETYSIFVTTNDLAKYLSGELETDKKAFGFNSFTRIQEVCKSLTKIQDSPLHKLKFIVKDEKLAILVQAVEHGPEKIFTEKHVKKLQQLLKAEVNDALLHRFMNEKRVKSEVIRVVQQYPQCNSFVRTGGKVSLSAHKFVHKARLNLLNCNYNNYGENRGKVCRRCGHANETQWHILNECRFNLSRLITMRHDAVLYKVKQLIKDGEKKNWDLEIDQEVSVSSRLRPDIYMTSPDRNAIIIADVTCPYEHGTEAMERAWENKVEKYEQGFNYLRKMGKKLTILPIVIGSLGTWWAKTSESLTELGIDRNVVHRTIPELCSIVLEYSKNCYWHHIFGDTYVNAPFKFGGEKPSGNDWKGKAPKRTLPPDKA

SEQ ID NO: 9906 - protein, 1221 aa, Dicrocoelium dendriticum
MGERLGLERDVDLDIETVMEDRESGGHSTSDDAVGVQDGYVCFCGLAFGSKRGLGQHKRHRHPVELNEERLRLVPRRREWSEREASRLLALANQFLPKCANKVEVYRRLSAQFPGRSVEGIKKQLMKMRWPMRRPSSEFLLWDSPRVVRVPPIDLPEVGAELAGNVLVSDDGTTTNRDPDQNEAAFEPNLMQFSYEEHYRSFLEGLWRESDPDGVFGELVDLIPPDGEEGASPEVAQFEAIQPQMGEEGASPRVARIKSPVGEEGASPEVPQLEAIQPHMGEEGASPRVARIKSPTGEEGASPEVAQLEAIQPHMGEEGASPRVAMIKSLMGEEGASPKALPDGIHLPTGEEGASPMAGQKVANWSVDILAHIITALKRSQHGDDLAGQLLQLAEQLQNGTLHKRAGVVRLCEVTEQFFPLKWHPPRQRRACTAGGRRAIRKANYAAIQKLWITKRKDAAQAILDGSWLSAYKSQRVGLDQTMVEYWRSVFGAKSVVDERPVPTEENHDYGLIEPISAADIGEALRTAGDTAPGPDKVSVADCKSLDLTVIAQLFNLMMVLECPPASLATARLTLVPKGSDPSAPSDYRPIAVSSILLRVFHKVLAKRWRSRLTLSSLQVAFQKRDGCLEASYVLQCVLRRIQSDCLNAAVAFLDVAKAFDTVSCDTIIRAAAAHGAPPELQRYLRVLYTSSRLLLGNEVLECHRGVRQGDPLSPLFFIMVMDEVVAATLPNRGVRLCGEEIGALAYADDLVLFASSQEALSAKLVALQQSLSAAGMSLNASKCRAITVQKLGKQKCVVLVPQTYPLQEGEVSSVAVTDEIRYLGLRFNWKGRCQVRSTAVLAEWLNEISRAPLKPQQRLDMVRDFVFPKMLHELVLGNAHRNTMRQMDKMVRSKVREWMRYPKDVSLPFFYTSRGLGGLGLLSWSILVPFAQRAKFGRLCSSPSSLVRGLLESEACKVDIRSANVPVRLMGTVVEDRKAVQGIWREKLESSCDCKDLQLDKQDAASSQWMSSGRRVFPRLFIRATKLRGGLLPTKVRSSRGISRKVDDVKCRGGCGEPESIGHILQRCCLTHDARCMRHNRVVRKIAQLVKRKHATVYVEPIIPLPVSYCKPDLIVCSKGSIIVADVAITSAQRQELAYREKVTKYTGACNSIRAYLGGKGVQTTNVVHWPIIISDRGYIWKGSGGALRRLGLSARDISELALLVIAGSLKCYDVYMRGT

SEQ ID NO: 9907 - protein, 1125 aa, Panagrolaimus sp.
MNQIPITNFLNNTHPEGTQGDGMGSTQGTSQNRRSGTRGTSRGAGMRSNTQIPASTRSKKYEGDELDYAMELARSRNTPRECWRHWIARFPDTIRSARGIEDKIRKLRQEGITQEENAPVHNEQDAEVLEGNAVNDDVQPEQVLVEPPLVDPPVEAIGDNPETTVERDEEFLALRKLIIANYNKIREKKVVRKGLKRHHYTKDQLAVLNEVVNEVMSDHNIIRAIDVNAFVYAAAQSGVELFKKDSSYKEWLKEHKESMKAVRKYRVHALNLIHLFGKNRVNLKKLTVKQTNNFKELIKRFPGKTMHDIVAICDYRLADLNEIGRIREMKTKRAYSRKLPLSYPFREKADRIQITGGQIREVWEPIIGQDRETEIPEAMKEWCSDVPTCEIAPFDIHWEKAIKKISPWKAAGPDGIPAYYWKVLRTPRDSLRRLAKEIYLGEQIPSKWFCTGRVVSIPKGGDLNDPNNYRPITCLNTAYKIVTGTVTSALMEVCNKNNILPPEQRALKTGEWGTTEAHILDSAVRSHMKISKKRGAMYWIDYAKAFDSVIRKYVEWVLARTGSPEHLLKCIKNIMSKWYVYHEGKNGSVGERLRVLCGFLQGDSMSPLLFCISIAPISYIIRTKIPPYIISFGKKGEDRKEIEVSHQYFVDDLSGYTYEQHVEGAIQTVEEYSLVAGLRVNRRKCATMGAEVEELPVIDRTNSYKYLGIECSESTRIDLTWDRIKEPMEKTLKKIWLSRELSLKQMVVAHNAMIIPKASYVLLNAVTSYGRYNQQIKWAKDLDSKLVHILKDKQNRVMNWKSNGHRLYMAKCDGGAGVNSLQAQVRIDTVRLWIYLQSTAKLHPILEYFIWLDESKKKRSFVSDFRQVDADTGIRGLLEQQFQGRFDKLNLKHTCKYATKTIRDMARNCMLESWKDKPMGGRIHRREINFKESFTWMTEMHLNARAVFCNWGVQENAIQTNSTYGGNGLGCRLCRSVGIIPPPPETVEHITIGCDVSKGTTQTYRHNDVGRHPVNSIRRKHGARAFQYFEHIPAVQDLGNEVTLYYDMNMVTDIKSNKPDIVVHDKPNKKVYVIEVGISCPQRLDIQQKWKYFKYAINSNKSYEEFKQNPDEGGQDKYNLIYLCP

SEQ ID NO: 9908 - protein, 1190 aa, Panagrolaimus sp.
MNQLPITNFINNTQPEATQGEGMSSQLRSSQNQNSDTRGVRRGARMRGNTQIPASTRAMKYLGDELAYINELARSRHMPTEYWGLWKARFPDTARSDKGIRDKIARVRREGNFQREPEPNLNEQAEVVPEEIIVNEDVQPEPIAAEPPLVIDPPVEAIGNPPLSDNERDEQFLTLKKLIITNYNRVHDKPMRRKGLKRHHYTKEQLTVLNEVVSDVMVAKGIKNAKDVNEFVYAVAQSGVEFFKKDSTYKEWLKDHKESMKTMRKYRVHALNLIHLFGKNPVKRKKLTTNQTKNFEELIKRFPGKTMHDIVAICDYRLEDLKELGRVREMKTKLAYSRKQPLSYPFKEKTDKIQITGRQIREVWEPIIGQDRDTEIPEELEEWCTNVPTCDIAPFDNHWEKALKKINPWKAAGPDGIPAYYWKVLRSPRESLKQLAQKIYLGETAPRKWFCTGRVVSIPKGGDLNDPNNYRPITCLNTAYKIVTGTVTSALTEVCNKNNILPPEQRALKTGEWGTTEAQALDSAVRAHMKYSKKPGAMYWVDYAKAYDSVIRKWVKWALPRIGAPEHLIKCIFNIMSKWFVYHEGKNGSIGDLLKVLCGFLQGDSMSPLLFCISIAPISFIIRIKIPPYVISFQKKDEDKKEIKVSHQFFMDDLAGYTYSQHVNGAIQTVEKYSRVAGLNVNRRKCATMGAEVEGLPVIDRTNSYKYLGIECSESTRVDLTWDRIKGPIEKTLKKIWLSRELSLKQMVVAHNAMVIPKASYVLLNAVTSYGRFNQQIKWAKDLDCSLVRTLKSKQNRVMNSKSNGHRLYMAKSDGGAGVNSLQTQVRIDTVRLWLYVQSTPKLHPILEYFTWLHESKKKRSFVSDFEQVDAETGIRGLLQNQFPEGFNKLNLKHTCKYATKTIRELARNCMLESWKSKPMAGRVHELNINFKESFIWMTEKHLNARAVFCNWGVQENAIQTNSTWGGNGRGCRLCRSVGVIPPPKETIEHITIGCMVSKGTTQTFRHNDMCRHPINSIRRNFGQRAFQYFEHIPAVQDLGNGVTLYWDMNMVTTVKSNKPDIVVHDGHKKKVWVIEVGCSCPQRLDIQQKWKFFKYACNSDMSYSEFQQNPDDTRPGPNLRERLEYKFQASVVIIPLVVGTSGEVTDYTIGQFAKLPIKEGERVTLLRNMQRSAAIGTHYCVKAHMARSK

SEQ ID NO: 9909 - protein, 1189 aa, Panagrolaimus sp.
MNQISITNFLNNTHPEATQGDGMDSTQGISQNRRTGTRGARRGAGMRSNTQIPASTRSMKYQGDELEYITELARSRLTPTECWDRWIVRFPDTVRSARGIKDKITRMRREGITQEEPEPNHEEQAEEVLEGNAVNEEVHPEQVVVEPPLVDPPVEANDDNPEAPFERSEEFLALKKLVITNYEKIRRERVVRRGLKRHHYTKEQLVVLNEMATEVMEEHNIILAIDVNAFVYAVAQSGVEFFKKDSSYKEWLKEHKESLKAVRKYRVHALNLIHLFGKNRVNLKKLSVKQTKNHKELTKRFPGKTMHDIVAICDYRLEDLNEIGRVREMKTKLAYSRKLPLSYPFREKADKIQITGGQIREVWEPIIGRDRETEIPEEMMGWCSNVLTCEIAPFDIHWEKAIKKISPWKAAGPDGIPAYYWKVLRTPRDSLRRLAKEIYLGERIPNKWFCTGRVVSIPKGGDLNDPNNYRPITCLNTAYKIVTGTVTSALMEVCNKNDILPPEQRALKTGEWGTTEAHVLDSAVRSHMKISKKQGAMYWVDYAKAFDSVIRQFVNWVLGRIGSPEHLTKCIKNIMSKWYVYHEGKNNTLGNLLRVLCGFLQGDSMSPLLFCISIAPISYIIRNKIPPYVISFQKKGEDRKEIQVSHQFFVDDLSGYTYSQHVNGAIQTVEKYSRVAGLEVNKRKCAIMGAEVEGLPVIDRTNSYKYLGIECSESTRVDLTWDRIKEPIEKTLKKIWLSRELSLKQMVVAHNAMVVPKASYVLLNAVTSYGRYNQQVKRAKDLDSKLVRILKDKQNRFMNWKSNGHRLYMAKCDGGAGVNSLQAQVRIDTVRLWIYLQSTAKLHPILEYFTWLDESKNKRSFVSDFRQVDADTNIRGLLEQQFQGRFDKLNLKHTCKYATKVIRDMARDCMLESWKNKPMAGRVHRNEINFKESFVWMTEKHLNARAVFCNWGVQENAIQTNSTYGGNGRGCRLCRSVGIVPPPPETIEHITIGCGVSRGTTQAFRHDDVGRHAVNSIRRYYGTRALQYFEQIPAVQDLGNDVTLYHDMNMVIDVKSNKPDIVVHDKPNRKVYVIEVGISCPQILAIQQKWKYYKYAYNSNKSYEEFKQNPDDTSVGSNLRERLEYKFRAPVTVIPLVIGTSGEVTDFTISQFAKLPIREGERVILLRNMQRSAAIGTHYCVKAHMKHAQ

SEQ ID NO: 9910 - protein, 1153 aa, Aedes aegypti
MKANPAMETRSMRNRRMRSPEEGAPTGAGPGTGDRASGQRLEEDNVPRTRNRNGSSRNHQGHAAPTDVAVADRRQSLTLAGGRRQRIMWTREMNMYVIRCYYVCTRMETDMSGRSGMLEMFNERFPRFARQLDLNKLYTRQRAIMSHNMLTAAEVEYIKLEVQREIGEEGTTSSDTSRRSSVGLDAPITSESRDSPAPTAPGPTADMQRQQLRDELALHMGTAVTQFRGTDPMSRHRIPKLRYSYRLTSAVNILNQDILPQYLEAVENLEDLQFIVYSAAIAVVKTLGLRTRPQGEDGTRPNAQKPVWMRRLESRIATLRSKVGRLTQYKQGNRSTRLVRHVAEIVRPAELRDLREVDITEILDTHVQRLSALAKRLRRYGECSKRKEQNRMFNINEREFYNRIRNDKVDFGEGLPEIGDVTQFWANLWENPTEHNGDGMWLAEEERQCDGIGDMTAVVVTAQDIREATRYTRNWAAPGPDFVHNFWYKKLTTIHGRMAECFNTVLGDPSQLPELITRGVTFLLPKDQHTADPAKYRPITCLSSLYKVLSSVIARRVQVHCDANNVMTEEQKGCRRNTQGCKDQVIVDAVIVGQATQKQRNLSMAYIDYKKAYDSVPHSYLLKVLQLYKVDGNVIRLMQHAMGMWSTSLHITDGTAVLRSRTLSIRRGIFQGDTFSPLWFCLAMNPLSKALNQCNYGYQLKSGERSTRVTHTFYMDDLKLFAESVQRLHQLLQLVTTFSNDIRMEFGIDKCRSIHLRRGQVMDASCFRVNEQEEIRNMVEGETYKYLGFLQLRGIRHTMIKKELQEKFLSRVNCILKSFLSAGNKAKAINTFAVPLLTYSFGVVKWTKTDLEAIERAVRVAFTKHRMRHPKSSIERVTLPRAAGGRGVTDIQALCVSQIQQLRAYFVESQNRHKIYRTVCEADHGFSALHLAQEDYQLNCDIKTVDEMIAMWKQKELHGTHPHQLELEHIDKVASNTWLVRGDLFSETEGFMVAIQDRVIATKNYRHYILHEDVEDRCRKCNSVGGTIEHVVAGCSVLAGSAYLDRHNKVAKIVHQQLALKHNLVDRFVPYYKYLPDPVLENSCIKLYWDREIITDVLIRANRPDIVVYDKRMKRVTLIDIAVPLDHNVQSTFSNKKRSNPARGTGRARCRSG

SEQ ID NO: 9911 - protein, 1070 aa, Aedes aegypti
MKANPAMETRSMRNRRMRSPEEGAPTGAGPGTGDRASGQRLEEDNEQERPSSQRAQPVPRTRNRNGSSRNHQGHAAPTDVAVADRRQSLTLAGGRRQRIMWTREMNMYVIRCYCVCTKMETDMSGRSGMLEMFNERFPRFARQLDLNKLYTRQRAIMSHNMLTAAEVEYIKLKVQREIGEEGTRSSDTSRRSSVGLDAPITSESRDSPAPTAPGPTADMQRQQLRDELALHMGTAVTQFRGTDPMSRHRIPKLRYSYRLTSAVSILIQDILPQYLEAVENLEDLQFIVYSAAIAVVKTLGLRTRPQGEDGTRPKAQKPVWMRRLESRIATLRSKVGRLTQYKQGNRSTRLVRHVAEIVRPAELRDLREVDITEILDTHVQRLSALAKRLRRYGECSKREEQNRMFNMNEREFYNRIRNDKVDFGEGLPEIGDVTQFWANLWENPTEHNGDGMWLAEEERQCDGIGDLTAVVVTAQDIREATRYTRNWAAPGPDFVHNFWYKKLTTIHGRMAECFNTVLGDPTQLPEFITRGVTFLLPKDQHTADPAKYRPITCLSSLYKVLSSVIARRVQAHCDANNVMTEEQKGCRRNTQGCKDQVIVDAVIVGQATQKQRNLSMAYIDYKKAYDSVPHSYLLKVLQLYKVDGNVIRLMQHAMGMWSTSLHITDGTAVLRSRTLSIRRGIFQGDTFSPLWFCLAMNPLSKALNQCNYGYQLKSGERSTRVTHTFYMDDLKLFAESVQRLHQLLQLVTTFSNDIRMEFGIDKCRSIHLRRGQVMDASCFRVNEQEEIRNMVEGETYKYLGFLQLRGIRHTMIKKELQEKFLSRVNCILKSFLSASNKVKAINTFAVPLLTYSFGVVKWTKTDLEAIERAVRVAFTKHRMRHPKSSIERVTLPRAAGGRGVTDIQALCVSQIQQLRAYFVESQNRHEIYRTVCEAVHGFSALHLAQEDYQLNCDIKTVDEMIAMWKQKELHGTHPHQLELEHIAVPLDHNVQSTFSNKIAKYHDLAEELKQMWHLEDVRIIPVVLSATGIVPKSLLRSLDELELKKDLHSIQKAVILGTSSIVRRFLNHHN

SEQ ID NO: 9912 - protein, 1103 aa, Aedes aegypti
METDMSGRSGMLEMFNERFPRFARQLDLNKLYTRQRAIMSHNMLTAAEVEYIKLEVQREIGEEGTRSSDTSRRSSVGLDASITSESRDSPAPTAPGPTADMQRQQLRDELALHMGTAVTQFRGTDPMSRHRIPKLRYSYRLTSAVSILNQDILPQYLEAVENLEDLQFIVYSAAIAVVKTLGLRTRPQGEDGTRPNAQKPVWMRRLESRIATLRSKVGRLTQYKQGNRSTRLVRHVAEIVRPAELRDLREVDITEILDTHVQRLSALAKRLRRYGECSKRKKQNRMFNINEREFYNRIRNDKVDFGEGLPEIGDVTQFWANLWENPTEHNGDGMWLAEEERQCDGIGDMTAVVVTAQDIREATRYTRNWAAPGPDFVHNFWYKKLTTIHGRMAECFNTVLGDPTQLPEFITRGVTFLLPKDQHTADPAKYRPITCLSSLYKVLSSVIARRVQAHCDANNVMTEEQKGCRRNTQGCKDQVIVDAVIVGQATQKQRNLSMAYIDYKKAYDSVPHSYLLKVLQLYKVDRNVIRLMQHAMGMWSTSLHITDGTAVLRSRTLSIRRGIFQGDTFSPLWFCLAMNPLSKALNQCNYGYQLKSGERSTRVTHTFYMDDLKLFAESVQRLHQLLQLVTTFSNDIRMEFGIDKCRSIHLRRGQVMDASCFRVNEQEEIRNMVEGETYKYLGFLQLRGIRHTMIKKELQEKFLSRVNCILKSFLSAGNKVKAINTFAVPLLTYSFGVVKWTKTDLEAIERAVRVAFTKHRMRHPKSSIERVTLPRAAGGRGVTDIQALCVSQIQQLRAYFVESQNRHEIYRTVCEADHGFSALHLAQEDYQLNCDIKTVDEMIAMWKQKELHGTHPHQLELEHIDKVASNTWLVRGDLFSETEGFMVAIQDRVIATKNYRHYILHEDVEDRCRKCNSVGETIEHVVAGCSVLAGSAYLDRHNEVAKIVHQQLALKHNLVDRFVPYYKYLPDPVLENSCIKLYWDREIITDVLIRANRPDIVVYDKRMKRVTLIDIAVPLDHNVQSTFSNKIAKYHDLAEELKQMWHLEDVRIVPVVLSATGIVPKSLLRSLDELELKKDLHSIQKAVILGTCSIVRRFLNHHN

SEQ ID NO: 9913 - protein, 1221 aa, Aedes aegypti
MKANPAMETRSMRNRRMRSPEEGAPTGAGPGTGDRASGQRLEEDNVQERPSSQRAQPVPRTRNRNGSSRNHQGHAAPTDVAVADRRQSLTLAGGRRQRIMWTREMNMYVIRCYYVCTRMETDMSGRSGMLEMFNERFPRFARQLDLNKLYTRQRAIMSHNMLTAAEVEYIKLEVQREIGEEGTRSSDTSRRSSVGLDAPITSESRDSPAPTAPGPTADMQRQQLRDELALHMGTAVTQFRGTDPMSRHRIPKLRYSYRLTSAVSILNQDILPQYLEAVENLEDLQFIVYSAAIAVVKTLGLRTRPQGEDGTRPNAQKPVWMRRLESRIATLRSKVGRFTQYKQGNRSTRLVRHVAEIVRPAELRDLREVDITEILDTHVQRLSALAKRLRRYGECSKRKEQNRMFNINEREFYNRIRNDKVDFGEGLPEIGDVTQFWANLWENPTEHNDDGMWLAEEGRQCDGIGDMTAVVVTAQDIREATRYTRNWAAPGPDFVHNFWYKKLTTIHGRMAECFNTVLGDPTQLPEFITRGVTFLLPKDQHTADPAKYRPITCLSSLYKVLSSVIARRVQAHCDANNVMTEEQKGCRRNTQGCKDQVIVDAVIVGQATQKQRNLSMAYIDYKKAYDSVPHSYLLKVLQLYKVDRNVIRLMQHAMGMWSTSLHITDGTAVLRSRTLSIRRGIFQGDTFSPLWFCLAMNPLSKALNQCNYGYQLKSGERSTRVTHTFYMDDLKLFAESVQRLHQLLQLVTTFSNDIRMEFGIDKCRSIHLRRDQVMDASCFRVNEQEEIRNMVEGETYKYLGFLQLRGIRHTMIKKELQEKFLSRVNCILKGFLSAGNKVKAINTFAVPLLTYSFGVVKWTKTDLEAIERAVRVAFTKHRMRHPKSSIERVTLPRAAGGRGVTDIQALCVSQIQQLRAYFVESQNRHEIYRTVCEADHGFSALHLAQEDYQLNCDIKTVDEMIAMWKQKELHGTHPHQLELEHIDKVASNTWLVRGDLFSETEGFMVAIQDRVIATKNYRHYILHEDVEDRCRKCNSVGETIEHVVAGCSVLAGSAYLDRHNEVAKIVHQQLALKHNLVDRFVPYYKYLPDPVLENSCIKLYWDREIITDVLIRANRPDIVVYDKRMKRVTLIDIAVPLDHNVQSTFSNKIAKYHDLAEELKQMWHLEDVRIVPVVLSATGIVPKSLLRSLDELELKKDLHSIQKAVILGTCSIVRRFLNHHN

SEQ ID NO: 9914 - protein, 818 aa, Aedes aegypti
MFNINEREFYNRIRNDKVDFGEGLPEIGDVTQFWANLWENPTEHNGDGMWLAEEERQCDGIGDMTAVVVTAQDIREATRYTRNWAAPGPDFVHNFWYKKLTTIHGRMAECFNTVLGDPTQLPEFITRGVTFLLPKDQHTADPARYRPITCLSSLYKVLSSVIARRVQAHCDANNVMTEEQKGCRRNTQGCKDQVIVDAVIVGQATQKQRNLSMAYIDYKKAYDSVPHSYLLKVLQLYKVDRNVIRLMQHAMGMWSTSLHITDGTAVLRSRTLSIRRGIFQGDTFSPLWFCLAMNPLSKALNQCNYGYQLKSGERSTRVTHTFYMDDLKLFAESVQRLHQLLQLVTTFSNDIRMEFGIDKCRSSHLRRGQVMDASCFRVNEQEEIRNMVEGETYKYLGFLQLRGIRHTMIKKELQEKFLSRVNCILKSFLSAGNKVKAINTFAVPLLTYSFGVVKWTKTDLEAIERAVRVAFTKHRMRHPKSSIERVTLPRAAGGRGVTDIQALCVSQIQQLRAYFVESQNRHEIYRTVCEADHGFSALHLAQEDYQLNCDIKTVDEMIAMWKQKELHGTQPHQLELEHIDKVASNTWLVRGDLFSETEGFMVAIQDRVIATKNYRHYILHEDVEDRCRKCNSVGETIEHVVAGCSVLAGSAYLDRHNEVAKILHQQLALKHNLVDRFVPYYKYLPDPVLENSCIKLYWDREIITDVLIRANRPDIVVYDKRMNRVTLIDIAVPLDHNVQSTFSNKIAKYHDLAEELKQMWHLEDVRIVPVVLSATGIVPKSLLRSLDDLELKKDLHSIQKAVILGTCSIVRRFLNHHN

SEQ ID NO: 9915 - protein, 1221 aa, Aedes aegypti
MKANPAMETRSMRNRRMRSPEEGAPTGAGPGTGDRASGQRLEEDNVQERPSSQRAQPVPRTRNRNGSSRNHQGHAAPTDVAVADRRQSLTLAGGRRQRIMWTREMNMYVIRCYYVCTRMETDMSGRSGMLEMFNERFPRFARQLDLNKLYTRQRAIMSHNILTAAEVEYIKLEVQREIGEEGTRSSDTSRRSSVGLDASITSESRDSPAPTAPGPTADMQRQQLRDELALHMGTAVTQFRGTDPMSRHRIPKLQYSYRLTSAVSILNQDILPQYLEAVENLEDLQFIVYSAAIAVVKTLGLRTRPQGEDGTRPNAQKPVWMRRLESRIATLRSKVGRLTQYKQGNRSTRLVRHVAEIVRPAELRDLREVDITEILDTHVQRLSALAKRLRRYGECSKRKEQNRMFNINEREFYNRIRNDKVDFGEGLPEIGDVTQFWANLWENPTEHNGDGMWLAEEERQCDGIGDMTAVVVTAQDIREATRYTRNWAAPGPDFVHNFWYKKLTTIHGRMAECFNTVLGDPTQLPEFITRGVTFLLPKDQHTADPAKYRPITCLSSLYKVLSSVIARRVQAHCDANNVMTEEQKGCRRNTQGCKDQVIVDAVIVGQATQKQRNLSMAYIDYKKAYDSVPHSYLLKVLQLYKVDRNVIRLMQHAMGMWSTSLHITDGTAVLRSRTLSIRRGIFQGDTFSPLWFCLAMNPLSKALNQCNYGYQLKSGERSTRVTHTFYMDDLKLFAESVQRLHQLLQLVTTFSNDIRMEFGIDKCRSIHLRRGQVMDASCFRVNEQEEIRNMVEGETYKYLGFLQLRGIRHTMIKKELQEKFLSRVNCILKSFLSAGNNVKAINTFAVPLLTYSFGVVKWTKTDLEAIERAVRVAFTKHRMRHPKSSIERVTLPRAAGGRGVTDIQALCVSQIQQLRAYFVESQNRHEIYRTVCEADHGFSALHLAQEDYQLNCDIKTVDEMIAMWRQKELHGTHPHQLELEHIDKVASNTWLVRGDLFSETEGFMVAIQDRVIATKNYRHYILHEDVEDRCRKCNSVGETIEHVVAGCSVLAGSAYLDRHNEVAKIVHQQLALKHNLVDRFVPYYKYLPDPVLENSCIKLYWDREIITDVLIRANRPDIVVYDKRMKRVTLIDIAVPLDHNVQSTFSNKIAKYHDLAEELKQMWHLEDVRIVPVVLSATGIVPKSLLRSLDELELKKDLHSIQKAVILGTCSIVRRFLNHHN

SEQ ID NO: 9916 - protein, 1120 aa, Aedes aegypti
MWTREMNMYVIRCYYVCTRMETDMSGRSGMLEMFNERFPRFARQLDLNKLYTRQRAIMSHNMLTAAEVEYIKLEVQREIGEEGTRSSDTSRRSSVGLDASITSESRDSPAPTAPGPTADMQRQQLRDELALHMGTAVTQFRGTDPMSRHRIPKLRYSYRLTSAVSILNQDILPQYLEAVENLEDLQFIVYSAAIAVVKTLGLRTRPQGEDGTRPNAQKPVWMRRLESRIATLRSKVGRLTQYKQGNRSTRLVRHVAEIVRPAELRDLREVDITEILDTHVQRLSALAKRLRRYGECSKRKEQNRMFNINEREFYNRIRNDKVDFGEGLPEIGDVTQFWANLLENPAEHNGDGMWLAEEKRQCDGIGDMTAVVVTAQDIREATRYTRNWAAPGPDFVHNFWYKKLTTIHGRMAECFNTVLGDPTRLPEFITRGVTFLLPKDQHTADPAKYRPITCLSSLYKVLSSVIARRVQAHCDANNVMTEEQKGCRRNTQGCKDQVIVDAVIVGQATQKQRNLSMAYIDYKKAYDSVPHSYLLKVLQLYKVDRNVIRLMQHAMGMWSTSLHITDGIAVLRSRTLSIRRGIFQGDTFSPLWFCLAMNPLSKALNQCNYDYQLKSGERSTRVTHTFYMDDLKLFAESVQRLHQLLQLVTTFSNDIRMEFGIDKCRSIHLRRGQVMDASCSRVNEQEEIRNMVEGETYKYLGFLQLRGIRHTMIKKELQEKFLSRVNCILKSFLSAGNKVKAINTFAVPLLTYSFGVVKWTKTDLEAIERAVRVAFTKHRMRHPKSSIERVTLPRAAGGRGVTDIQALCVSQIQQLRAYFVESQNRHEIYRTVCEADHGFSALHLAQEDYQLNCDIKTVDEMIAMWKQKELHGTHPHQLELEHIDKVASNTWLVRGDLFSETEGFMVAIQDRVIATKNYRHYILHEDVEDRCRKCNSVGETIEHVVAGCSVLAGSAYLDRHNEVAKIVHQQLALKHNLVDRFVPYYKYLPDPVLENSCIKLYWDREIITDVLIRANRPDIVVYDKRMKRVTLIDIAVPLDHNVQSTFSNKKYHDLAEELKQMWHLEDVRIVPVVLSASGIVPKSLLRSLDELELKKDLHSIQKAVILGTCSIVRRFLNHHN

SEQ ID NO: 9917 - protein, 1003 aa, Aedes aegypti
MQRQQLRDELALHMGTAVTQFRGTDPMSRHRIPKLRYSYRLTSAVSILNQDILPQYLEAVENLEDLQFIVYSAAIAVVKTLGLRTRPQGEDGTRPNAQKPVWMRRLESRIATLRSKVGRLTQYKQGNRSTRLVRHVAEIVRPAELRDLREVDITEILDTHVQRLSALAKRLRRYGECSKRKEQNRMFNINEREFYNRIRNDKVDFGEGLPEIGDVTQFWANLWENPAEHNGDGMWLAEEERQCDGIGDMTAVVVTAQDIREATRYTRNWAAPGPDFVHNFWYKKLTTIHGRMAECFNTVLGDPTRLPEFITRGVTFLLPKDQHTADPAKYRPITCLSSLYKVLSSVIARRVQAHCDANNVMTEEQKGCRRNTQGCKDQVIVDAVIVGQATQKQRNLSMAYIDYKKAYDSVPHSYLLKVLQLYKVDRNVIRLMQHAMGMWSTSLHITDGIAVLRSRTLSIRRGIFQGDTFSPLWFCLAMNPLNKALNQCNYGYQLKSGERSTRVTHTFYMDDLKLFAESVQRLHQLLQLVTTFSNDIRMEFGIDKCRSIHLRRGQVMDASCFRVNEQEEIRNMVEGETYKYLGFLQLRGIRHTMIKKELQEKFLSRVNCILKSFLSAGNKVKAINTFAVPLLTYSFGVVKWTKTDLEAIERAVRVAFTKHRMRHPKSSIERVTLPRAAGGRGVTDIQALCVSQIQQLRAYFVESQNRHEIYRTVCEADHGFSALHLAQEDYQLNCDIKTVDEMIAMWKQKELHGTHPHQLELEHIDKVASNTWLVRGDLFSETEGFMVAIQDRVIATKNYRHYILHEDVEDRCRKCNSVGETIEHVVAGCSVLAGSAYLDRHNEVAKIVHQQLALKHNLVDRFVPYYKYLPDPVLENSCIKLYWDREIITDVLIRANRPDIVVYDKRMKRVTLIDIAVPLDHNVQSTFSNKIAKYHDLAEELKQMWHLEDVRIVPVVLSATGIVPKSLLRSLDELELKKDLHSIQKAVILGTCSIVRRFLNHHN

SEQ ID NO: 9918 - protein, 1221 aa, Aedes aegypti
MKANPAMETRSMRNRRMRSPEEGAPTGAGPGTGDRASGQRLEEDNVQERPSSQRAQPVPRTRNRNGSSRNHQGHAAPTDVAVADRRQSLTLAGGRRQRIMWTREMNMYVIRCYYVCTRMETDMSGRSGMLEMFNERFPRFARQLDLNKLYTRQRAIMSHNMLTAAEVEYIKLEVQREIGEEGTRSSDTSRRSSVGLDASITSESRDSPAPTAPGPTADMQRQQLRDELALHMGTAVTQFRGTDPMSRHRIPKLRYSYRLTSAVSILNQDILPQYLEAVENLEDLQFIVYSAAIAVVKTLGLRTRPQGEDGTRPNAQKPVWMRRLESRIATLRSKVGRLTQYKQGNRSTRLVRHVAEIVRPAELRDLREVDITEILDTHVQRLSALAKRLRRYGECSKRKEQNRMFNINEREFHNRIRNDKVDFGEGLPEIGDVTQFWANLWENPTEHNGDGMWLAEEERQCDGIGDMTAVVVTAQDIREATRYTRNWAAPGPDFVHNFWYKKLTTIHGRMAECFNTVLGDPTQLPEFITRGVTFLLPKDQHTADPAKYRPITCLSSLYKVLSSVIARRVQAHCDANNVMTEEQKGCRRNTQGCKDQVIVDAVIVGQATQKQRNLSMAYIDYKKAYDSVPHSYLLKVLQLYKVDRNVIRLMQHAMGMWSTSLHITDGTAVLRSRTLSIRRGIFQGDTFSPLWFCLAMNPLSKALNQCNYGYQLKSGETSTRVTHTFYMDDLKLFAESVQRLHQLLQLVTTFSNDIRMEFGIDKCRSIHLRRGQVMDASCFRVNEQEEIRNMVEGETYKYLGFLQLRGIRHTMIKKELQEKFLSRVNCILKSFLSAGNKVKAINTFAVPLLTYSFGVVKWTKTDLEAIERAVRVAFTKHRMRHPKSSIERVTLPRAAGGRGVTDIQALCVSQIQQLRAYFVESRNRHEIYRTVCEADHGFSALHLAQEDYQLNCDIKTVDEMIAMWKQKELHGTHPHQLELEHIDKVASNTWLMRGDLFSETEGFMVAIQDRVIATKNYRHYILHEDVEDRCRKCNSVGETIEHVVAGCSVLAGSAYLDRHNEVAKIVHQQLALKHNLVDRFVPYYKYLPDPVLENSCIKLYWDREIITDVLIRANRPDIVVYDKRMKRVTLIDIAVPLDHNVQSTFSNKIAKYHDLAEELKQMWHLEDVRIVPVVLSATGIVPKSLLRSLDELELKKDLHSIQKAVILGTCSIVRRFLNHHN

SEQ ID NO: 9919 - protein, 1221 aa, Aedes aegypti
MKANPAMETRSMRNRRMRSPEEGAPTGAGPGTGDRASGQRLEEDNVQERPSSQRAQPVPRTRNRNGSSRNHQGHAAPTDVAVADRRQSLTLAGGRRQRIMWTREMNMYVIRCYYVCTRMETDMSGRSGMLEMFNERFPRFARQLDLNKLYTRQRAIMSHNMLTAAEVEYIKLEVQREIGEEGTRSSDTSRRSSVGLDASITSESRDSPAPTAPGPTADMQRQQLRDELALHMGTAVTQFRGTDPMSRHRIPKLRYSYRLTSAVSILNQDILPQYLEAVENLEDLQFIVYSAAIAVVKTLGLRTRPQGEDGTRPNAQKPVWMRRLESRIATLRSKVGRLTQYKQGNRSTRLVRHVAEIVRPAELRDLREVDITEILDTHVQRLSALAKRLRRYGECSKRKEQNRMFNINEREFYNRIRNDKVDFGEGLPEIGDVTQFWANLWENPTEHNGDGMWLAEEERQCDGIGDMTAVVVTAQDIREATRYTRNWAAPGPDFVHNFWYKKLTTIHGRMAECFNTVLGDPTQLPEFITRGVTFLLPKDQHTADPAKYRPITCLSSLYKVLSSVIARRVQAHCDANNVMTEEQKGCRRNTQGCKDQVIVDAVIVGQATQKQRNLSMAYIDYKKAYDSVPHSYLLKVLQLYKVDRNVIRLMQHAMGMWSTSLHITDGTAVLRSRTLSIRRGIFQGDTFSPLWFCLAMNPLSKALNQCNYGYQLKSGERSTRVTHTFYMDDLKLFAESVQRLHQLLQLVTTFSNDIRMEFGIDKCRSIHLRRGQVMDASCFRVNEQEEIRNMVEGETYKYLGFLQLRGIRHTMIKKELQEKFLSRVNCILKSFLSAGNKVKAINTFAVPLLTYSFGVVKWTKTDLEAIERAVRVAFTKHRMRHPKSSIERVTLPRAAGGRGVTDIQALCVSQIQQLRAYFLESQNRHEIYRTVCEADHGFSALHLAQEDYQLNCDIKTVDEMIAMWKQKELHGTHPHQLELEHIDKVASNTWLVRGDLFSETEGFMVAIQDRVIATKNYRHYILHEDVEDRCRKCNSVGETIEHVVAGCSVLAGSAYLDRHNEVAKIVHQQLALKHNLVDRFVPYYKYLPDPVLENSCIKLYWDREIITDVLIRANRPDIVVYDKRMKRVTLIDIAVPLDHNVQSTFSNKIAKYHDLAEELKQMWHLEDVRIVPVVLSATGIVPKSLLRSLDELELKKDLHSIQKAVILGTCSIVRRFLNHHN

SEQ ID NO: 9920 - protein, 1065 aa, Aedes aegypti
MSHNMLTAAEVEYIKLEVQREIGEEGTRSSDTSRRSSVGLDAPITSESRDSPAPTAPGPTADMQRQQLRDELALHMGTAVTQFRGTDPMSRHRIPKLRYSYRLTSAVSILNQDILPQYLEAVENLEDLQFIVYSAAIAVVKTLGLRTRPQGEDGTRPNAQKPVWMRRLESRIATLRSKVGRLTQYKQGNRSTRQVRHVAEIVRPAELRDLREVDITEILDTHVQRLSALAKRLRRYGECSKRKEQNRMFNINEREFYNRIRNDKVDFGEGLPEIGDVTQFWANLWENPTEHNGDGMWLAEEERQCDGIGDMTAVVVTAQDIREATRYTRNWAAPGPDFVHNFWYKKLTTIHGRMAECFNTVLGDPTQLPEFITRGVTFLLPKDQHTADPAKYRPITCLSSLYEVLSSVIARRVQAHCDANNVMTEEQKGCRRNTQGCKDQVIVDAVIVGQATQKQRNLSMAYIDYKKAYDSVPHSYLLKVLQLYKVDRNVIRLMQHAMGMWSTSLHITDGTAVLRSRTLSIRRGIFQGDTFSPLWFCLAMNPLSKALNQCNYGYQLKSGERSTRVTHTFYMDDLKLFAESVQRLHQLLQLVTTFSNDIRMEFGIDKCRSIHLRRGQVMDASCFRVNEQEEIRNMVEGETYKYLGFLQLRGIRHTMIKKELQEKFLSRVNCILKSFLSAGNKVKAINTFAVPLLTYSFGVVKWTKTDLEAIERAVRVAFTKHRMRHPKSSIERVTLPRAAGGRGVTDIQALCVSQIQQLRAYFVESQNRHEIYRTVCEADHGFSALHLAQEDYQLNCDIKTVDEMIAMWKQKELHGTHPHQLELEHIDKVASNTWLVRGDLFSETEGFMVAIQDRVIATKNYRHYILHEDVEDRCRKCNSVGETIEHVVAGCSVLAGSAYLDRHNEVAKIVHQQLALKHNLVDRFVPYYKYLPDPVLENSCIKLYWDREIITDVLIRANRPDIVVYDKRMKRVTLIDIAVPLDHNVQSTFSNKIAKYHDLAEELKQMWHLEDVRIVPVVLSATGIVPKSLLRSLDELELKKDLHSIQKAVILGTCSIVRRFLNHHN

SEQ ID NO: 9921 - protein, 818 aa, Aedes aegypti
MFNINEREFYNRIRNDKVDFGEGLPEIGDVTQFWANLWENPTEHNGDGMWLAEEERQCDGIGDMTAVVVTAQDIREATRYTRNWAAPGPDFVHNFWYKKLTTIHGRMAECFNTVLGDPTQLPEFITRGVTFLLPKDQHTADPAKYRPITCLSSLYKVLSSVIARRVQAHCDANNVMTEEQKGCRRNTQGCKDQVIVDAVIVGQATQKQRNLSMAYIDYKKAYDSVPHSYLLKVLQLYKVDRNVIRLMQHAMGMWSTSLHITDGTAVLRSRTLSIRRGIFQGDTFSPLWFCLAMNPLSKALNQCNYGYQLKSGERSTRVTHTFYMDDLKLFAESVQRLHQLLQLVTTFSNDIRMEFGIDKCRSSHLRRGQVMDASCFRVNEQEEIRNMVEGETYKYLGFLQLRGIRHTMIKKELQEKFLSRVNCILKSFLSAGNKVKAINTFAVPLLTYSFGVVKWTKTDLEAIERAVRVAFTKHRMRHPKSSIERVTLPRAAGGRGVTDIQALCVSQIQQLRAYFVESQNRHEIYRTVCEADHGFSALHLAQEDYQLNCDIKTVDEMIAMWKQKELHGTQPHQLELEHIDKVASNTWLVRGDLFSETEGFMVAIQDRVIATKNYRHYILHEDVEDRCRKCNSVGETIEHVVAGCSVLAGSAYLDRHNEVAKILHQQLALKHNLVDRFVPYYKYLPDPVLENSCIKLYWDREIITDVLIRANRPDIVVYDKRMNRVTLIDIAVPLDHNVQSTFSNKIAKYHDLAEELKQMWHLEDVRIVPVVLSATGIVPKSLLRSLDELELKKDLHSIQKAVILGTCSIVRRFLNHHN

SEQ ID NO: 9922 - protein, 1001 aa, Aedes aegypti
MQRQQLRDELALHMGTAVTQFRGTDPMSRHRIPKLRYSYRLTSAVSILNQDILPQYLEAVENLEDLQFIVYSAAIAVVKTLGLRTRPQGEDGTRPNAQKPVWMRRLESRIATLRSKVGRLTQYKQGNRSTRLVRHVAEIVRPAELRDLREVDITEILDTHVQRLSALAKRLRRYGECSKRKEQNRMFNINEREFYNRIRNDKVDFGEGLPEIGDVTQFWANLWENPAEHNGDGMWLAEEERQCDGIGDMTAVVVTAQDIREATRYTRNWAAPGPDFVHNFWYKKLTTIHGRMAECFNTVLGDPTRLPEFITRGVTFLLPKDQHTADPAKYRPITCLSSLYKVLSSVIARRVQAHCDANNVMTEEQKGCRRNTQGCKDQVIVDAVIVGQATQKQRNLSMAYIDYKKAYDSVPHSYLLKVLQLYKVDRNVIRLMQHAMGMWSTSLHITDGIAVLRSRTLSIRRGIFQGDTFSPLWFCLAMNPLNKALNQCNYGYQLKSGERSTRVTHTFYMDDLKLFAESVQRLHQLLQLVTTFSNDIRMEFGIDKCRSIHLRRGQVMDASCFRVNEQEEIRNMVEGETYKYLGFLQLRGIRHTMIKKELQEKFLSRVNCILKSFLSAGNKVKAINTFAVPLLTYSFGVVKWTKTDLEAIERAVRVAFTKHRMRHPKSSIERVTLPRAAGGRGVTDIQALCVSQIQQLRAYFVESQNRHEIYRTVCEADHGFSALHLAQEDYQLNCDIKTVDEMIAMWKQKELHGTHPHQLELEHIDKVASNTWLVRGDLFSETEGFMVAIQDRVIATKNYRHYILHEDVEDRCRKCNSVGETIEHVVAGCSVLAGSAYLDRHNEVAKIVHQQLALKHNLVDRFVPYYKYLPDPVLENSCIKLYWDREIITDVLIRANRPDIVVYDKRMKRVTLIDIAVPLDHNVQSTFSNKKYHDLAEELKQMWHLEDVRIVPVVLSASGIVPKSLLRSLDELELKKDLHSIQKAVILGTCSIVRRFLNHHN

SEQ ID NO: 9923 - protein, 1221 aa, Aedes aegypti
MKANPAMETRSMRNRRMRSPEEGAPTGAGPGTGDRASGQRLEEDNVQERPSSQRAQPVPRTRNRNGSSRNHQGHAAPTDVAVADRRQSLTLAGGRRQRIMWTREMNMYVIRCYYVCTRMETDMSGRSGMLEMFNERFPRFARQLNLNKLYTRQRAIMSHNMLTAAEVEYIKLEVQREIGEEGTRSSDTSRRSSVGLDAPITSESRDSPAPTAPGPTADMQRQQLRDELALHMGTAVTQFRGTDPMSRHRIPKLRYSYRLTSAVSILNQDILPQYLEAVENLEDLQFIVYSAAIAVVKTLGLRTRPQGEDGTRPNAQKPVWMRRLESRIATLRSKVGRLTQYKQGNRSTRLVRHVAEIVRPAELRDLREVDITEILDTHVQRLSALAKRLRRYGECSKRKEQNRMFNINEREYYNRIRNDKVDFGEGLPEIGDVTQFWANLWENPTEHNGDGMWLAEEERQCDGIGDMTAVVVTAQDIREATRYTRNWAAPGPDFVHNFWYKKITTIHGRMAECFNMVLGDPTQLPEFITRGVTFLLPKDQHTADPAKYRPITCLSSLYKVLSSVIARRVQAHCDANNVMTEEQKGCRRNTQGCKDQVIVDAVIVGQATQKQRNLSMSYIDYKKAYDSVPHSYLLKVLQLYKVDRNVIRLMQHAMGMWSTSLHITDGTAVLRSRTLSIRRGIFQGDTFSPLWFCLAMNPLSKALNQCNYGYQLKSGERSTRVTHTFYMDDLKLFAESVQRLHQLLQLVTTFSNDIRMEFGIDKCRSIHLRRGQVMDASCFHVNEQEEIRNMVEGETYKYLGFLQLRGIRHTMIKKELQEKFLSRVNCILKSFLSAGNKVKAINTFAVPLLTYSFGVVKWTKTDLEAIERAVRVAFTKHRMRHPKSSIERITLPRAAGGRGVTDIQALCVSQIQQLRAYFVESQNRHEIYRTVCEADHGFSALHLAQEDYQLNCDIQTVDEMIAMWKQKELHGTHPHQLELEHIDKVASNTWLVRGDLFSETEGFMVAIQDRVIATKNYRHYILHEDVEDRCRKCNSVGETIEHVVAGCSVLAGSAYLDRHNEVAKIVHQQLALKHNLVDRFVPYYKYLPDPVLENSCIKLYWDREIITDVLIRANRPDIVVYDKRMKRVTLIDIAVPLDHNVQSTFSNKIAKYHDLAEELKQMWHLEDVRIVPVVLSATGIVPKSLLRSLDELELKKDLHSIQKAVILGTCSIVRRFLNHHN

SEQ ID NO: 9924 - protein, 1221 aa, Aedes aegypti
MKANPTMETRSMRNRRMRSPEEGAPTGAGPGTGDRASGQRLEEDNVQERPSSQRAQPVPRTRNRNGSSRNHQGHAAPTDVAVADRRQSLTLAGGRRQRIMWTREMNMYVIRCYYVCTRMETDMSGRSGMLEMFNERFPRFARQLDLNKLYTRQRAIMSHNMLTAAEVEYIKLEVQREIGEEGTRSSDTSRRSSVGLDAPITSESRDSPAPTAPGPTADMQRQQLRDELALHMGTAVTQFRGTDPMSRHRIPKLRYSYRLTSAVSILNQDILPQYLEAVENLEDLQFIVYSAAIAVVKTLRLRTRPQGEDGTRPNAQKPVWMRRLESRIATLRSKVGRLTQYKQGNRSTRLVRHVAEIVRPAELRDLREVDITEILDTHVQRLSALAKRLRRYGECSKRKEQNRMFNINEREFYNRIRNDKVDFGEGLPEIGDVTQFWANLWENPTEHNGDGMWLAEEERQCDGIGDMTAVVVTAQDIREATRYTRNWAAPGPDFVHNFWYKKLTTIHGRMAECFNTVLGDPTQLPEFITRGVTFLLPKDQHTADPAKYRPITCLSSLYKVLSSVIARRVQAHCDANNVMTEEQKGCRRNTQGCKDQVIVDAVIVGQATQKQRNLSMAYIDYKNAYDSVPHSYLLKVLQLYKVDRNVIRLMQHAMGMWSTSLHITDGTAVLRSRTLSIRRGIFQGDTFSPLWFCLAMNPLSKALNQCNYGYQLKSGERSTRVTHTFYMDDLKLFAESVQRLHQLLQLVTTFSNDIRMEFGIDKCRSIHLRRGQVMDASCFHVNEQEEIRNMVEGETYKYLGFLQLRGIRHTMIKKKLQEKFLSRVNCILKSFLSAGNKVKAINTFAVPLLTYSFGVVKWTKTDLEAIERAVRVAFTKHRMRHPKSSIERVTLPRAAGGRGVTDIQALCVSQIQQLRAYFVESQNRHEIYRTVCEADHGFSALHLAQEDYQLNCDIKTVDEMIAMWKQKELHGTHPHQLELEHIDKVASNTWLVRGDLFSETEGFMVAIQDRVIATKNYRHYILHEDVEDRCRKCNSVGETIEHVVAGCSVLAGSAYLDRHNEVAKIVHQQLALKHNLVDRFVPYYKYLPDPVLENSCIKLYWDREIITDVLIRANRPDIVVYDKRMKRVTLIDIAVPLDHNVQSTFSNKIAKYHDLAEELKQMWHLEDVRIVPVVLSATGIVPKSLLRSLDELELKKDLHSIQKAVILGTCSIVRRFLNHHN

SEQ ID NO: 9925 - protein, 1124 aa, Aedes albopictus
MWTREMNMYVIRCYFVCTRMETDMSGRSGMLEMFNERFPRFANQLDLNKLYTRQRAIMSHNMLTAAEVECIKLEAQRELGEERTRSSDTSRRSSDGLDASNASESRDTTAPTAPGPTADMQRQQLRDELALHMATAVTQFRGTDPMSRHRIPKLRNSYRLTSAVSILNQDILPQYLEAVQHLEDLQFTVYSAAVAVVKTLGLRTRPQGDGEGRTRPSTQKPAWMRRLENRIATLRTKIGRLTQYKQGNRSTRLVRYVAEIVKPAELRDLTEVNITEILDTHVQRLSALAKRLRRYGECSKRKEQNRMFNINEREFYNCIRNDKPDYGEGLPEIGEVTQFWANLWENPVQHSDDGMWLAEEERQCNGVGDMTAVVVTAQDVREATRYTRNWAAPGPDFVHNFWYKKLTTIHGRMAECFNMVLEDPTQLPEFITRGITYLLPKDQNTADPAKYRPITCLSSLYKVLSSVIARRIQTHCDANNVMTEEQKGCRKNTQGCKDQVIIDAVIVGQATDKQRNLSMAYIDYKKAYDSVPHSYLLKVLQLYKVDGNVIRLMQHAMGMWSTSLQITDGTAVVRSRTLSIRRGIFQGDTFSPLWFCLAMNPLSRALNQCNYGYQLKSGGRSTRITHTFFMDDLKLFAESVQRLHQLLQLVTVFSNDIRMEFGIDKCRSVHLRRGQVVDASCFRVNEQEEIRNMVEGEVYKYLGFLQLRGIRHTAIKKELQDKFLHRVNCVLRSFLSADNKVKAINTFAVPLMTYSFGVVKWTKTDLEALERAVRVAFTKHRMRHPKSSIERVTLPRAVGGRGVTDIQALCVSQIQQLRAYFVESQNRHEMYRTVCEADHGYSALHLAQEDYQLNCDIKTIDEMIVTWKQKELHGTHPHQLELEHIDKAASNAWLVRGDLFSETEGFMVAIQDRVIATKNYRRYILHEDVEDRCRKCNSVGETIEHVVAGCSVLAGSAYLERHNEVAKIVHQQLALKHNLVDRFVPYYKYQPDPVLENSCIKLYWDREIITDVLIRANRPDIVVFDKRMKRVTLIDIAVPLDHNVQSTFSGKITKYHDLAEELKQMWHLEDVRIVPVVLSATGIVPKSLLRSLDELELKKDLNSILKAVILGTCSIVRRFLNHHN

SEQ ID NO: 9926 - protein, 903 aa, Aedes albopictus
MRRLENRIATLRTKIGRLTQYKQGNRSTRLVRYVAEIVKPAELRDLTEVNITEILDTHVQRLSALAKRLRRYGECSKRKKQNRMFNINEREFYNCIRNDKPDYGEGLPEIGEVTQFWANLWENPVQHSDDGMWLAEEERQCNGVGDMTAVVVIAQDVREATRYTRNWAAPGPDFVHNFWYKKLTTIHGRMAECFNMVLEDPTQLPEFITRGITYLLPKDQNTADPAKYRPITCLSSLYKVLSSVIARRIQTHCDANNVMTEEQKGCRKNTQGCKDQVIIDAVIVGQATDKQRNLSMAYIDYKKAYDSVPHSYLLKVLQLYKVDGNVIRLMQHAMGMWSTSLQITDGTAVLRSRTLSIRRGIFQGDTFSPLWFCLAMNPLSRALNQCNYGYQLKSGGRSTRITHTFFMDDLKLFAESVQRLHQLLQLVTVFSNDIRMEFGIDKCRSVHLRRGQVVDASCFRVNEQEEIRNMVEGEVYKYLGFLQLRGIRHTAIKKELQDKFLHRVNCVLRSFLSAGNKVKAINTFAVPLLTYSFGVVKWTKTDLEALERAVRVAFTKHRMHHPKSSIERVTLPRAVGGRGVTDIQALCVSQIQQLRAYFVESQNRHEMYRTVCEADHGYSALHLAQEDYQLNCDIKTVGEMIVTWKQKELHGTHPHQLELEHIDKAASNAWLVRGDLFSETEGFMVAIQDRVIATKNYRRYILHEDVEERCRKCNSVGETIEHVVAGCSVLAGSAYLDRHNEVAKIVHQQLALKHNLVDRFVPYYKYQPDPVLENSCIKLYWDREIITDVLIRANRPDIVVFDKRMKRVTLIDIAVPLGLDHNVQSTFSGKITKYHDLAEELKQMWHLEDVRIVPVVLSATGVVPKSLLRSLDELELKKDLNSILKAVILGTCSIVRRFLNHHN

SEQ ID NO: 9927 - protein, 1122 aa, Aedes aegypti
MWTREMNMYVIRCYYVCTRMETDMSGRSGMLEMFNERFPRFARQLDLNKLYTRQRAIMSHNMLTAAEVEYIKLEVQREIGEEGTRSSDTSRRSSVGLDAPITSESRDSPAPTAPGPTADMQRQQLRDELALHMGTAVTQFRGTDPMSRHRIPKLRYSYRLTSAVSILNQDILPQYLEAVENLEDLQFIVYSAAIAVVKTLGLRTRPQGEVGTRPNAQKPVWMRRLESRIATLRSKVGRLTQYKQGNRSTRLVRHVAEFVRPAELRDLREVDITEILDTHVQRLSALAKRLRRYGECSKRKEHNRMFNINEREFYNRIRNDKVNFGEGLPEIGDVTQFWANLWENPTEHNDDGMWLAEEGRQCDGIGDMTAVVVTAQDIREATRYTRNWAAPGPDFVHNFWYKKLTTIHGRMAECFNTVLGDNTQLPEFITRGVTFLLPKDQHTADPAKYRPITCLSSLYKVLSSVIARRVQAHCDANNVMIEEQKGCRRNTQGCKDQVIVDAVIVGQATQKQRNLSMAYIDYKKAYDSVPHSYLLKVLQLYKVDGNVIRLMQHAMGMWSTSLHITDGTAVLRSRTLSIRRGIFQGDTFSPLWFCLAMNPLSKALNQCNYGYQLKSGERSTRVTHTFYMDDLKLFAESVQRLHQLLQLVTTFSNDIRMEFGIDKCRSIHLRRGQVMDASCFRVNEQEEIRNMVEGETYKYLGFLQLRGIRHTMIKKELQEKFLSRVNCILKSFLSAGNKVKAINTFAVPLLTYSFGVVKWTKTDLEAIERAVRVAFTKHRMRHPKSSIERVTLPRAAGGRGVTDIQALCVSQIQQLRAYFVESQNRHEIYRTVCEADHGFSALHLAQEDYQLNCDIKTVDEMIAMWKQKELHGTHPHQLELEHIDKVASNTWLVRGDLFSETEGFMVAIQDRVIATKNYRHYILHEDVEDRCRKCNSVGETIEHVVAGCSVLAGSAYLDRHNEVAKSVHQQLALKHNLVDRFVPYYKYLPDPVLENSCIKLYWDREIITDVLIRANRPDIVVYDKRMKRVTLIDIAVPLDHNIQSTFSNKIAKYHDLAEELKQMWHLEDVRIVPVVLSVTGIVPKSLLRSLDELKLKKDLHSIQKAVILGTCSIVRRFLNHHN

SEQ ID NO: 9928 - protein, 1095 aa, Aedes albopictus
MLEMFNERFPRFANQLDLNKLYTRQRAIMSHNMLTAAEVECIKLEAQRELGEERTRSSDTSRRSSDGLDASNASESRDTTAPTAPGPTADMQRQQLRDELALHMATAVTQFRGTDPMSRHRIPKLRNSYRLTSAVSILNQDILPQYLEAVQHLEDLQFTVYSAAVAVVKTLGLRTRPQGDGEGRTRPSTQKPAWMRRLENRIATLRTKIGRLTQYKQGNRSTRLVRYVAEIVKPAELRDLTEVNITEILDTHVQRLSALAKRLRRYGECSKRKEQNRMFNINEREFYNCIRNDKPDYGEGLPEIGEVTQFWANLWENPVQHSDDGMWLAEEERQCNGVGDMTAVVVTAQDIREATRYTRNWAAPGPDFVHNFWYKKLTTIHGRMAECFNMVLEDPTQLPEFITRGITYLLPKDQNTADPAKYRPITCLSSLYKVLSSVIARRIQTHCDANNVMTEEQKGCRKNTQGCKDQVIIDAVIVGQATDKQRNLSMAYIDYKKAYDSVPHSYLLKVLQLYKVDGNVIRLMQHAMGMWSTSLQITDGTAVLRSRTLSIRRGIFQGDTFSPLWFCLAMNPLSRALNQCNYGYQLKSGGKSTRITHTFFMDDLKLFAESVQRLHQLLQLVTVFSNDIRMEFGIDKCRSVHLRRGQVVDASCFRVNEQEEIRNMVEGEVYKYLGFLQLRGIRHTAIKKELQDKFLHRVNCVLRSFLSAGNKVKAINTFAVPLLTYSFGVVKWTKTDLEALERAVRVAFTKHRMRHPKSSIERVTLPRAVGGRGVTDIQALCVSQIQQLRAYFVESQNRHEMYRTVCEADHGYSALHLAQEDYQLNCDIKTVDEMIVTWKQKELHGTHPHQLELEHIDKAASNAWLVRGDLFSETEGFMVAIQDRVIATKNYRRYILHEDVEDRCRKCNSVGETIEHVIAGCSVLAGSAYLDRHNEVALIVHQQLALKHNLVDRFVPYYKYQPDPVLENSCIKLYWDREIITDVLIRANRPDIVVFDKRMKRVTLIDIAVPLDHNVQSTFSGKITKYHDLAEELKQMWHLEDVRIVPVVLSATGVVPKSLLRSLDELELKKDLNSILKAVILGTCSIVRRFLNHHN

SEQ ID NO: 9929 - protein, 1002 aa, Aedes aegypti
MQRQQLRDELALHMGTAVTQFRGTDPVSRHRIPKLRYSYRLTSAVNILNQDILPQYLEAVENLEDLQFIVYSAAIAVVKTLGLRTRPQGEDGTRPNAQKPVWMRRLESRIATLRSKVGRLTQYKQGNRSTRLVRHVAEIVRPAELRDLREVDITEILDTHVQRLSALAKRLRRYGECSKRKEQNRMFNINEREFYNRIRNDKVDFGEGLPEIGDVTQFWANLWENPTEHNGDGMWLAEEERQCDGIGDMTAVVVTAQDIREATRYTRNWAAPGPDFVHNFWYKKLTTIHGRMAECFNTVLGDPTQLPEFITRGVTFLLPKDQHTADPAKYRPITCLSSLYKVLSSVIARRVQVHCDANNVMTEEQKGCRRNTQGCKDQVIVDAVIVGQATQKQRNLSMAYIDYKKAYDSVPHSYLLKVLQLYKVDGNVIRLMQHAMGMWSTSLHITDGTAVLRSRTLSIRRGIFQGDTFSPLWFCLAMNPLSKALNQCNYGYQLKSGERSTRVTHTFYMDDLKLFAESVQRLHQLLQLVTTFSNDIRMEFGIDKCRSIHLRRGQVMDASCFRVNEQEEIRNMVEGETYKYLGFLQLRGIRHTMIKKELQEKFLSRVNCILKSFLSAGNKVKAINTFAVPLLTYSFGVVKWTKTDLEAIERAVRVAFTKHRMRHPKSSIERVTLPREAGGRGVTDIQALCVSQIQQLRAYFVESQNRQIYRTVCEADHGFSALHLAQEDYQLNCDIKTVDGMIAMWKQKELHGTHPHQLELEHIDKVASNTWLVRGDLFSETEGFMVAIQDRVIATKNYRHYILHEDVEDRCRKCNSVGETIEHVVAGCSVLAGSAYLDRHNEVAKIVHQQLALKHNLVDRFVPYYKYLPDPVLENSCIKLYWDREIITDVLIRANRPDIVVYDKRMKRVTLIDIAVPLDHNVQSTFSNKIAKYHDLAEELKQMWHLEDVRIVPVVLSATGIVPKSLLRSLDELELKKDLHSIQKAVILGTCSIVRRFLNHHN

SEQ ID NO: 9930 - protein, 901 aa, Aedes aegypti
MRRLESRIATLRSKVGRLTQYKQGNRSTRLVRHVAEIVRPAELRDLREVDITEILDTHVQRLSALAKRLRRYGECSKRKEQNRMFNINEREFYNRIRNDKVDFGEGLPEIGDVTQFWANLWENPTEHNDDGMWLAEEGRQCDGIGDMTAVVVTAQDIREATRYTRNWAAPGPDFVHNFWYKKLTTIHGRMAECFNTVLGDPTQLPEFITRGVTFLLPKDQHTADPAKYRPITCLSSLYKVLSSVIARRVQAHCDANNVMTEEQKGCRRNTQGCKDQVIVDAVIVGQATQKQRNLSMAYIDYKKAYDSVPHSYLLKVLQLYKVDGNVIRLMQHAMGMWSTSLHITDGTAVLRSRTLSIRRGIFQGDTFSPLWFCLAMNPLSKALNQCNYDYQLKSGERSTRVTHTFYMDDLKLFAESVQRLHQLLQLVTTFSNDIRMEFGIDKCRSIHLRRGQVMDASCFRVNEQEEIRNMVEGETYKYLGFLQLRGIRHTMIKKELQEKFLSRVNCILKSFLSAGNKVKAINTFAVPLLTYSFGVVKWTKTDLEAIERAVRVAFTKHRMRHPKSSIERVTLPRAAGGRGVTDIQALCVSQIQQLRAYFVESQNRHEIYRTVCEADHGFSALHLAQEDYQLNCDIKTVDEMIAMWKQKELHGTHPHQLELEHIDKVASNTWLVRGDLFSETEGFMVAIQDRVIATKNYRHYILHEDVEDRCRKCNSVGETIEHVVAGCSVLAGSAYLDRHNEVAKIVHQQLALKHNLVDRFVPYYKYLPDPVLENSCIKLYWDREIITDVLIRANRPDIVVYDKRMKRVTLIDIAVPLDHNVQSTFSNKIAKYHDLAEELKQMWHLEDVRIVPVVLSATGIVPKSLLRSLDELELKKDLHSIQKAVILGTCSIVRRFLNHHN

SEQ ID NO: 9931 - protein, 1221 aa, Aedes aegypti
MKANPAMETRSMRNRRMRSPEEGAPTGAGPGTGDRASGQRLEEDNVQERPSSQRAQPVPRTRNRNGSSRNHQGHAAPTDVAVADRRQSLTLAGGRRQRIMWTREMNMYVIRCYYVCTRMETDMSGRLGMLEMFNERFPRFARQLDLNKLYTRQRAIMSHNMLTAAEVEYIKLEVQREIGEEGTTSSDTSRRSSVGLDAPITSESRDSLAPTAPGPTADMQRQQLRDELALHMGTAVTQFRGTDPVSRHRIPKLRYSYRLTSAVNILNQDILPQYLEAVENLEDLQFIVYSAAIAVVKTLGLRTRPQGEDGTRPNAQKPVWMRRLESRIATLRSKVGRLTQYKQGNRSTRLVRHVAEIVRPAELRDLREVDITEILDTHVQRLSALAKRLRRYGECSKRKEQNRMFNINEREFYNRIRNDKVDFGEGLPEIGDVTQFWANLWENPTEHNGDGMWLAEEERQCDGIGDMTAVVVTAQDIREATRYTRNWAAPGPDFVHNFWYKKLTTIHGRMAECFNTVLGDPTQLPEFITRGVTFLLPKDQHTADPAKYRPITCLSSLYKVLSSVIARRVQVHCDANNVMTEEQKGCRRNTQGCKDQVIVDAVIVGQATQKQRNLSMAYIDYKKAYDSVPHSYLLKVLQLYKVDGNVIRLMQHAMGMWSTSLHITDGTAVLRSRTLSIRRGIFQGDTFSPLWFCLAMNPLSKALNQCNYGYQLKSGERSTRVTHTFYMDDLKLFAESVQRLHQLLQLVTTFSNDIRMEFGIDKCRSIHLRRGQVMDASCFRVNEQEEIRNMVEGETYKYLGFLQLRGIRHTMIKKELQEKFLSRVNCILKSFLSAGNKVKAINTFAVPLLTYSFGVVKWTKTDLEAIERAVRVAFTKHRMRHPKSSIERVTLPREAGGRGVTDIQALCVSQIQQLRAYFVESQNRHEIYRTVCEADHGFSALHLAQEDYQLNCDIKTVDEMIAMWKQKELHGTHPHQLELEHIDKVASKTWLVRGDLFSETEGFMVAIQDRVIATKNYRHYILHENVEDRCRKCNSVGETIEHVVAGCSVLAGSAYLDRHNEVAKIVHQQLALKHNLVDRFVPYYKYLPDPVLENSCIKLYWDREIITDVLIRANRPDIVVYDKRMKRVTLIDIAVPLDHNVQSTFSNKIAKYHDLAEELKQMWHLEDVRIVPVVLSATGIVPKSLLRSLDELELKKDLHSIQKAVILGTCSIVRRFLNHHN

SEQ ID NO: 9932 - protein, 1221 aa, Aedes aegypti
MKANPAMETRSMRNRRMRSPEEGAPTGAGPGTGDRASGQRLEEDNVQERPSSQRAQPVPRTRNRNGSSRNHQGHAAPTDVAVADRRQSLTLAGGRRQRIMWTREMNMYVIRCYYVCTRMETDMSGRSGMLEMFNERFPRFARQLDLNKLYTRQRAIMSHNMLTAAEVEYIKLEVQREIGEEGTTSSDTSRRSSVGLDAPITSESRDSPAPTAPGPTADMQRQQLRDELALHMGTAVTQFRGTDPMSRHRIPKLRYSYRLTSAVNILNQDILPQYLEAVENLEDLQFIVYSAAIAVVKTLGLRTRPQEEDGTRPNAQKPVWMRRLESRIATLRSKVGRLTQYKQGNRSTRLVHHVAEIVRPAELRDLREVDITEILDTHVQRLSALAKRLRRYGECSKRKEQNRMFNINEREFYNRIRNDKVDFGEGIPEIGDVTQFWANLWENPTEHNGDGMWLAEEERQCDGIGDMTAVVVTAQDIREATRYTRNWAAPGPDFVHNFWYKKLTTIHGQMAECFNTVLGDPTQLPEFITRGVTFLLPKDQHTADPAKYRPITCLSSLYKVLSSVIARRVQVHCDANNVMTEEQKGCRRNTQGCKDQVIVDAVIVGQATQKQRNLSMAYIDYKKAYDSVPHSYLLKVLQLYKVDGNVIRLMQHAMGMWSTSLHITDGTAVLRSRTLSIRRGIFQGDTFSPLWFCLAMNPLSKALNQCNYGYQLKSGERSTRVTHTFYMDDLKLFAESVQRLHQLLQLVTTFSNDIRMEFGVDKCRSIHLHRGQVMDASCFRVNEQEEIRNMVEGETYKYLGFLQLRGIRHTMIKKELQEKFLSRVNCILKSFLSAGNKVKAINTFAVPLLTYSFGVVKWTKTDLEAIERAVRVAFTKHRMRHPKSSIERVTLPRAAGGRGVTDIQALCVSQIQQLRAYFVESQNRHEIYRTVCEADHGFSALHLAQEDYQLNCDIKTVDEMIAMWKQKELHGTHPHQLELEHIDKVASNTWLVRGDLFSETEGFMVAIQDRVIATKNYRHYILHEDVEDRCRKCNSVGETIEHVVAGCSVLAGSAYLDRHNEVAKIVHQQLALKHNLVDRFVPYYKYLPDPVLENSCIKLYWDREIITDVLIRANRPDIVVYDKRMKRVTLIDIAVPLDHNVQSTFSNKIAKYHDLAEELKQMWHLEDVRIVPVVLSATGIVPKSLLRSLDELELKKDLHSIQKAVILGTCSIVRRFLNHHN

SEQ ID NO: 9933 - protein, 1221 aa, Aedes aegypti
MKANPAMETRSMRNRRMRSPEEGAPTGAGPGTGDRASGQRLEEDNVQERPSSQRAQPVPRTRNRNGSSRNHQGHAAPTDVAVADRRQSLTLAGGRRQRIMWTREMNMYVIRCYYVCTRMETDMSGRSGMLEMFNERFPRFARQLDLNKLYTRHRAIMSHNMLTAAEVEYIKLEVQREIGEEGTTSSDTSRRSSVGLDAPITSESRDSPAPTAPGPTADMQRQQLRDELALHMGTAVTQFRGTDPMSRHRIPKLRYSYRLTSAVNILNQDILPQYLEAVENLEDLQFIVYSAAIAVVKTLGLRTRPQGEDGTRPNAQKPVWMRRLESRIATLRSKVGRLTQYKQGNRSTRLVRHVAEIVRPAELRDLREVDITEILDTHVQRLSALAKRLRRYGECSKRKEQNRMFNINEREFYNRIRNDKVDFGEGLPEIGDVTQFWANLWENPTEHNGDGMWLAEEERQCDGIGDMTAVVVTAQDIREATRYTRNWAAPGPDFVHNFWYKKLTTIHGRMAECFNTVLGDTTQLPEFITRGVTFLLPKDQHTADPAKYRPITCLSSLYKVLSSVIARRVQAHCDANNVMTEEQKGCRRNTQGCKDQVIVDAVIVGQATQKQRNLSMAYIDYKKAYDSVPHSYLLKVLQLYKVDGNVIRLMQHAMGMWSTSLHITDGTAVLRSRTLSIRRGIFQGDTFSPLWFCLAMNPLSKALNQCNYGYQLKSGERSTRVTHTFYMDDLKLFAESVQKLHQLLQLVTTFSNDIRMEFGIDKCRSIHLRRGQVMDASCFRVNEQEEIRNMVEGETYKYLGFLQLRGIRHTMIKKELQEKFLSRVNCILKSFLSAGNKVKAINTFAVPLLTYSFGVVKWTKTDLEAIERAVRVAFTKHRMRHPKSSIERVTLPRAAGGRGVTDIQALCVSQIQQLRAYFVESQNRHEIYRTVCEADHGFSALHLAQEDYQLNCDIKTVDEMIAMWKQKELHGTHPHQLELEHIDKVASNTWLVRGDLFSETEGFMVAIQDRVIATKNYRHYILHEDVEDRCRKCNSVGETIEHVVAGCSVLAGSAYLDRHNEVAKIVHQQLALKHNLVDRFVPYYKYLPDPVLENSCIKLYWDREIITDVLIRANRPDIVVYDKRMKRVTLIDIAVPLDHNVQSTFSNKIAKYHDLAEELKQMWHLEDVRIVPVVLSATGIVPKSLLRSLDELELKKDLHSIQKAVILGTCSIVRRFLNHHN

SEQ ID NO: 9934 - protein, 906 aa, Aedes aegypti
MRRLESRIATLRSMVGRLTQYKQGNRSTRLVRHVAEIVRPAELRDLREVDITEILDTHVQRLSALAKRLRRYGECSKRKEQNRMFNINEREFYNRIRNDKVDFGEGLPEIGDVTQFWANLWENPTEHDGDGMWLAEEERQCDGIGDMTTVVVTAQDIREATRYTRNWAAPGPDFVHNFWYKKLTTIHGRMAECFNTVLGDPTQLPEFITRGVTFLLPKDQHTADPAKYRPITCLSSLYKVLSSVIARRVQAHCDANNVMTEEQKGCRRNTQGCKDQVIVDAVIVGQATQKQRNLSMAYIDYKKAYDSVPHSYLLKVLQLYKVDGNVIRLMQHAMGMWSTSLHITDGTAVLRSRTLSIRRGIFQGDTFSPLWFCLAMNPLSKALNQCNYGYQLKSGERSTRVTHTFYMDDLKLFAESVQRLHQLLQLVTTFSNDIRMEFGIDKCRSIHLRRGQVMDASCFRVNEQEEIRNMVEGETYKYLGFLQLRGIRHTMIKKELQEKFLSRVNCILKSFLSAGNKVKAINTFAVPLLTYSFGVVKWTKADLEAIERAVRVAFTKHRMRHPKSSIERVTLPRAAGGRGVTDIQALCVSQIQQLRAYFVESQNRHEIYRTVCEADHGFSALHLAQEDYQLNCDIKTVDEMIAMWKQKELHGTHPHQLELEHIDKVASNTWLVRGDLFSETEGFMVVIQDRVIATKSYRHYILHEDVEDRCRKCNSVGETIEHVVAGCSVLAGSAYLDRHNEVAKIVHQQLALKHNLVDRFVPYYKYLPDPVLENSCIKLYWDSEIITDVLIRANRPDIVVYDKRMKRVTLIDIAVPLDHNVQSTFSNKIAKYHDLAEELKQMWHLEDVRIVPVVLSATGIVPKSLLRSLDELELKKDLHSIQKAVILGTCSIVRRFLNHQLIQQTH

SEQ ID NO: 9935 - protein, 1217 aa, Aedes albopictus
METRARRNRRMRSPEEGAPTGAGPGTGDRASGQRLEEEVVQERPSSQRAQPVPRTQSRNGSNSNHQGHAAPANVAVADRRQSLTLAGGRRQRIMWTREMNMYVIRCYFVCTRMETDMSGRSGMLEMFNERFPRFANQLDLNKLYTRQRAIMSHNMLTAAEVECIKLEAQRELGEERTRSSDTSRRSSDGLDASNASESRDTNAPTAPGPTADMQRQQLRDELALHMATAVTQFRGTDPMSRHRIPKLRNSYRLTSAVSILNQDILPQYLEAVQHLEDLQFTVYSAAVAVVKTLGLRTRPQGDGEGRTRPSTQKPAWMRRLENRIATLRTKIGRLTQYKQGNRSTRLVRYVAEIVKPAELRDLTEVNITEILDTHVQRLSALAKRLRRYGECSKRKEQNRMFNINEREFYNCIRNDKPDYGEGLPEIGEVTQFWANLWENPVQHSDDGMWLAEEERQCNGVGDMTAVVVTAQDVREATRYTRNWAAPGPDFVHNFWYKKLTTIHGRMAECFNMVLEDPTQLPEFITRGITYLLPKDQNTADPAKYRPITCLSSLYKVLSSVIARRIQTHCDANNVMTEEQKGCRKNTQGCKDQVIIDAVIVGQATDKQRNLSMAYIDYKKAYDSVPHSYLLKVLQLYKVDGNVIRLMQHAMGMWSTSLQITDGTAVLRSRTLSIRRGIFQGDTFSPLWFCLAMNPLSRALNQCNYGYQLKSGGRSTRITHTFFMDDLKLFAESVQRLHQLLQLVTVFSNDIRMEFGIDKCRSVHLRRGQVVDASCFRVNEQEEIRNMVEGEVYKYLGFLQLRGIRHTAIKKELQDKFLHRVNCVLRSFLSAGNKVKAINTFAVPLLTYSFGVVKWTKTDLEALERAVRVAFTKHRMRHPKSSIERVTLPRAVGGRGVTDIQALCVSQIQQLRAYFVESQNRHEMYRTVCEADHGYSALHLAQEDYQLNCDIKTVDEMIVTWKQKELHGTHPHQLELEHIDKAASNAWLVRGDLFSETEGFMVAIQDRVIATKNYRRYILHEDVEDRCRKCNSVGETIEHVVAGCSVLAGSAYLDRHNEVAKIVHQQLALKHNLVDRFVPYYKYQPDPVLENSCIKLYWDREIITDVLIRANRPDIVVFDKRMKRVTLIDIAVPLDHNVQSTFSGKITKYHDLAEELKQMWHLEDVRIVPVVLSATGVVPKSLLRSLDELELKKDLNSILKAVILGTCSIVRRFLNHHN

SEQ ID NO: 9936 - protein, 1124 aa, Aedes aegypti
MKANPAMETRSMRNRRMRSPEEGAPTGAGPGTGDRASGQRLEEDNVQERPSSQRAPPVPRTRNRNGSSRNHQGHAAPTDVAVADRRQSLTLAGGRRQRIMWTREMNMYVIRCYYVCTRMETDMSGRSGMLEMFNERFPRFARQLDLNKLYTRQRAIMSHNMLTAAEVEYIKLEVQREIGEEGTRSSDTSRRSSVGLDAPITSESRDSPAPTAPGPTADMQRQQLRDELALHMGPAVTQFHGTDPMSRHRIPKLRYSYRLTSAVSILNQDILPQYLEAVENLEDLQFIVYSAAIAVVKTLGLRTRPQGEDGTRSNAQKPVWMRRLESRIATLRSKVGRLTQYKQGNRSTRLVRHVAEIVRPAELRDLREVDITEILDTHVQRLSALAKRLRRYGECSKRKEQNRMFNINEREFYNRIRNDKVDFGEGLPEIGDVTQFWANLWENPTEHNGDGMWLAEEERQCDGIGDMTAVVVTAQDIREATRYTRNWAAPGPDFVHNFWYKKLTTIHGRMAECFNTVLGDPTQLPEFITRGVTFLLPKDQHTADPAKYRPITCLSSLYKVLSSVIARRVQAHCDANNVMTEEQKGCRRNTQGCKDQVIVDAVIVGQATQKQRNLSMAYIDYKKAYDSVPHSYLLKVLQLYKVDRNVIRLMQHAMGMWSTSLHITDGTAVLRSRTLSIRRGIFQGDTFSPLWFCLAMNPLSKALNQCNYGYQLKSGERSTRVTHTFYMDDLKLFAESVQRLHQLLQLVTTFSNDIWMEFGIDKCRSIHLRRGQVMDASCFRVNEQEKIRNMVEGETYKYLGFLQLKGIRHTMIKKELQEKFLSRVNCILKSFLSAGNKMKAINTFAVPLLTYSFGVVKWTKTDLEAIERAVRVAFTKHRMRHPKSSIERVTLPRAEGGRGVTDIQALCVSQIQQLRAYFVESQNRHEIYRTVCETDHGFSALHLAQEDYYLNCDIKTVDEMIAMWKQKELHGTHPHQLELEHIDKVASNTWLVRGDLFSETEGFMVAIQDRVIATKNYWHYILHEDVEDRCRKCNSVGETIEHVVAGCSVLAGSAYLDRHNEVAKIVHQQLALKHNLVDRFVPYYKYLPDPVLENSCIKLYWDREIITDVLIRANRPDIGLTLLT

SEQ ID NO: 9937 - protein, 1124 aa, Aedes albopictus
MWTREMNMYVIRCYFVCTRMETDMSGRSGMLEMFNERFPRFANQLDLNKLYTRQRAIMSHNMLTAAEVECIKLEAQRELGEERTRSSDTSRRSSDGLDASNASESRDTTAPTAPGPTADMQRQQLRDELALHMATAVTQFRGTDPMSRHRIPKLRNSYRLTSAVSILNQDILPQYLEAVQHLEDLQFTVYSAAVAVVKTLGLRTRPQGDGEGRTRPSTQKPAWMRRLENRIATLRTKIGRLTQYKQGNRSTRLVRYVAEIVKPAELRDLTEVNITEILDTHVQRLSALAKRLRRYGECSKRKEQNRMFNINEREFYNCIRNDKPDYGEGLPEIGEVTQFWANLWENPVQHSDDGMWLAEEERQCNGVGDMTAVVVTAQDVREATRYTRNWAAPGPDFVHNFWYKKLTTIHGRMAECFNMVLEDPTQLPEFITRGITYLLPKDQNTADPTKYRPITCLSSLYKVLSSVIARRIQTHCDANNVMTEEQKGCRKNTQGCKDQVIIDAVIVGQATDKQRNLSMAYIDYKKAYDSVPHSYLLKVLQLYKVDGNVIRLMQHAMGMWSTSLQITDGTAVVRSRTLSIRRGIFQGDTFSPLWFCLAMNPLSRALNQCNYGYQLKSGGRSTRITHTFFMDDLKLFAESVQRLHQLLQLVTVFSNDIRMEFGIDKCRSVHLRRGQVVDASCFRVNEQEEIRNMVEGEVYKYLGFLQLRGIRHTAIKKELQDKFLHRVNCVLRSFLSAGNKVKAINTFAVPLLTYSFGVVKWTKTDLEALERAVRVAFTKHHMRHPKSSIERVTLPRAVGGRGVTDIQALCVSQIQQLRAYFVESQNRHEMYRTVCEADHGYSALHLAQEDYQLNCDIKTVDEMIVTWKQKELHGTHPHQLELEHIDKAASNAWLVRGDLFSETEGFMVAIQDRIIATKNYRRYILHEDVEDRCRKCNSVGETIEHVVAGCSVLAGSANLDRHNEVAKIVHQQLALKHNLVDRFVPYYKYQPDPVLENSCIKLYWDREIITDVLIRANRPDIVVFDKRMKRVTLIDIAVPLDHNVQSTFSGKITKYHDLAEELKQMWHLEDVRIVPVVLSATGIVPKSLLRSLDELELKKDLNSILKAVILGTCSIVRRFLNHHN

SEQ ID NO: 9938 - protein, 1210 aa, Aedes albopictus
METRARRNRRMRSPEEGAPTGAGPGTGDRASGQRLEEEVVQERPSSQRAQPVPRTQSRNGSNSNHQGHAAPANVAVADRRQSLTLAGGRRQRIMWTREMNMYVIRCYFVCTRMETDMSGRSGMLEMFNERFPRFANQLDLNKLYTRQRAIMSHNMLTAAEVECIKLEAQRELGEERTRSSDTSRRSSDGLDASNASESRDTTAPTAPGPTADMQRQQLRDELALHMATAVTQFRGTDPMSRHRIPKLRNSYRLTSAVSILNQDILPQYLEAVQHLEDLQFTVYSAAVAVVKTLGLRTRPQGDGEGRTRPSTQKPAWMRRLENRIATLRTKIGRLTQYKQGNRSTRLVRYVAEIVKPAELRDLTEVNITEILDTHVQRLSALAKRLRRYGECSKRKEQNRMFNINEREFYNCIRNDKPDYGEGLPEIGEVTQFWANLWENPVQHSGMWLAEEERQCNGVGDMTAVVVTAQDIREATRYTRNWAAPGPDFVHNFWYKKLTTIHGRMAECFNMVLEDPTQLPEFITRGITYLLPKDQNTADPAKYRPITCLSSLYKVLSSVIARRIQTHCDANNVMTEEQKGCRKNTQGCKDQVIIDAVIVGQATDKQRNLSMAYIDYKKAYDSVPHSYLLKVLQLYKVDGNVIRLMQHAMGMWSTSLQITDGTAVLRSRTLSIRRGIFQGDTFSPLWFCLAMNPLSRALNQCNYGYQLKSGGRSTRITHTFFMDDLKLFAESVQRLHQLLQLVTVFSNDIRMEFGIDKCRSVHLRRGQVVDASCFRVNEQEEIRNMVEGEVYKYLGFLQLRGIRHTAIKKELQDKFLHRVNCVLRSFLSAGNKVKAINTFAVPLLTYSFGVVKWTKTDLEALERAVRVAFTKHRMRHPKSSIERVTLPRAVGGRGVTDIQALCVSQIQQLRAYFVESQNRHEMYRTVCEADHGYSALHLAQEDYQLNCDIKTVDEMIVTWKQKELHGTHPHQLELEHIDKAASNAWLVRGDLFSETEGFMVAIQDRVIATKNYRRYILHEDVEDRCRKCNSVGETIEHVVAGCSVLAGSAYLDRHNEVAKIVHQQLALKHNLVDRFVPYYKYQPDPVLENSCIKLYWDREIITDVLIRANRPDKRMKRVTLIDIAVPLDHNVQSTFSGKITKYHDLAEELKQMWHLEDVRIVPVVLSATGVVPKSLLRSLDELELKKDLNSILKAVILGTCSIVRRFLNHHN

SEQ ID NO: 9939 - protein, 1217 aa, Aedes albopictus
METRARRNRRMRSPEEGAPTGAGPGTGDRASGQRLEEEVVQERPSSQRAQPVPRTQSRNGSNSNHQGHAAPANVAVADRRQSLTLAGGRRQRIMWTREMNMYVIRCYFVCTRMETDMSGRSGMLEMFNERFPRFANQLDLNKLYTRQRAIMSHNMLTAAEVECIKLEAQRELGEERTRSSDTSRRSSDGLDASNASESRDTTAPTAPGPTADMQRQQLRDELALHMATAVTQFRGTDPMSRHRIPKLRNSYRLTSAVSILNQDILPQYLEAVQHLEDLQFTVYSAAVAVVKTQGLRTRPQGDGEGRTRPSTQKPAWMRRLENRIATLRTKIGRLTQYKQGNRSTRLVRYVAEIVKPAELRDLTEVNITEILDTHVQRLSALAKRLRRYGECSKRKEQNRMFNINEREFYNCIRNDKPDYGEGLPEIGEVTQFWANLWENPVQHSDDGMWLAEEERQCNGVGDMTAVVVTAQDVREATRYTRNWAAPGPDFVHNFWYKKLTTIHGRMAECFNMVLEDPTQLPEFITRGITYLLPKDQNTADPAKYRPITCLSSLYKVLSSVIARRIQTHCDANNVMTEEQKGCRKNTQGCKDQVIIDAVIVGQATDKQRNLSMAYIDYKKAYDSVPHSYLLKVLQLYKVDGNVIRLMQHAMGMWSTSLQITDGTAVLRSRTLSIRRGIFQGDTFSPLWFCLAMNPLSRALNQCNYGYQLKSGGRSTRITHTFFMDDLKLFAESVQRLHQLLQLVTVFSNDIRMEFGIDKCRSVHLRRGQVVDASCFRVNEQEEIRNMVEGEVYKYLGFLQLRGIRHTAIKKELQDKFLHRVNCVLRSFLSAGNKVKAINTFAVPLLTYSFGVVKWTKTDLEALERAVRVAFTKHRMRHPKSSIERVTLPRAVGGRGVTDIQALCVSQIQQLRAYFVESQNRHEMYRTVCEADHGYSALHLAQEDYQLNCDIKTVDEMIVTWKQKELHGTHPHQLELEHIDKAASNAWLVRGDLFSETEGFMVAIQDRVIATKNYRRYILHEDVEDHCRKCNSVGETIEHVVAGCSVLAGSAYLDRHNEVAKIVHQQLALKHNLVDRFVPYYKYQPDPVLENSCIKLYWDREIITDVLIRANRPDIVVFDKRMKRVTLIDIAVPLDHNVQSTFSGKITKYHDLAEELKQMWHLEDVRIVPVVLSATGVVPKSLLRPLDELELKKDLNSILKAVILGTCSIVRRFLNHHN

SEQ ID NO: 9940 - protein, 901 aa, Aedes aegypti
MRRLESRIATLRSKVGRLTQYKQGNRSTRLVRHVAEIVRPAELRDLREVDITEILDTHVQRLSALAKRLRRYGECSKRKEQNRMFNINEREFYNRIRNDKVDFGEGLPEIGDVTQFWANLWENPTEHNDDGMWLAEKGRQCDGIGDMTAVVVTAQDIREATRYTRNWAAPGPDFVHNFWYKKLTTIHGRMAECFNTVLGDPTQLPEFITRGVTFLLPKDQHTADPAKYRPITCLSSLYKVLSSVIARRVQAHCDANNVMTEEQKGCRRNTQGCKDQVIVDAVIVGQATQKQRNLSMAYIDYKKAYDSVPHSYLLKVLQLYKVDGNVIRLMQHAMGMWSTSLHITDGTAVLRSRTLSIRRGIFQGDTFSPLWFCLAMNPLSKALNQCNYGYQLKSGERSTRVTHTFYMDDLKLFAESVQRLHQLLQLVTTFSNDIRMEFGIDKCRSIHLRRGQVMDASCFRVNEQEEIRNMVEGETYKYLGFLQLRGIRHTMIKKELQEKFLSRVNCILKSFLSAGNKVKAINTFAVPLLTYSFGVVKWTKTDLEAIERAVRVAFTKHRMRHPKSSIERVTLPRAAGGRGVTDIQALCVSQIQQLRAYFVESQNRHEIYRTVCEADHGFSALHLAQEDYQLNCDIKTVDEMIAMWKQKELHGTHPHQLELEHIDKVASNTWLVRGDLFSETEGFMVAIQDRVIATKNYRHYILHEDVEDRCRKCNSVGETIEHVVAGCSVLAGSAYLDRHNEVAKIVHQQLALKHNLVDRFVPYYKYLPDPVLENSCIKLYWDREIITDVLIRANRPDIVVYDKRMKRVTLIDIAVPLDHNVQSTFSNKIAKYHDLAEELKQMWHLEDVRIVPVVLSATGIVPKSLLRSLDELELKKDLHSIQKAVILGTCSIVRRFLNHHN

SEQ ID NO: 9941 - protein, 1217 aa, Aedes albopictus
METRARRNRRMRSPEEGAPTGAGPGTGDRASGQRLEEEVVQERPSSQRAQPVPRTQSRNGSNSNHQGHAAPANVAVADRRQSLTLAGGRRQRIMWTREMNMYVIRCYFVCTRMETDMSGRSGMLEMFNERFPRFANQLDLNKLYTRQRAIMSHNMLTAAEVECIKLEAQRELGEERTRSSDTSRRSSDGLDASNASESRDTTAPTAPGPTADMQRQQLRDELALHMATAVTQFRGTDPMSRHRIPKLRNSYRLTSAVSILNQDILPQYLEAVQHLEDLQFTVYSAAVAVVKTLGLRTRPQGDGEGRTRPSTQKPAWMRRLENRIATLRTKIGRLTQYKQGNRSTRLVRYVAEIVKPAELRDLTEVNITEILDTHVQRLSALAKRLRRYGECSKRKEQNRMFNINEREFYNCIRNDKPDYGEGLPEIGEVTQFWANLWENPVQHSDDGMWLAEEERQCNGVGDMTAVVVTAQDVREATRYTRNWAAPGPDFVHNFWYKKLTTIHGRMAECFNMVLEDPTQLPEFITRGITYLLPKDQNTADPAKYRPITCLSSLYKVLSSVIARRIQTHCDANNVMTEEQKGCRKNTQGCKDQVIIDAVIVGQATDKQRNLSMAYIDYKKAYDSVPHSYLLKVLQLYKVDGNVIRLMQHAMGMWSTSLQITDGTAVLRSRTLSIRRGIFQGDTFSPLWFCLAMNPLSRALNQCNYGYQLKSGGRSTRITHTFFMDDLKLFAESVQRLHQLLQLVTVFSNDIRMEFGIDKCRSVHLRRGQVVDASCFRVNEQEEIRNMVEGEVYKYLGFLQLRGIRHTAIKKELQDKFLHRVNCVLRSFLSAGNKVKAINTFAVPLLTYSFGVVKWTKTDLEALERAVRVAFTKHRMRHPKSSIERVTLPRAVGGRGVTDIQALCVSQIQQLRAYFVESQNRHEMYRTVCEADHGYSALHLAQEDYQLNCDIKTVDEMIVTWKQKELHGTHPHQLELEHIDKAASNAWLVRGDLFSETEGFMVAIQDRVIATKNYRRYILHEDVEDRCRKCNSVGETIEHVVAGCSVLAGSAYLDRHNEVAKIVHQQLALKHNLVDRFVPYYKYQPDPVLENSCIKLYWDREIITDVLIRANRPDIVVFDKRMKRVTLIDIAVPLDHNVQSTFSGKITKYHDLAEELKQMWHLEDVRIVPVVLSATGVVPKSLLRSLDELELKKDLNSILKAVILGTCSIVRRFLNHHN

SEQ ID NO: 9942 - protein, 1107 aa, Aedes albopictus
MVQICLERQYIIIIYIIIIIIIIKIIIIIIIIIIIIIIIIMSHNMLTAAEVECIKLEAQRELGEERTRSSDTSRRSSDGLDASNASESRDTTAPTAPGPTADMQRQQLRDELALHMATAVTQFRGTDPMSRHRIPKLRNSYRLTSAVSILNQDILPQYLEAVQHLEDLHFTVYSAAVAVVKTLGLRTRPQGDGEGRTRPSTQKPAWMRRLENRIATLRTKIGRLTQYKQGNRSTRLVRYVAEIVKPAELRDLTEVNITEILDTHVQRLSALAKRLRRYGECSKRKEQNRMFNINEREFYNCIRNDKPDYGEGLPEIGEVTQFWANLWENPVQHSDDGMWLAEEERQCNGVGDMTAVVVTAQDVREATRYTRNWAAPGPDFVHNFWYKKLTTIHGRMAECFNMVLEDPTQLPEFITRGITYLLPKDQNTADPAKYRPITCLSSLYKVLSSVIARRIQTHCDANNVMTEEQKGCRKNTQGCKDQVIIDAVIVGQATDKQRNLSMAYIDYKKAYDSVPHSYLLKVLQLYKVDGNIIRLMQHAMGMWSTSLQITDGTAVLRSRTLSIRRGIFQGDTFSPLWFCLAMNPLSRALNQCNYGYQLKSGGRSTRITHTFFMDDLKLFAESVQRLHQLLQLVTVFSNDIRMEFGIDKCRSVHLRRGQVVDASCFRVNEQEEIRNMVEGEVYKYLGFLQLRGIRHTAIKKELQDKFLHRVNCVLRSFLSAGNKVKAINTFAVPLLTYSFGVVKWTKTDLEALERAVRVAFTKHRMRHPKSSIERVTLPRAVGGRGVTDIQALCVSQIQQLRAYFVESQNRHEMYRTVCEADHGYSALHLAQEDYQLNCDIKTVDEMIVTWKQKELHGTHPHQLELEHIDKAASNAWLVRGDLFSETEGFMVAIQDRVIATKNYRRYILHEDVEDRCRKCNSVGETIEHVVAGCSVLAGSAYLDRHNEVAKIVHQQLALKHNLVDRFVPYYKYQPDPVLENSCIKLYWDREIITDVLIRANRPDIVVFDKRMKRVTLIDIAVPLDHNVQSTFSGKITKYHDLAEELKQMWHLQDVRIVPDVLSATGVVPKSLLRSLDELELKKDLNSILKAVILGTCSIVRRFLNHHN

SEQ ID NO: 9943 - protein, 1217 aa, Aedes albopictus
METRARRNRRMRSPEEGAPTGAGPGTGDRASGQRLEEEVVQERPSSQRAQPVPRTQSRNGSNSNHQGHAAPANVAVADRRQSLTLAGGRRQRIMWTREMNMYVIRCYFVCTRMETDMSGRSGMLEMFNERFPRFANQLDLNKLYTRQRAIMSHNMLTAAEVECIKLEAQRELGEERTRSSDTSRRSSDGLDASNASESRDTTAPTAPGPTADMQRQQLRDELALHMATAVTQFRGTDPMSRHRIPKLRNSYRLTSAVSILNQDILPQYLEAVQHLEELQFTVYSAAVAVVKTLGLRTRPQGDGEGRTRPSTQKPAWMRRLENRIATLRTKIGRLTQYKQGNRSTRLVRYVAEIVKPAELRDLTEVNITEILDTHVQRLSALAKRLRRYGECSKRKEQNRMFNINEREFYNCIRNDKPDYGEGLPEIGEVTQFWANLWENPVQHSDDGMWLAEEERQCNGVGDMTAVVVTAQDIREATRYTRNWAAPGPDFVHNFWYKKLTTIHGRMAECFNMVLEDPTQLPEFITRGITYLLPKDQNTADPAKYRPITCLSSLYKVLSSVIARRIQTHCDANNVMTEEQKGCRKNTQGCKDQVIIDAVIVGQATDKQRNLSMAYIDYKKAYDSVPHSYLLKVLQLYKVDGNVIRLMQHAMGMWSTSLQITDGTAVLRSRTLSIRRGIFQGDTFSPLWFCLAMNPLSRALNQCNYGYQLKSGGRSTRITHTFFMDDLKLFAESVQRLHQLLQLVTVFSNDIRMEFGIDKCRSVHLRRGQLVDASCFRVNEQEEIRNMVEGEVYKYLGFLQLRGIRHTAIKKELQDKFLHRVNCVLRSFLSAGNKVKAINTFAVPLLTYSFGVVKWTKTDLEALERAVRVAFTKHRMRHPKSSIERVTLPRAVGGRGVTDIQALCVSQIQQLRAYFVESQNRHEMYRTVCEADHGYSALHLAQEDYQLNCDIKTVDEMIVTWKQKELHGTHPHQLELEHIDKAASNAWLVRGDLFSETEGFMVAIQDRVIATKNYRRYILHEDVEDRCRKCNSVGETIEHVVAGCSVLAGSAYLDRHNEVAKIVHQQLALKHNLVDRFVPYYKYQPDPVLENSCIKLYWDREIITDVLIRANRPDIVVFDKRMKRVTLIDIAVPLDHNVQSTFSGKITKYHDLAEELKQMWHLEDVRIVPVVLSATGVVPKSLLRSLDELELKKDLNSILKAVILGTCSIVRRFLNHHN

SEQ ID NO: 9944 - protein, 1067 aa, Aedes albopictus
MSHNMLTAAEVECIKLEAQRELGEERTRSSDTSRRSSDGLDASNASESRDTTAPTAPGPTADMQRQQLRDELALHMATAVTQFRGTDPMSRHRIPKLRNSYRLTSAVSILNQDILPQYLEAVQHLEDLQFTVYSAAVAVVKTLGLRTRPQGDGEGRTRPSTQKPAWMRRLENRIATLRTKIGRLTQYKQGNRSTRLVRYVAEIVKPAELRDLTEVNITEILDTHVQRLSALAKRLRRYGECSKRKEQNRMFNINEREFYNCIRNDKPDYGEGLPEIGEVTQFWANLWENPVQHSDDGMWLAEEERQCNGVGDMTAVVVTAQDVREATRYTRNWAAPGPDFVHNFWYKKLTTIHGRMAECFNMVLEDPTQLPEFITRGITYLLPKDQNTADPAKYRPITCLSSLYKVLSSVIARRIQTHCDANNVMTEEQKGCRKNTQGCKDQVIIDAVIVGQATDKQRNLSMAYIDYKKAYDSVPHSYLLKVLQLYKVDGNIIRLMQHAMGMWSTSLQITDGTAVLRSRTLSIRRGIFQGDTFSPLWFCLAMNPLSRALNQCNFGYQLKSGGRSTRITHTFFMDDLKLFAESVQRLHQLLQLVTVFSNDIRMEFGIDKCRSVHLRRGQVVDASCFRVNEQEEIRNMVEGEVYKYLGFLQLRGIRHTAIKKELQDKFLHRVNCVLRSFLSAGNKVKAINTFAVPLLTYSFGVVKWTKTDLEALERAVRVAFTKHRMRHPKSSIERVTLPRAVGGRGVTDIQALCVSQIQQLRAYFVESQNRHEMYRTVCEADHGYSALHLAQEDYQLNCDIKTVDEMIVTWKQKELHGTHPHQLELEHIDKAASNAWLVRGDLFSETEGFMVAIQDRVIATKNYRRYILHEDVEDRCRKCNSVGETIEHVVAGCSVLAGSAYLDRHNEVAKIVHQQLALKHNLVDRFVPYYKYQPDPVLENSCIKLYWDREIITDVLIRANRPDIVVFDKRMKRVTLIDIAVPLDHNVQSTFSGKITKYHDLAEELKQMWHLEDVRIVPVVLSATGVVPKSLLRSLDELELKKDLNSILKAVILGTCSIVRRFLNHHN

SEQ ID NO: 9945 - protein, 1221 aa, Aedes aegypti
MKANPAMETRSMRNRRMRSPEEGAPTGAGPGTGDRASGQRLEEDNVQERPSSQRAQPVPRTQNRNGSSRNHQGHVAPTDVAVADRRQSLTLAGGRRQRIMWTREMNMYVIRCYYVCTRMETDMSGRSGMLEMFNERFPRFARQLDLNKLYTRQRAIMSHNMLTAAEVEYIKLEVQREIGEEGTRSSDTSRRSSVGLDAPITSESRDPPAPTAPGPTADMQRQQLRDELALHMGTAVTQFRGTDPMSRHRIPKLRYSYRLTSAVSILNQDILPQYLEAVENLEDLQFIVYSAAIAVVKTLGLRTRPQGEDGTRPNAQKPVWMRRLESRIATLRSKVGRLTQYKQGNRSTRLVRHVAEIVRPAELRDLREVDITEILDTHVQRLSALAKRLRRYGECSKRKEQNRMFNINEREFYNRIRNDKVDFGEGLPEIGDVTQFWANLWENPTEHNDDGMWLAEEGRQCDGIGDMTAVVVTAQDIREATRYTRNWAAPGPDFVHNFWYKKLTTIHGRMAECFNTVLGDPTQLPEFITRGVTFLLPKDQHTADPAKYRPITCLSSLYKVLSSVIARRVQAHCDANNVMTEEQKGCRRNTQGCKDQVIVDAVIVGQATQKQRNLSMAYIDYKKAYDSVPHSYLLKVLQLYKVDGNVIRLMQHAMGMWSTSLHITDGTAVLRSRTLSIRRGIFQGDTFSPLWFCLAMNPLSKALNQCNYGYQLKSGERSTRVTHTFYMDDLKLFAESVQKLHQLLQLVTTFSNDIRMEFGIDKCRSIHLRRGQVMDASCFRVNEQEEIRNMVEGETYKYLGFLQLRGIRHTMIKKELQEKFLSRVNCILKSFLSAGNKVKAINTFAVPLLTYSFGVVKWTKTDLEAIERAVRVAFTKHRMRHPKSSIERVTLPRAAGGRGVTDIQALCVSQIQQLRAHFVESQNRHEIYRTVCEADHGFSALHLAQEDYQLNCDIKTVDEMIAMWKQKELHGTHPHQLELEHIDKVASNTWLVRGDLFSETEGFMVAIQDRVIATKNYRHYILHEDVEDRCRKCNSVGETIEHVVAGCSVLAGSAYLDRHNEVAKIVHQQLALKHNLVDRFVPYYKYLPDPVLENSCIKLYWDREIITDVLIRANRPDIVVYDKRMKRVTLIDIAVPLDHNVQSTFSNKIAKYHDLAEELKQMWHLEDVRIVPVVLSATGIVPKSLLRSLDELELKKDLHSIQKAVILGTCSIVRRFLNHHN

SEQ ID NO: 9946 - protein, 1124 aa, Aedes albopictus
MWTREMNMYVIRCYFVCTRMETDMSGRSGMLEMFNERFPRFANQLDLNKLYTRQRAIMSHNMLTVAEVECIKLEAQRELGEERTRSSDTSRRSSDGLDASNASESRDTTAPTAPGPTADMQRQQLRDELALHMATAVTQFRGTDPMSRHRIPKLRNSYRLTSAVSILNQDILPQYLEAVQHLEDLQFTVYSAAVAVVKTLGLRTRPQGDGEGRTRPSTQKPAWMRRLENRIATLRTKIGRLTQYKQGNRSTRLVRYVAEIVKPAELRDLTEVNITEILDTHVQRLSALAKRLRRYGECSKRKEQNRMFNINEREFYNCIRNDKPDYGEGLPEIGEVTQFWANLWENPVQHSDDGMWLAEEERQCNGVGDMTAVVVTAQDIREATRYTRNWAAPGPDFVHNFWYKKLTTIHGRMAECFNMVLEDPTQLPEFITRGITYLLPKDQNTADPAKYRPITCLSSLYKVLSSVIARRIQTHCDANNVMTEEQKGCRKNTQGCKDQVIIDAVIVGQATDKQRNLSMAYIDYKKAYDSVPHSYLLKVLQLYKVDGNVIRLMQHAMGMWSTSLQITDGTAVLRSRTLSIRRGIFQGDTFSPLWFCLAMNPLSRALNQCNYGYQLKSGGRSTRITHTFFMDDLKLFAESVQRLHQLLQLVTVFSNDIRMEFGIDKCRSVHLRRGQVVDASCFRVNEQEEIRNMVEGEVYKYLGFLQLRGIRHTAIKKELQDKFLHRVNCVLRSFLSAGNKVKAINTFAVPLLTYSFGVVKWTKTDLEALERAVRVAFTKHRMRHPKSSIERVTLPRAVGGRGVTDIQALCVSQIQQLRAYFVESQNRHEMYRTVCEADHGYSALHLAQEDYQLNCDIKTVDEMIVTWKQKELHGTHPHQLELEHIDKAASNAWLVRGDLFSETEGFMVAIQDRVIATKNYRRYILHEDVEDRCRKCNSVGETIEHVVAGCSVLAGSAYLDRHNEVAKIVHQQLALKHNLVDRFVPYYKYQPDPVLENSCIKLYWDREIITDVLIRANRPDIVVFDKRMKRVTLIDIAVPLDHNVQSTFSGKITKYHDLAEELKQMWHLEDVRIVPVVLSATGVVPKSLLRSLDELELKKDLNSILKAVILGTCSIVRRFLNHHN

SEQ ID NO: 9947 - protein, 901 aa, Aedes albopictus
MRRLENRIATLRTKIGRLTQYKQGNRSTRLVRYVAEIVKPAELRDLTEVNITEILDTHVQRLSALAKRLRRYGECSKRKEQNRMFNINEREFYNCIRNDKPDYGEGLPEIGEVTQFWANLWENPVQHSDDGMWLAEEERQCNGVGDMTAVVVTAQDVREATRYTRNWAAPGPDFVHNFWYKKLTTIHGRMAECFNMVLEDPTQLPEFITRGITYLLPKDQNTADPAKYRPITCLSSLYKVLSSVIARRIQTHCDANNVMTEEQKGCRKNTQGCKDQVIIDAVIVGQATDKQRNLSMAYIDYKKAYDSVPHSYLLKVLQLYKVDGNVIRLMQHAMGMWSTSLQITDGTAVLRSRTLSIRRGIFQGDTFSPLWFCLAMNPLSRALNQCNYGYQLKSGGRSTRITHTFFMDDLKLFAESVQRLHQLLQLVTVFSNDIRMEFGIDKCRSVHLRRGQVVDASCFRVNEQEEIRNMVEGEVYKYLGFLQLRGIRHTAIKKELQDKFLHRVNCVLRSFLSAGNKVKAINTFAVPLLTYSFGVVKWTKTDLEALERVVRVAFTKHRMRHPKSSIERVTLPRAVGGRGVTDIQALCVSQIQQLRAYFVESQNRHEMYRTVCEADHGYSALHLAQEDYQLNCDIKTVDEMIVTWKQKELHGTHPHQLELEHIDKAASNAWLVRGDLFSETEGFMVAIQDRVIATKNYRRYILHEDVEDRCRKCNSVGETIEHVVAGCSVLAGSAYLDRHNEVAKIVHQQLALKHNLVDRFVPYYKYQPDPVLENSCIKLYWDREIITDVLIRANRPDIVVFDKRMKRVTLIDIAVPLDYNVQSTFSGKITKYHDLAEELKQMWHLEDVRIVPVVLSATGVVPKSLLRSLDELELKKDLNSILKAVILGTCSIVRRFLNHHN

SEQ ID NO: 9948 - protein, 1198 aa, Aedes albopictus
METRARRNRRMRSPEEGAPTGAGPGTGDKASGQRLEEEVVQERPSSQRAQPVPRTQSRNGSNSNHQGHAAPANVAVADRRQSLTLAGGRRQWIMWTREMNMYVIRCYFVCTRMETDMSGRSGMLEMFNERFPRFANQLDLNKLYTRQRAIMSHNMLTAAEVECIKLEAQRELGEERTRSSDTSRRSSDGLDASNASESRDTTAPTAPGPTADKQRQQLRDELALHMATAVTQFRGTDPMSRHRIPKLRNSYRLTSAVSILNQDILPQYLEAVQHLEDLQFTVYSAAVAVVKTLGLRTRPQGDGEGRTRPSTQKPAWMRRLENRIATLRTKIGRLTQYKQGNRSTRLVRYVAEIVKPAELRDLTEVNITEILDTNVQRLSALAKRLRRYGECSKRKEQNRMFNINEREFYNCIRNDKPDYGEGLPEIGEVTQFWANLWENPVQHSDDGMWLAEEERQCNGVGDMTAVVVTAQDVREATRYTRSWAAPGPDFVHNFWYKKLTTIHGRMAECFNMVLEDPTQLPEFITRGITYLLPKDQNTADPAKYRPITCLSSLYKVLSSVIARRIQTHCDANNVMTEEQKGCRKNTQGCKDQVIIDAVIVGQASDKQRNLSMAYIDYKKAYDSVPHSYLLKVLQLYKVDGNVIRLMQHAMGMWSTCLQITDGTAVLRSRTLSIRRGIFQGDTFSPLWFCLAMNPLSRALNQCNYGYQLKSGGRSTRITHTFFMDDLKLFAESVQRLHQLLQLVTVFSNDIRMEFGIDKCRSVHLRRGQVVDASCFRVNEQEEIRNMVEGEVYKYLGFLQLRGIRHTAIKKDLQDKFLHRVNCVLRSFLSAGNKVKAINTFAVPLLTYSFGVVKWTKTDLEALERAVRVAFTKHRMRHPKSSIERVTLPRAVGGRGVTDIQALCVSQIQQLRAYFVESQNRHEMYRTVCEADHGYSALHLAQEDYQLNCDIKTVDEMIVTWKQKELHGTHPHQLELEHIDKAASNAWLVRGDLFSETEGFMVAIQDRVIATKNYRRYILHEDVEDRCRKCNSVGETIEHVVAGCSVLAGSAYLDRHNEVAKIVHQQLALKHNLVDRFVPYYKYQPDPVLENSCIKLYWDREIITDVLIRANRPDIVVFDKRMKRVTLIDIAVPLDHNVQSTFSGKITKYHDLAEELKQMWHLEDVRIVPVVLSATGVVPKSLLRLHGEVTRADPEPSSD

SEQ ID NO: 9949 - protein, 1217 aa, Aedes albopictus
METRARRNRRMRSPEEGAPTGAGPGTGDRASGQRLEEEVVQERPSSQRAQPVPRTQSRNGSNSNHQGHAAPANVAVADRRQSLTLAGGRRQRIMWTREMNMYVIRCYFVCTRMETDMSGRSGMLEMFNERFPRFANQLDLNKLYTRQRAIMSHNMLTAAEVECIKLEAQRELGEERTRSSDTSRRSSDGLDASNASESRDTTAPTAPGPTADMQRQQLRDELALHMATAVTQFRGTDPMSRHRIPKLRNSYRLTSAVSILNQDILPQYLEAVQHLEDLQFTVYSAAVAVVKTLGLRTRPQGDGEGRTRPSTQKPAWMRRLENRIATLRTKIGRLTQYKQGNRSTRLVRYVAEIVKPAELRDLTEVNITEILDTHVQRLSALAKRLRRYGECSKRKEQNRMFNINEREFYNCIRNDKPDYGEGLPEIGEVTQFWANLWENPVQHSDDGMWLAEEERQCNGVGDMTAVVVTAQDVREATRYTRNWAAPEPDFVHNFWYKKLTTIHGRMAECFNMVLEDPTQLPEFITRGITYLLPKDQNTADPAKYRPITCLSSLYKVLSSVIARRIQTHCDANNVMTEEQKGCRKNTQGCKDQVIIDAVIVGQATDKQRNLSMAYIDYKKAYDSVPHSYLLKVLQLYKVDGNVIRLMQHAMGMWSTSLQITDGTAVLRSRTLSIRRGIFQGDTFSLLWFCLAMNPLSRALNQCNYGYQLKSGGRSTRITHTFFMDDLKLFAESVQRLHQLLQLVTVFSNDIRMEFGIDKCRSVHLRRGQVVDASCFRVNEQEEIRNMVEGEVYKYLGFLQLRGIRHTAIKKELQDKFLHRVNCVLRSFLSAGNKVKAINTFAVPLLTYSFGVVKWTKTDLEALERAVRVAFTKHRMRHPKSSIERVTLPRAVGGRGVTDIQALCVSQIQQLRAYFVESQNRHEMYRTVCEADHGYSALHLAQEDYQLNCDIKTVDEMIVTWKQKELHGTHPHQLELEHIDKAASNAWLVRGDLFSETEGFMVAIQDRVIATKNYRRYILHEDVEDRCRKCNSVGETIEHVVAGCSVLAGSAYLDRHNEVAKIVHQQLALKHNLVDRFVPYYKYQPDPVLENSWIKLYWDREIITDVLIRANRPDIVVFDKRMKRVTLIDIAVPLDHNVQSTFSGKITKYHDLAEELKQMWHLEDVRIVPVVLSATGVVPKSLLRSLDELELKKDLNSILKAVILGTCSIVRRFLNHHN

SEQ ID NO: 9950 - protein, 1221 aa, Aedes aegypti
MKANPAMETRSMRNRRMRSPEEGAPTGAGPGTGDRASGQRLEEDNVQERPSSQRAQPVPRTRNRNGSSRNHQGHAAPTDVAVADRRQSLTLAGGRRQRIMWTREMNMYVIRCYYVCTRMETDMSGRSGLLEMFNERFPRFARQLDLNKLYTRQRAIMSHNMLTTAEVEYIKLEVQREIGEEGTRSSDTSRRSSVGLDASITSESRDSPAPTAPGPTADMQRQQLRDELALHMGTAVTQFRGTDPMSRHRIPKLRYSYRLTSAVSILNQDILPQYLEAVENLEDLQFIVYSAAIAVVKTLGLRTRPQGEDGTRPNAQKPVWMRRLESRIATLRSKVGRLTQYKQGNRSTRLVRHVAEIVRPAELRDLREVDIAEILDTHVQRLSALAKRLRRYGECSKRKEQNRMFNINEREFYNRIRNDKVDFGEGLPEIGDVTQFWANLWENPTEHNGDGMWLAEEERQCDGIGDMTAVVVTAQDIREATRYTRNWAAPGPDFVHNFWYKKLTTIHGRMAECFNTVLGDPTQLPEFITRGVTFLLPKDQHTADPAKYRPITCLSSLYKVLSSVIARRVQAHCDANNVMTEEQKGCRRNTQGCKDQVIVDAVIVGQATQKQRNLSMAYIDYKKAYDSVPHSYLLKVLQLYKVDRNVIRLMQHAVGMWSTSLHITDGTAVLRSRTLSIRRGIFQGDTFSPLWFCLAMNPLSRALNQCNYGYQLKSGERSTRVTHTFYMDDLKLFAESVQRLHQLLQLVTTFSNDIRMEFGIDKCRSIHLRRGQVMDASCFRVNEQEEIRNMVEGETYKYLGFLQLRGIRHTMIKKELQEKFLSRVNCILKSFLSAGNKVKAINTFAVPLLTYSFGVVKWTKTDLEAIERAVRVAFTKHRMRHPKSSIERVTLPRAAGGRGVTDIQALCVSQIQQLRAYFVESQNRHEIYRTVCEADHGFSALHLAQEDYQLNCDIKTVDEMIAMWKQKELHGTHPHQLELEHIDKVASNTWLVRGDLFSETEGFMVAIQDRVIATKNYRHYILHEDVEDRCRKCNSVGETIEHVVAGCSVLAGSAYLDRHNEVAKIVHQQLALKHNLVDRFVPYYKYLPDPVLENSCIKLYWDREIITDVLIRANRPDIVVYDKRMKRVTLIDIAVPLDHNVQSTFSNKIAKYHDLAEELKQMWHLEDVRIVPVVLSATGIVPKSLLRSLDELELKKDLHSIQKAVILGTCSIVRRFLNHHN

SEQ ID NO: 9951 - protein, 901 aa, Aedes albopictus
MRRLENRIATLRTKIGRLTQYKQGNRSTRLVRYVAEIVKPAELRDLTEVNITEILDTHVQRLSALAKRLRRYGECSKRKEQNRMFNINEREFYNCIRNDKPDYGEGLPEIGEVTQFWANLWENPVQHSDDGMWLAEEERQCNGVGDMTAVVVTAQDVREATRYTRNWAAPGPDFVHNFWYKKLTTIHGRMAECFNMVLEDPTQLPEFITRGITYLLPKDQNTADPAKYRPITCLSSLYKVLSSVIARRIQTHCDANNVMTEEQKGCRKNTQGCKDQVIIDAVIVGQATDKQRNLSMAYIDYKKAYDSVPHSYLLKVLQLYKVDGNIIRLMQHAMGMWSTSLQITDGTAVLRSRTLSIRRGIFQGDTFSPLWFCLAMNPLSRALNQCNYGYQLKSGGRSTRITHTFFMDDLKLFAESVQRLHQLLQLVTVFSNDIRMEFGIDKCRSVHLRRGQVVDASCFRVNEQEEIRNMVEGEVYKYLGFLQLRGIRHTAIKKELQDKFLHRVNCVLRSFLSAGNKVKAINTFAVPLLTYSFGVVKWTKTDLEALERAVRVAFTKHRMRHPKSSIERVTLPRAVGGRGVTDIQALCVSQIQQLRAYFVESQNRHEMYRTVCEANHGYSALHLAQEDYQLNCDIKTVDEMIVTWKQKELHGTHPHQLELEHIDKAASNAWLVRGDLFSETEGFMVAIQDRVIATKNYRRYILHEDVEDRCRKCNSVGETIEHVVAGCSVLAGSAYLDRHNEVAKIVHQQLALKHNLVDRFVPYYKYQPDPVLENSCIKLYWDREIITDVLIRANRPDIVVFDKRMKRVTLIDIAVPLDHNVQSTFSGKITKYHDLAEELKQMWHLKDVRIVPVVLSATGVVPKSLLRSLDELELKKDLNSILKAVILGTCSIVRRFLNHHN

SEQ ID NO: 9952 - protein, 1217 aa, Aedes albopictus
METRARRNRRMRSPEEGALTGAGPGTGDRASGQRLEEEVVQERPSSQRAQPVPRTQSRNGSNSNHQGHAAPANVAVADRRQSLTLAGGRRQRIMWTREMNMYVIRCYFVCTRMETDMSGRSGMLEMFNERFPRFANQLDLNKLYTRQRAIMSHNMLTAAEVECIKLEAQRELGEERTRSSDTSRRSSDGLDASNASESRDTTAPTAPGPTADMQRQQLRDELALHMATAVTQFRGTDPMSRHRIPKLRNSYRLTSAVSILNQDILPQYLEVVQHLEDLQFTVYSAAVAVVKTLGLRTRPQGDGEGRTRPSTQKPAWMRRLENRIATLRTKIGRLTQYKQGNRSTRLVRYVAEIVKPAELRDLTEVNITEILDTHVQRLSALAKRLRRYGECSKRKEQNRMFNINEREFYNCIRNDKPDYGEGLPEIGEVTQFWANLWENPVQHSDDGMWLAEEERQCNGVGDMTAVVVTAQDVREATRYTRNWAAPGPDFVHNFWYKKLTTIHGRMAECFNMVLEDPTQLPEFITRGITYLLPKDQNTADPAKYRPITCLSSLYKVLSSVIARRIQTHCDANNVMTEEQKGCRKNTQGCKDQVIIDAVIVGQATDKQRNLSMAYIDYKKAYDSVPHSYLLKVLQLYKVDGNIIRLMQHAMGMWSTSLQITDGTAVLRSRTLSIRRGIFQGDTFSPLWFCLAMNPLSRALNQCNYGYQLKSGGRSTRITHTFFMDDLKLFAESVQRLHQLLQLVTVFSNDIRMEFGIDKCRSVHLRRGQVVDASCFRVNEQEEIRNMVEGEVYKYLGFLQLRGIRHTAIKKELQDKFLHRVNCVLRSFLSAGNKVKAINTFAVPLLTYSFGVVKWTKTDLEALERAVRVAFTKHRMRHPKSSIERVTLPRAVGGRGVTDIQALCVSQIQQLRAYFVESQNRHEMYRTVCEADHGYSALHLAQEDYQLNCDIKTVDEMIVTWKQKELHGTHPHQLELEHIDKAASNAWLVRGDLFSETEGFMVAIQDRVIATKNYRRYILHEDVEDRCRKCNSVGETIEHVVAGCSVLAGSAYLDRHNEVAKIVHQQLALKHNLVDRFVPYYKYQPDPVLENSCIKLYWDREIITDVLIRANRPDIVVFDKRMKRVTLIDIAVPLDHNVQSTFSGKITKYHDLAEELKQMWHLEDVRIVPVVLSATGVVPKSLLRSLDELELKKDLNSILKAVILGTCSIVRRFLNHHN

SEQ ID NO: 9953 - protein, 1217 aa, Aedes albopictus
METRARRNRRMRSPEEGAPTGAGPGTGDRASGQRLEEEVVQERPSSQRAQPVPRTQSRNGSNSNHQGHAAPANVAVADRRQSLTLAGGRRQRIMWTREMNMYVIRCYFVCTRMETDMSGRSGMLEMFNERFPRFANQLDLNKLYTRQRAIMSHNMLTAAEVECIKLEAQREVGEERTRSSDTSRRSSDGLDASNASESRDTTAPTAPGPTADMQRQQLRDELALHMATAVTQFRGTDPMSRHRIPKLRNSYRLTSAVSILNQDILPQYLEAVQHLEDLQFTVYSAAVAVVKTLGLRTRPQGDGEGRTRPSTQKPAWMRRLENRIATLRTKIGRLTQYKQGNRSTRLVRYVAEIVKPAELRDLTEVNITEILDTHVQRLSALAKRLRRYGECSKRKEQNRMFNINEREFYNCIRNDKPDYGEGLPEIGEVTQFWANLWENPVQHSDDGMWLAEEERQCNGVGDMTAVVVTAQDIREATRYTRNWAAPGPDFVHNFWYKKLTTIHGRMAECFNMVLEDPTQLPEFITRGITYLLPKDQNTADPAKYRPITCLSSLYKVLSSVIARRIQTHCDANNVMTEEQKGCRKNTQGCKDQVIIDAVIVGQATDKQRNLSMAYIDYKKAYDSVPHSYLLKVLQLYKVDGNVIRLMQHAMGMWSTSLQITDGTAVLRSRTLSIRRGIFQGDTFSPLWFCLAMNPLSRALNQCNYGYQLKSGGRSTRITHTFFMDDLKLFAESVQRLHQLLQLVTVFNNDIRMEFGIDKCRSVHLRRGQVVDASCFRVNEQEEIRNMVEGEVYKYLGFLQLRGIRHTAIKKELQDKFLHRVNCVLRSFLSAGNKVKAINTFAVPLLTYSFGVVKWTKTDLEALERAVRVAFTKHRMRHPKSSIERVTLPRAVGGRGVTDIQALCVSQIQQLRAYFVESQNRHEMYRTVCEADHGYSALHLAQEDYQLNCDIKTVDEMIVTWKQKELHGTHPHQLELEHIDKAASNAWLVRGDLFSETEGFMVAIQDRVIATKNYRRYILHEDVEDRCRKCNSVGETIEHVVAGCSVLAGSAYLDRHNEVAKIVHQQLALKHNLVDRFVPYYKYQPDPVLENSCIKLYWDREIITDVLIRANRPDIVVFDKRMKRVTLIDIAVPLDHNVQSTFSGKITKYHDLAEELKQMWHLEDVRIVPVVLSATGVVPKSLLRSLDELELKKDLNSILKAVILGTCSIVRRFLNHHN

SEQ ID NO: 9954 - protein, 606 aa, Aedes albopictus
MAYIDYKKAYDSVPHSYLLKVLQLYKVDGNIIRLMQHAMGMWSTSLQITDGTAVLRSRTLSIRRGIFQGDTFSPLWFCLAMNPLSRALNQCNYGYQLKSGGRSTRITHTFFMDDLKLFAESVQRLHQLLQLVTVFSNDIRMEFGIDKCRSVHLRRGQVVDASCFRVNEQEEIRNMVEGEVYKYLGFLQLRGIRHTAIKKELQDKFLHRVNCVLRSFLSAGNKVKAINTFAVPLLTYSFGVVKWTKTDLEALERAVRVAFTKHRMRHPKSSIERVTLPRAVGGRGVTDIQALCVSQIQQLRAYFVESQNRHEMYRTVCEADHGYSALHLAQEDYQLNCDIKTVDEMIVTWKQKELHGTHPHQLELEHIDKAASNAWLVRGDLFSETEGFMVAIQDRVIATKNYRRYILHEDVEDRCRKCNSVGETIEHVVAGCSVLAGSAYLDRHNEVAKIVHQQLALKHNLVDRFVPYYKYQPDPVLENSCIKLYWDREIITDVLIRANRPDIVVFDKRMKRVTLIDIAVPLDHNVQSTFSGKITKYHDLAEELKQMWHLEDVRIVPVVLSATGVVPKSLLRSLDELELKKDLNSILKAVILGTCSIVRRFLNHHN

SEQ ID NO: 9955 - protein, 1217 aa, Aedes albopictus
METRARRNRRMRSPEEGAPTGAGPGTGDRASGQRLEEELVQERPSSQRAQPVPRTQSRNGSNSNHQGHAAPANVAVADRRQSLTLAGGRRQRIMWTREMNMYVIRCYFVCTRMETDMSGRSGMLEMFNERFPRFANQLDLNKLYTRQRAIMSHNMLTAAEVECIKLEAQRELGEERTRSSDTSRRSSDGLDASNASESRDTTAPTAPGPTADMQRQQLRDELALHMATAVTQFRGTDPMSRHRIPKLRNSYRLTSAVSILNQDILPQYLEAVQHLEDLQFTVYSAAVAVVKTLGLRTRPQGDGEGRTRPSTQKPAWMRRLENRIATLRTKIGRLTQYKQGNRSTRLVRYVAEIVKPAELRDLTEVNITEILDTHVQRLSALAKRLRRYGECSKRKEQNRMFNINEREFYNCIRNDKPDYGEGLPEIGEVTQFWANLWENPVQHSDDGMWLAEEERQCNGVGDMTAVVVTAQDVREATRYTRNWAAPGPDFVHNFWYKKLTTIHGRMAECFNMVLEDPTQLPEFITRGITYLLPKDQNTADPAKYRPITCLSSLYKVLSSVIARRIQTHCDANNVMTEEQKGCRKNTQGCKDQVIIDAVIVGQATDKQRNLSMAYIDYKKAYDSVPHSYLLKVLQLYKVDGNIIRLMQHAMGMWSTSLQITDGTAVLRSRTLSIRRGIFQGDTFSPLWFCLAMNPLSRALNQCNYGYQLKSGGRSIRITHTFFMDDLKLFAESVQRLHQLLQLVTVFSNDIRMEFGIDKCRSVHLRRGQVVDASCFRVNEQEEIRNMVEGEVYKYLGFLQLRGIRHTAIKKELQDKFLHRVNCVLRSFLSAGNKVKAINTFAVPLLTYSFGVVKWTKTDLEALERAVRVAFTKHRMRHPKSSIERVTLPRAVGGRGVTDIQALCVSQIQQLRAYFVESQNRHEMYRTVCEADHGYSALHLAQEDYQLNCDIKTVDEMIVTWKQKELHGTHPHQLELEHIDKAASNAWLVRGDLFSETEGFMVAIQDRVIATKNYRRYILHEDVEDRCRKCNSVGETIEHVVAGCSVLAGSAYLDRHNEVAKIVHQQLALKHNLVDRFVPYYKYQPDPVLENSCIKLYWDREIITDVLIRANRPDIVVFDKRMKRVTLIDIAVPLDHNVQSTFSGKITKYHDLAEELKQMWHLEDVRIVPVVLSATGVVPKSLLRSLDELELKKDLNSILKAVILGTCSIVRRFLNHHN

SEQ ID NO: 9956 - protein, 1217 aa, Aedes albopictus
METRARRNRRMRSPEEGAPTGAGPGTGDRASGQRLEEEVVQERPSSQRAQPVPRTQSRNGSNSNHQGHAAPANVVVADRRQSLTLAGGRRQRIMWTREMNMYVIRCYFVCTRMKTDMSGRSGMLEMFNERFPRFANQLDLNKLYTRQRAIMSHNMLTAAEVECIKLEAQRELGEERTRSSDTSRRSSDGLDASNASESRDTTAPTAPGPTADMQRQQLRDELALHMATAVTQFRGTDPMSRHRIPKLRNSYRLTSSVSILNQDILPQYLEAVQHLEDLQFTVYSAAVAVVKTLGLRTRPQGDGEGRTRPSTLKPAWMRRLENRIATLRTKIGRLTQYKQGNRSTRLVRYVAEIVKPAELRDLTEVNITEILDTHVQRLSALAKRLRRYGECSKRKEQNRMFNINEREFYNCIRNDKPDYGEGLPEIGEVTQFWANLWENPVQHSDDGMWLAEEERQCNGVGDMTAVVVTAQDVREATRYTRNWAAPGPDFVHNFWYKKLTTIHGRMAECFNMVLEDPTQLPEFMTRGITYLLPKDQNTADPAKYRPITCLSSLYKVLSSVIARRIQTHCDANNVMTEEQKGCRKNTQGCKDQVIIDAVIVGQATDKQRNLSMAYIDYKKAYDSVPHSYLLKVLQLYKVDGNVIRLMQHAMGMWSTSLQITDGTAVLRSRTLSIRRGIFQGDTFSPLWFCLAMNPLSRALNQCNYGYQLKSGGRSTRITHTFFMDDLKLFAESVQRLHQLLQLVTVFSNDIRMEFGIDKCRSVHLRRGQVVDASCFRVNEQEEIRNMVEGEVYKYLGFLQLRGIRHTAIKKELQDKFLHRVNCVLRSFLSAGNKVKAINTFAVPLLTYSFGVVKWTKTDLEALERAVRVAFTKHRMRHPKSSIERVTLPRAVGGRGVTYIQALCVSQIQQLRAYFVESQNRHEMYRTVCEADHGYSALHLAQEDYQLNCDIKTVDEMIVTWKQKELHGTHPHQLELEHIDKAASNAWLVRGDLFSETEGFMVAIQDRVIATKNYRRYILHEDMEDRCRKCNSVGETIEHVVAGCSVLAGSAYLDRHNEVAKIVHQQLALKHNLVDRFVPYYKYQPDPVLENSCIKLYWDREIITDVLIRANRPDIVVFDKRMKRVTLIDIAVPLDHNVQSTFSGKITKYHDLAEELKQMWHLQDVRIVPVVLSATGVVPKSLLRSLDELELKKDLNSILKAVILGTCSIVRRFLNHHN

SEQ ID NO: 9957 - protein, 1169 aa, Aedes aegypti
MKANPAMETRSMRNRRMRSPEEGAPTGAGPGTGDRASGQRLEEDNVQERPSSQRAQPVPRTRNRNGSSRNHQGHAAPTDVAVADRRQSLTLAGGRRQRIMWTREMNMYVIRCYYVCTRMETDMSGRLGMLEMFNERFPRFARQLDLNKLYTRQRAIMSHNMLTAAEVEYIKLEVQREIGEEGTTSSDTSRRSSVGLDAPITSESRDSLAPTAPGPTADMQRQQLRDELALHMGTAVTQFRGTDPVSRHRIPKLRYSYRLTSAVNILNQDILPQYLEAVENLEDLQFIVYSAAIAVVKTLGLRTRPQGEDGTRPNAQKPVWMRRLESRIATLRSKVGRLTQYKQGNRSTRLVRHVAEIVRPAELRDLREVDITEILDTHVQRLSALAKRLRRYGECSKRKEQNRMFNINEREFYNRIRNDKVDFGEGLPEIGDVTQFWANLWENPTEHNGDGMWLAEEERQCDGIGDMTAVVVTAQDIREATRYTRNWAAPGPDFVHNFWYKKLTTIHGRMAECFNTVLGDPTQLPEFITRGVTFLLPKDQHTADPAKYRPITCLSSLYKVLSSVIARRVQVHCDANNVMTEEQKGCRRNTQGCKDQVIVDAVIVGQATQKQRNLSMAYIDYKKAYDSVPHSYLLKVLQLYKVDGNVIRLMQHAMGMWSTSLHITDGTAVLRSRTLSIRRGIFQGDTFSPLWFCLAMNPLSKALNQCNYGYQLKSGERSTRVTHTFYMDDLKLFAESVQRLHQLLQLVTTFSNDIRMEFGIDKCRSIHLRRGQVMDASCFRVNEQEEIRNMVEGETYKYLGFLQLRGIRHTMIKKELQEKFLSRVNCILKSFLSAGNKVKAINTFAVPLLTYSFGVVKWTKTDLEAIERAVRVAFTKHRMRHPKSSIERVTLPREAGGRGVTDIQALCVSQIQQLRAYFVESQNRHEIYRTVCEADHGFSALHLAQEDYQLNCDIKTVDEMIAMWKQKELHGTHPHQLELEHIDKVASNTWLVRGDLFSETEGFMVAIQDRVIATKNYRHYILHEDVEDRCRKCNSVGETIEHVVAGCSVLAGSAYLDRHNEVAKIVHQQLALKHNLVDRFVPYYKYLPDPVLENSCIKLYWDREIITDVLIRANRPDIVVYDKRMKRVTLIDIAVPLDHNVQSTFSNKIAKYHDLAEELKHPSSTYCYK

SEQ ID NO: 9958 - protein, 1103 aa, Aedes aegypti
MKTDMSGRSGMLEMFNERFPRFARQLDLNKLYTRQRAIMSHNMLTAAEVEYIKLEVQREIGEEGTRSSDTSRRSSVGLDAPITSESRDSPAPTVPGPTADMQRQQLRDELALHMGTAVTQFRRTDPMSRHRIPKLRYSYRLTSALSILNQDILPQYMEAVENLEDLQFIVYSAAIAVVKTLGLRTRPQGEDDTRPNAQKPVWMRRLESRIATLRSKVGRLTQYKQGNRSTRLVRHVAEIVRPAELRDLREVDITEILDTHVQRLSALAKRLRRYGECSKRKEQNRMFNINEREFYNRIRNDKVDFGEGLPEIGDVTQFWANLWENPTEHNGDGMWLAEEERQCDGIGDMTAVVITAQDIREATRYTRNWAAPGPDFVHNFWYKKLTTIHGRMAECFNTVLGDPTQLPEFITRGVTFLLPKDQHTADPAKYRPITCLSSLYKVLSSVIARRVQAHCDANNVMTEEQKGCRRNTQGCKDQVIVDAVIVGQATQKQRNLSMAYIDYKKAYDSVPHSYLLKVLQLYKVDGNVIRLMQHAMGMWSTSLHITDGTAVLRSRTLSIRRGIFQGDTFSPLWFCLAMNPLSKALNQCNYGYQLKSGERSTRVTHTFYMDDLKLFAESVQRLHQLLQLVTTFSNDIRMEFGIDKCRSIHLRRGQVMDASCFRVNEQEEIRNMVEGETYKYLGFLQLRGIRHTMIKKELQEKFLSRVNCILKSFLSAGNKVKAINTFAVPLLTYSFGVVKWTKTDLEAIERAVRVAFTKHRMRHPKSSIERVTLPRAAGGRGVTDIQALCVSQIQQLRAYLVESQNRHEIYRTVCEADHGFSALHLAQEDYQLNCDIKTVDEMIAMWKQKELHGTHPHQLELEHIDKVASNTWLVRGDLFSETEGFMVAIQDRVIATKNYRHYILHEDVEDRCRKCNSVRETIEHVVAGCSVLAGSAYLDRHNEVVKIVHQQLALKHNLVDRFVPYYKYLPDPVLENSCIKLYWDREIITDVLIRANRPDIVVYDKRMKRVTLIDIAVPLDHNVQSTFSNKIAKYHDLAEKLKQMWHLEDVRIVPVVLSATGIVPKSLLRSLDELELKKDLHSIQKAVILGTCSIVRRFLNRHN

SEQ ID NO: 9959 - protein, 1124 aa, Aedes albopictus
MWTREMNMYVIRCYFVCTRMETDMSGRSGMLEMFNERFPRFANQLDLNKLYTRQRAIMSHNMLTAAEVECIKLEAQRELGEERTRSSDTSRRRSDGLDASNASESRDTTAPTAPGPTADMQRQQLRDELALHMATAVTQFRGTDPMSRHRIPKLRNSYRLTSAVSILNQDILPQYLEAVQHLEDLQFTVYSAAVAVVKTLGLRTRPQGDGEGRTRPSTQKPAWMRRLENRIATLRTKIGRLTQYKQGNRSTRLVRYVAEIVKPAELRDLTEVNITEILDTHVQRLSALAKRLRRYGECSKRKEQNRMFNINEREFYNCIRNDKPDYGEGLPEIGEVTQFWANLWENPVQHSDDGMWLAEEERQCNGVGDMTAVVVTAQDVREATRYTRNWAAPGPDFVHNFWYKKLTTIHGRMAECFNMVLEDPTQLPEFITRGITYLLPKDQNTADPAKYRPITCLSSLYKVLSSVIARRIQTHCDANNVMTEEQKGCRKNTQGCKDQVIIDAVIVGQATDKQRNLSMAYIDYKKAYDSVPHSYLLKVLQLYKVDGNIIRLMQHAMGMWSTSLQITDGTAVLRSRTLSIRRGIFQGDTFSPLWFCLAMNPLSRALNQCNYGYQLKSGGRSTRITHTFFMDDLKLFAESVQRLHQLLQLVTVFSNDIRMEFGIDKCRSVHLRRGQVVDASCFRVNEQEEIRNMVEGEVYKYLGFLQLRGIRHTAIKKELQDKFLHRVNCVLRSFLSAGNKVKAINTFAVPLLTYSFGVVKWTKTDLEALERAVRVAFTKHRMRHPKSSIERVTLPRAVGGRGVTDIQALCVSQIQQLRAYFVESQNRHEMYRTVCEADHGYSALHLAQEDYQLNCDIKTVDEMIVTWKQKELHGTHPHQLELEHIDKAASNAWLVRGDLFSETEGFMVAIQDRVIATKNYRRYILHEDVEDRCRKCNSVGETIEHVVAGCSVLAGSAYLDRHNEVAKIVHQQLALKHNLVDRFVPYYKYQPDPVLENSCIKLYWDREIITDVLIRANRPDIVVFDKRMKRVTLIDIAVPLDHNVQSTFSGKITKYHDLAEELKQMWHLEDVRIVPVVLSATGVVPKSLLRSLDELELKKDLNSILKAVILGTCSIVRRFLNHHN

SEQ ID NO: 9960 - protein, 1217 aa, Aedes albopictus
METRARRNRRMRSPEEGAPTGAGPGTGDRASGQRLEEEVVQERPSSQRAQPVPRTQSRNGSNSNHQGHAAPANVAVADRRQSLTLAGGRRQRIMWTREMNMYVIRCYFVCTRMETDMSGRSGMLEMFNERFPRFANQLDLNKLYTRQRAIMSHNMLTAAEVECIKLEAQRELGEERTRSSDTSRRSSDGLDASNASESRDTTAPTAPGPTADMQRQQLRDELALHMATAVTQFRGTDPMSRHRIPKLRNSYRLTSAVSILNQDILPQYLEAVQHLEDLQFTVYSAAVAVVKTLGLRTRPQGDGEGRTRPSTQKPAWMRRLENRIATLRTKIGRLTQYKQGNRSTRLVRYVAEIVKPAELRDLTEVHITEILDTHVQRLSALAKRLRRYGECSKRKEQNRMFNINEREFYNCIRNDKPDYGEGLPEIGEVTQFWANLWENPVQHSDDGMWLAEEERQCNGVGDMTAVVVTAQDVREATRYTRNWAAPGPDFVHNFWYKKLTTIHGRMAECFNMVLEDPTQLPEFITRGITYLLPKDQNTADPAKYRPITCLSSLYKVLSSVIATRIQTHCDANNVMTEEQKGCRKNTQGCKDQVIIDAVIVGQATDKQRNLSMAYIDYKKAYDSVPHSYLLKVLQLYKVDGNVIRLMQHAMGMWSTSLQITDGTAVLRSRTLSIRRGIFQGDTFSPLWFCLAMNPLSRALNQCNYGYQLKSGGRSTRITHTFFMDDLKLFAESVQRLHQLLQLVTVFSNDIRMEFGIDKCRSVHLRRGQVVDASCFRVNEQEEIRNMVEGEVYKYLGFLQLRGIRHTAIKKELQDKFLHRVNCVLRSFLSAGNKVKAINTFAVPLLTYSFGVVKWTKTDLEALERAVRVAFTKHRMRHPKSSIERVTLPRAVGGRGVTDIQALCVSQIQQLRAYFVESQNRHEMYRTVCEADHGYSALHLAQEDYQLNCDIKTVDEMIVTWKQKELHGTHPHQLELEHIDKAASNAWLVRGDLFSETEGFMVAIQDRVIATKNYRRYILHEDVEDRCRKCNSVGETIEHVVAGCSVLAGSAYLDRHNEVAKIVHQQLALKHNLVDRFVPYYKYQPDPVLENSCIKLYWDREIITDVLIRANRPDIVVFDKRMKRVTLIDIAVPLDHNVQSTFSGKITKYHDLAEELKQMWHLEDVRIVPVVLSATGVVPKSLLRSLDELELKKDLNSILKAVILGTCSIVRRFLNHHN

SEQ ID NO: 9961 - protein, 901 aa, Aedes aegypti
MRRLESRIATLRSKVGRLTQYKQGNRSTRLVRHVAEIVRPAELRDLREVDITEILDTHVQRLSALAKRLRRYGECSKRKEQNRMFNINEREFYNRIRNDKVDFGEGLPEIGDVTQFWANLWENPTEHNGDGMWLAEEERQCDGIGDMAAVVVTTQDIREATRYTRNWAAPGPDFVHNFWYKKLTTIHGRMAECFNTVLRDPTQLPEFITRGVTFLLPKDQHTADPAKYRPITCLSSLYKVLSSVIARRVQAHCDANNVMTEEQKGCRRNTQACKDQVIVDAVIVGQATQKQRNLSMAYIDYKKAYNSVPHSYLLKVLQLYKVDGNVIRLMQHAMGMWSTSLHITDGTAVLRSRTLSIRRGIFQGDTFSPLWFCLAMNPLSKALNQCNYGYQLKSGERSTKVTHTFYMDDLKLFAESVQRLHQLLQLVTTFSNDIRMEFGIDKCRSIHLRRGQVMDASCFRVNEQEEIRNMVEGETYKYLGFLQLRGIRHTMIKKELQEKFLSRVNCILKSFLSAGNKVKAINTFAVPLLTYSFGVVKWTKTDLEAIERAVRVAFTKHRMRHPKSSIERVTLPRAAGGRGVTDIQALCVSQIQQLRAYFVESQNRHEIYRTVCEADHGFSALHLAQKDYQLNCDIKTVDEMIATWKQKELHGTHPHQLELEHIDKVASNTWLMRGDLFSETEGFMVAIQDRVIATKNYRHYILHEDVEDRCRKCNSVGETIEHVVAGCSVLAGSAYLDRHNEVAKIVHQQLALKHNLVDRFVPYYKYLPDPVLENSCIKLYWDREIITDVLIRANRPDIVVYDKRMKRVTLIDIAVPLDHNVQSTFSNKIAKYHDLAEELKQMWHLEDVRIVPVVLSATGIVPKSLLRSLNELELKKDLHSIQKAVILGTCSIVRRFLNHHN

SEQ ID NO: 9962 - protein, 1217 aa, Aedes albopictus
METRARRNRRMRSPEEGAPTGAGPGTGDRASGQRLEEEVVQERPSSQRAQPVPRTQSRNGSNSNHQGHAAPANVAVADRRQSLTLAGGRRQRIMWTREMNMYVIRCYFVCTRMETDMSGRSGMLEMFNERFPRFANQLDLNKLYTRQRAIMSHSMLTAAEVECIKLEAQRELGEERTRSSDTSRRSSDGLDASNASESRDTTAPTAPGPTADMQRQQLRDELALHMATAVTQFRGTDPMSRHRIPKLRNSYRLTSAVSILNQDILPQYLEAVQHLEDLQFTVYSAAVAVVKTLGLRTRPQGDGEGRTRPSTQKPAWMRRLENRIATLRTKIGRLTQYKQGNRSTRLVRYVAEIVKPAELRDLTEVNITEILDTHVQRLSALAKRLRRYGECSKRKEQNRMFNINEREFYNCIRNDKPDYGEGLPEIGEVTQFWANLWENPVQHSDDGMWLAEEERQCNGVGDMTAVVVTAQDIREATRYTRNWAAPGPDFVHNFWYKKLTTIHGRMAECFNMVLEDPTQLPEFITRGITYLLPKDQNTADPAKYRPITCLSSLYKVLSSVIARRIQTHCDANNVMTEEQKGCRKNTQGCKDQVIIDAVIVGQATDKQRNLSMAYIDYKKAYDSVPHSYLLKVLQLYKVDGNVIRLMQHAMGMWSTSLQITDGTAVLRSRTLSIRRGIFQGDTFSPLWFCLAMNPLSRALNQCNYGYQLKSGGRSTRITHTFFMDDLKLFAESVQRLHQLLQLVTVFSNDIRMEFGIDKCRSVHLRRGQVVDASCFRVNEQEEIRNMVEGEVYKYLGFLQLRGIRHTAIKKELQDKFLHRVNCVLRSFLSAGNKVKAINTFAVPLLTYSFGVVKWTKTDLEALERAVRVAFTKHRMRHPKSSIERVTLPRAVGGRGVTDIQALCVSQIQQLRAYFVESQNRHEMYRTVCEADHGYSALHLAQEDYQLNCDIKTVDEMIVTWKQKELHGTHPHQLELEHIDKAASNAWLVRGDLFSETEGFMVAIQDRVIATKNYRRYILHEDVEDRCRKCNSVGETIEHVVAGCSVLAGSAYLDRHNEVAKIVHQQLALKHNLVDRFVPYYKYQPDPVLENSCIKLYWDREIITDVLIRANRPDIVVFDKRMKRVTLIDIAVPLDHNVQSTFSGKITKYHDLAEELKQMWHLEDVRIVPVVLSATGIVPKSLLRSLDELELKKDLNSILKAVILGTCSIVRRFLNHHN

SEQ ID NO: 9963 - protein, 1217 aa, Aedes albopictus
METRARRNRRMRSPEEGAPTGAGPGTGDRASGQRLEEEVVQERPSSQRAQPVPRTQSRNGSNSNHQGHAAPANVAVADRRQSLTLAGGRRQRIMWTREMNMYMIRCYFVCTRMETDMSGRSGMLEMFNERFPRFANQLDLNKLYTRQRAIMSHNMLTAAEMECIKLEAQRELGEERTRSSDTSRRSSDELDASNASESRDTTAPTAPGPTADMQRQQLRDELALHMATAVTQFRGTDPMSRHRIPKLRNSYRLTSAVSILNQDILPQYLEAIQHLEDLQFTVYSAAVAVVKTLGLRTRPQGDGEGRTRPSTQKPAWMRRLENRIATLRTKIARLTQYKQGNRSTRLVRYVAEIVKPAELRDLTEVNITEILDTHVQRLSALAKRLRRYGECSKRKEQNRMFNINEREFYNCIRNDKPDYGEGLPEIGEVTQFWANLWENPVQHSDDGMWLAEEERQCNGVGDMTAVVVTAQDVREATRYTRNWAAPGPDFVHNFWYKKLTKIHGRMAECFNMVLEDPTQLPEFITRGITYLLPKDQNTADPAKYRPITCLSSLYKVLSSVIARRIQTHCDANNVMTEEQKGCRKNTQGCKDQVIIDAVIVGQATDKQRNLSMAYIDYKKAYDSVPHSYLLKVLQLYKVDGNVIRLMQHAMGMWSTSLQITDGTAVLRSRTLSIRRGIFQGDTFSPLWFCLAMNPLSRALNQCNYGYQLKSGGRSTRITHTFFMDDLKLFAESVQRLHQLLQLVTVFSNDIRMEFGIDKCRSVHLRRGQVVDASCFRVNEQEEIRNMVEGEVYKYLGFLQLRGIRHTAIKKELQDKFLHRINCVLRSFLSAGNKVKAINTFAVPLLTYSFGVVKWTKTDLEALERAVRVAFTKHRMRHPKSSIERVTLPRAVGGRGVTDIQALCVSQIQQLRAYFVESQNRHEMYRTVCEADHGYSALHLAQEDYQLNCDIKTVDEMIVTWKQKELHGTHPHQLELEHIDKAASNAWLVRGDLFSETEGFMVAIQDRVIATKNYRRYILHEDVEDRCRKCNSVGETIEHVVAGCSVLAGSAYLDRHNEVAKIVHQQLALKHNLIDRFVPYYKYQPDPVLENSCIKLYWDREIITDVLIRANRPDIVVFDKRMKRVTLIDIAVPLDHNVQSTFSGKITKYHDLAEELKQMWHLEDVRIVPVVLSATGVVPKSLLRSLDELELKKDLNSILKAVILGTCSIVRRFLNHHN

SEQ ID NO: 9964 - protein, 1217 aa, Aedes albopictus
METRARRNRRMRSPEEGAPTGAGPGTGDRASGQRLEEEVVQERPSSQRAQPVPRTQSRNGSNSNHQGHAAPANVAVADRRQSLTLAGGRRQRIMWTREMNMYVIRCYFVCTRMETDMSGRSGMLEMFNERFPRFANQLDLNKLYTRQRAIMSHNMLTAAEVECIKLEAQRELGEERTRSSDTSRRSSDGLDASNASESRDTTAPTAPGPTADMQRQQLRDELALHMATAVTQFRGTDPMSRHRIPKLRNSYRLTSAVSILNQDILPQYLEAVQHLEDLQFTVYSAAVAVVKTLGLRTRPQGDGEGRTRPSTQKPAWMRRLENRIATLRTKIGRLTQYKQGNRSTRLVRYVAEIVKPAELRDLTEVNITEILDTHVQRLSALAKRLRRYGECSKRKEQNRMFNINEREFYNCIRNDKPDYGEGLPEIGEVTQFWANLWENPVQHSDDGMWLAEEERQCNGVGDMTAVVVTAQDIREATRYTRNWAAPGPDFVHNFWYKKLTTIHGRMAECFNMVLEDPTQLPEFITRGITYLLPKDQNTADPAKYRPITCLSSLYKVLLSVIARRIQTHCDANNVMTEEQKGCRKNTQGCKDQVIIDAVIVGQATDKQRNLSMAYIDYKKAYDSVPHSYLLKVLQLYKVDGNVIRLMQHAMGMWSTSLQITDGTAVLRSRTLSIRRGIFQGDTFSPLWFCLAMNPLSRALNQCNYGYQLKSGGRSTRITHTFFMDDLKLFAESVQRLHQLLQLVTVFSNDIRMEFGIDKCRSVHLRRGQVVDASCFRVNEQEEIRNMVEGEVYKYLGFLQLRGIRHTAIKKELQDKFLHRVNCVLRSFLSAGNKVKAINTFAVPLLTYSFGVVKWTKTDLEALERAVRVAFTKHRMRHPKSSIERVTLPRAVGGRGVTDIQALCVSQIQQLRAYFVESQNRHEMYRTVCEADHGYSALHLAQEDYQLNCDIKTVDEMIVTWKQKELHGTHPHQLELEHIDKAASNAWLVRGDLFSETEGFMVAIQDRVIATKNYRRYILHEDVEDRCRKCNSVGETIEHVVAGCSVLAGSAYLDRHNEVAKIVHQQLALKHNLVDRFVPYYKYQPDPVLENSCIKLYWDREIITDVLIRANRPDIVVFDKRMKRVTLIDIAVPLDHNVQSTFSGKITKYHDLAEELKQMWHLEDVRIVPVVLSATGVVPKSLLRSLDELELKKDLNSILKAVILGTCSIVRRFLNHHN

SEQ ID NO: 9965 - protein, 1135 aa, Aedes albopictus
METRARRNRRMRSPEEGAPTGAGPGTGDRASGQRLEEEVVQERPSSQRAQPVPRTQSRNGSNSNHQGHAAPANVAVADRRQSLTLAGGRRQRIMWTREMNMYVIRCYFVCTRMETDMSGRSGMLEMFNERFPRFANQLDLNKLYTRQRAIMSHNMLTAAEVECIKLEAQRELGEERTRSSDTSRRSSDGLDASNASESRDTTAPTAPGPTADMQRQQLRDELALHMATAVTQFRGTDPMSRHRIPKLRNSYRLTSAVSILNQDILPQYLEAVQHLEDLQFTVYSAAVAVVKTLGLRTRPQGDGEGRTRPSTQKPAWMRRLENRIATLRTKIGRLTQYKQGNRSTRLVRYVAEIVKPAELRDLTEVNITEILDTHVQRLSALAKRLRRYGECSKRKEQNRMFNINEREFYNCIRNDKPDYGEGLPEIGEVTQFWANLWENPVQHSDDGMWLAEEERQCNGVGDMTAVVVTAQDVREATRYTRNWAAPGPDFVHNFWYKKLTTIHGRMAECFNMVLEDPTQLPEFITRGITYLLPKDQNTADPAKYRPITCLSSLYKVLSSVIARRIQTHCDANNVMTEEQKGCRKNTQGCKDQVIIDAVIVGQATDKQRNLSMAYIDYKKAYDSVPHSYLLKVLQLYKVDGNVIRLMQHAMGMWSTSLQITDGTAVLRSRTLSIRRGIFQGDTFSPLWFCLAMNPLSRALNQCNYGYQLKSGGRSTRITHTFFMDDLKLFAESVQRLHQLLQLVTVFSNDIRMEFGIDKCRSVHLRRGQVVDASCFRVNEQEEIRNMVEGEVYKYLGFLQLRGIRHTAIKKELQDKFLHRVNCVLRSFLSAGNKVKAINTFAVPLLTYSFGVVKWTKTDLEALERAVRVAFTKHRMRHPKSSIERVTLPRAVGGRGVTDIQALCVSQIQQLRAYFVESQNRHEMYRTVCEADHGYSALHLAQEDYQLNCDIKTVDEMIVTWKQKELHGTHPHQLELEHIDKAASNAWLVRGDLFSETEGFMVAIQDRVIATKNYRRYILHEDVEDRCRKCNSVGETIEHVVAGCSVLAGSAYLDRHNEVAKIVHQQLALKHNLVDRFVPYYKYQPDPVLENSCIKLYWDREIITDVLIRANRPDIVVFDKRMKRVTLIDIAVTVRP

SEQ ID NO: 9966 - protein, 901 aa, Aedes aegypti
MRRLESRIATLRSKVGRLIQYKQGNRSTRLVRHVAEIVRPAELRDLREVDITEILDTHVQRLSALAKRLRRYGECSKRKEQNRMFNINEREFYNRIRNDKVDFGDGLPEIGDVTQFWANLWENPTEHNGDGMWLAEEERQCDGIGDMTVVVVTAQDIREATRYTRNWAASGPDFVHNFWYKKLTTIHGRMAECFNTVLGDPTQLPEFITRGVTFLLPKDQHTADPAKYRPITCLSSLYKVLSSVIARRVQAHCDANNVMTEEQKGCRRNTQGCKNQVIVDAVIVGQATQKQRNLSMAYIDYKKAYDSVPHSYLLKVLQLYKVDGNVIRLMQHAMGMWSTSLHITDGTAVLLSRTLSIRRGIFQGDTFSPLWFCLAMNPLCKALNQCNYGYQLKSGERSTRVTHTFYIDDLKLFAESVQRQHQLLQLVTTFSNDIRMEFGIDKCRSIHLRRGQVMDASCFRVNEQEEIRNMVEGETYKYLGFLQLRGIRHTMIKKDLQEKFLSRVNCILKSFLSAGNKVKAINTFAVPLLTYSFGVVKWTKTDLEAIERAVRVAFTKHRRRHPKSSIERVTLPRAAGGRGVADIQALCVSQIQQLRAYFVESQNRHEIYRTVCEADHGFSALHLAQEDYQLNCDIQTVDEMIAMWKQKELHGTHPHQLELEHIDKVASNTWLVRGDLFSETEGFMVAIQDRVIATKNYRHYILHEDVEDRCRKCNSVGETIEHVVAGCSVLAGSAYLDRHNEVAKIVHQQLALKHNLVDRFVPYYKYLPDPVLENSCIKLYWDREIITDVLIRANRPDIVVYDKRMKRVTLIDIAVPLDHNVQSTFSNKIAKYHDLAEELKQMWHLEDVRIVPVVLSATGIVPKSLLRSLDELELKKDLHSIQKAVILGTCSIVRRFLNHHN

SEQ ID NO: 9967 - protein, 1082 aa, Aedes albopictus
METRARRNRRMRSPEEGAPTGAGPGTGDRASGQRLEEEVVQERPSSQRAQPVPRTQSRNGSNSNHQGHAAPANVAVADRRQSLTLAGGRRQRIMWTREMNMYVFIRCYFVCTRMETDMSGRSGMLEMFNERFPRFANQLDLNKLYTRQRAIMSHNMVTAAEVECIKLEAQRELGEERTRSSDTSRRSSDGLDASNASESRDTTAPTAPGPTADMQRQQLRDELALHMATAVTQFRGTDPMSRHRIPKLRNSYRLTSAVSILNQDILPQYLEAVQHLEDLQFTVYSAAVAVVKTLGLRTRPQGDGEGRTRPSTQKPAWMRRLENRIATLRTKIGRLTQYKQGNRSTRLVRYVAEIVKPAELRDLTEVNITEILDTHVQRLSALAKRLRRYGECSKRKEQNRMFNINEREFYNCIRNDKPDYGEGLPEIGEVTQFWANLWENPVQHSDDGMWLAEEERQCNGVGDMTAVVVTAQDIREATRYTRNWAAPGPDFVHNFWYKKLTTIHGRMAECFNMVLEDPTQLPEFITRGITYLLPKDQNTADPAKYRPITCLSSLYKVLSSVIARRIQTHCDANNVMTEEQKGCRKNTQGCKDQVIIDAVIVGQATDKQRNLSMAYIDYKKAYDSVPHSYLLKVLQLYKVDGNVIRLMQHAMGMWSTSLQITDGTAVLRSRTLSIRRGIFQGDTFSPLWFCLAMNPLSRALNQCNYGYQLKSGGRSTRITHTFFMDDLKLFAESVQRLHQLLQLVTVFSNDIRMEFGIDKCRSVHLRRGQVVDASCFRVNEQEEIRNMVEGEVYKYLGFLQLRGIRHTAIKKELQDKFLHRVNCVMRSFLSAGNKVKAINTFAVPLLTYSFGVVKWTKTDLEALERAVRVAFTKHRMRHPKSSIERVTLPRAVGGRGVTDIQALCVSQIQQLRAYFVESQNRHEMYRTVCEADHGYSALHLAQEDYQLNCDIKTVDEMIVTWKQKELHGTHPHQLELEHIDKAASNAWLVRGDLFSETEGFMVAIQDRVITTKNYRRYILHEDVEDRCRKCNSVGETIEHVVAGCSVLAGSAYLDRHNEVAKIVHQQLALTPSGRLFSPTSPL

SEQ ID NO: 9968 - protein, 1217 aa, Aedes albopictus
METRARRNRRMRSPEEGAPTGAGPGTGDRASGQRLEEEVVQERPSSQRAQPVPRTQSRNGSNSNHQGHAAPANVAVADRRQSLTLAGGRRQRIMWTREMNMYVIRCYFVCTRMETDMSGRSGMLEMFNERFPRFANQLDLNKLYTRQRAIMSHNMLTAAEVECIKLEAQRELGEERTRSSDTSRRSSDGLDASNASESRDTTAPTAPGPTADMQRQQLRDELALHMATAVTQFRGTDPMSRHRIPKLRNSYRLTSAVSILNQDILPQYLEAVQHLEDLQFTVYSAAVAVVKTLGLRTRPQGDGEGRTRPSTLKPAWMRRLENRIATLRTKIGRLTQYKQGNRSTRLVRYVAEIVKPAELRDLTEVNITEILDTHVQRLSALAKRLRRYGECSKRKEQNRMFNINEREFYNCIRNDKPDYGEGLPEIGEVTQFWANLWENPVQHSDDGMWLAEEERQCNGVGDMTAVVVTAQDVREATRYTRNWAAPGPDFVHNFWYKKLTTIHGRMAECFNMVLEDPTQLPEFITRGITYLLPKDQNTADPAKYRPITCLSSLYKVLSSVIARRIQTHCDTNNVMTEEQKGCRKNTQGCKDQVIIDAVIVGQATDKQRNLSMAYIDYKKAYDSVPHSYLLKVLQLYKVDGNVIRLMQHAMGMWSTSLQITDGTAVLRSRTLSIRRGIFQGDTFSPLWFCLAMNPLSRALNQCNYGYQLKSGVRSTRITHTFFMDDLKLFAESVQRLHQLLQLVTVFSNDIRMEFGIDKCRSVHLRRGQVVDASCFRVNEQEEIRNMVEGEVYKYLGFLQLRGIRHTAIKKELQDKFLHRVNCVLRSFLSAGNKVKAINTFAVPLLTYSFGVVKWTKTDLEALERAVRVAFTKHRMRHPKSSIERVTLPRAVGGRGVTDIQALCVSQIQQLRAYFVESQNRHEMYRTVCEADHGYSALHLAQEDYQLNCDIKTVDEMIVTWKQKELHGTHPHQLELEHIDKAASNAWLVRGDLFSETEGFMVAIQDRVIATKNYRRYILHEDVEDRCRKCNSVGETIEHVVAGCSVLAGSAYLDRHNEVAKIVHQQLALKHNLVDRFVPYYKYQPDPVLENSCIKLYWDREIITDVLIRANRPDIVVFDKRMKRVTLIDIAVPLDHNVQSTFSGKITKYHDLAEELKQMWHLEDVRIVPVVLSATGVVPKSLLRSLDELELKKDLNSIQKAVILGTCSIVRRFLNHHN

SEQ ID NO: 9969 - protein, 1217 aa, Aedes albopictus
METRARRNRRMRSPEEGAPTGAGPGTGDRASGQRLEEEVVQERPSSQRAQPVPRTQSRNGSNSNHQGHAAPVNVAVADRRQSLTLAGGRRQRIMWTREMNMYVIRCYFVCTRMETDTSGRSGMLEMFNERFPRFANQLDLNKLYTRQRAIMSHNMLTAAEVECIKLEAQRELGEERTRSSDTSRRSSDGLDASNASESRDTTAPTAPGPTADMQRQQLRDELALHMATAVTQFRGTDPMSRYRIPKLRNSYRLTSAVSILNQDILPQYLEAVQHLEDLQFTVYSAAVAVVKTLGLRTRPQGDGEGRTRPSTQKPAWMRRLENRIATLRTKIGRLTQYKQGNRSTRLVRYVAEIVKPAELRDLTEVNITEILDTHVQRLSALAKRLRRYGECSKRKEQNRMFKINEREFDNCIRNDKPDYGEGLPEIGEVTQFWANLWENPVQHSDDGMWLAEEERQCNGVGDMTAVVVTAQDVREATRYTRNWAAPGPDFVHNFWYKKLTTIHGRMAECFNMVLEDPTQLPEFITRGITYLLPKDQNTADPAKYRPITCLSSLYKVLSSVIARRIQTHCDANNVMTEEQKGCRKNTQGCKDQVIIDAVIVGQATDKQRNLSMAYIDYKKAYDSVPHSYLLKVLQLYKVDGNVIRLMQHAMGMWSTSLQITDGTAVLRSRTLSIRRGIFQGDTFSPLWFCLAMNPLSRALNQCNYGYQLKSGGRSTRITHTFFMDDLKLFAESVQRLHQLLQLVTVFSNDIRMEFGIDKCRSVHLRRGQVVDASCFRVNEQEEIRNMVEGEVYKYLGFLQLRGIRHTAIKKELQDKFLHRVNCVLRSFLSAGNKVKAINTFAVPLLTYSFGVVKWTKTDLEALERAVRVAFTKHRMRHPKSSIERVTLPRAVGGRGVTNIQALCVSQIQQLRAYFVESQNRHEMYRTVCEADHGYSALHLAQEDYQLNCDIKTVDEMIVTWKQKELHGTHPHQLELEHIDKAASNAWLVRGDLFSETEGFMVAIQDRVIATKNYRRYILHEDVEDRCRKCNSVGETIEHVVAGCSVLAGSAYLDRHNEVAKIVHQQLALKHNLVDRFVPYYKYQPDPVLENSCIKLYWDREIITDVLIRANRPDIVVFDKRMKRVTLIDIAVPLDHNVQSTFSGKITKYHDLAEELKQMWHLEDVRIVPVVLSATGIVPKSLLRSLDELELKKDLNSILKAVILGTCSIVRRFLNHHN

SEQ ID NO: 9970 - protein, 901 aa, Aedes albopictus
MRRLENRIATLRTKIGRLTQYKQGNRSTRLVRYVAEIVKPAELRDLTEVNITEILDTHVQRLSALAKRLRRYGECSKRKEQNRMFNINEREFYNCIRNDKPDYGEGLPEIGEVTQFWANLWENPVQHSDDGMWLAEEERQCNGVGDMTAVVVTAQDIREATRYTRNWAAPGPDFVHNFWYKKLTTIHGRMAECFNMVLEDPTQLPEFITRGITYLLPKDQNTADPAKYRPITCLSSLYKVLSSVIARRIQTHCDANNVMTEEQKGCRKNTQGCKDQVIIDAVIVGQATDKQRNLSMAYIDYKKAYDSVPHSYLLKVLQLYKVDGNVIRLMQHAMGMWSTSLQITDGTAVLRSRTLSIRRGIFQGDTFSPLWFCLAMNPLSRALNQCNYGYQLKSGGRSTRITHTFFMDDLKLFAESVQRLHQLLQLVTVFSNDIRMEFGIDKCRSVHLRRGQVVDASCFRVNEQEEIRNMVEGEVYKYLGFLQLRGIRHTAIKKELQDKFLHRVNCVLRSFLSAGNKVKAINTFAVPLLTYSFGVVKWTKTDLEALERAVRVAFTKHRMRHPKSSIERVTLPRAVGGRGVTDIQALCVSQIQQLRAYFVESQNRHEMYRTVCEADHGYSALHLAQEDYQLNCDIKTVDEMIVTWKQKELHGTHPHQLELEHIDKAASNAWLVRGDLFSETEGFMVAIQDRVIATKNYRRYILHEDVEDRCRKCNSVGETIEHVVAGCSVLAGSAYLDRHNEVAKIVHQQLALKHNLVDRFVPYYKYQPDPVLENSCIKLYWDREIITDVLIRANRPDIVVFDKRMKRVTLIDIAVPLDHNVQSTFSGKITKYHDLAEELKQMWHLEDVRIVPVVLSATGVVPKSLLRSLDELELKKDLNSILKAVILGTCSIVRRFLNHHN

SEQ ID NO: 9971 - protein, 863 aa, Aedes albopictus
MRRLENRIATLRTKIGRLTQYKQGNRSTRLVRYVAEIVKPAELRDLTEVNITEILDTHVQRMSALAKRLRRYGECSKRKEQNRMFNINEREFYNCIRNDKPDYGEGLPEIGEVTQFWANLWENPVQHSDDGMWLAEEERQCNGVGDMTAVVVTAQDVREATRYTRNWAAPGPDFVHNFWYKKLTTIHGRMAECFNMVLEDPTQLPEFITRGITYLLPKDQNTADPAKYRPITCLSSLYKVLSSVIARRIQTHCDANNVMTEEQKGCRKNTQGCKDQVIIDAVIVGQATDKQRNLSMAYIDYKKAYDSVPHSYLLKVLQLYKVDGNVIRLMQHAMGMWSTSLQITDGTAVLRSRTLSIRRGIFQGDTFSPLWFCLAMNPLSRALNQCNYGYQLKSGGRSTRITHTFFMDDLKLFAESVQRLPQLLQLVTVFSNDIRMEFGIDKCRSVHLRRGQVVDASCFRVNEQEEIRNMVEGEVYKYLGFLQLRGIRHTAIKKELQDKFLHRVNCVLRSFLSAGNKVKAINTFAVPLLTYSFGVVKWTKTDLEALERVVRVAFTKHRMRHPKSSIERVTLPRAVGGRGVTDIQALCVSQIQQLRAYFVESQNRHEMYRTVCEADHGYSALHLAQEDYQLNCDIKTVDEMIVTWKQKELHGTHPHQLELEHIDKAASNAWLVRGDLFSETEGFMVAIQDRVIATKNYRRYILHEDVEDRCRKCNSVGETIEHVVAGCSVIAGSAYLDRHNEVAKIVHQQLALKHNLVDRFIPYYKYQPDPVLENSCIKLYWDREIITDVLIRANRPDIVVFDKRMKRVTLIDIAVPLDHNVQSTFSGKITKYVPRPSGGVEADVAPGGRPYSSGCPLGNRSCP

SEQ ID NO: 9972 - protein, 1221 aa, Aedes aegypti
MKANPAMETRSMRNRRMRSPEEGAPTGAGPGTGDRASGQRLEEDNVQERPSSQRAQPVPRTRNRNGSSRNHQGHAAPTDVAVADRRQSLTLAGGRRQRIMWTREMNMYVIRCYYVCTRMETDMSGRSGMLEMFNERFPRFARQLDLNKLYTRQRAIMSHNMLTAAEVEYIKLEVQREIGEEGTRSSDTSRRSSVGLDASITSESRDSPAPTAPGPTADMQRQQLRDELALHMGTAVTQFRGTDPMSRHRIPKLRYSYRLTSAVSILNQDILPQYLEAVENLEDLQFIVYSAAIAVVKTLGLRTRPQGEDGTRPNAQKPVWMRRLESRIATLRSKVGRLTQYKQGNRSTRLVRHVAEIVRPAELRDLREVDITEILDTHVQRLSALAKRLRRYGECSKRKEQNRMFNINEREFYNRIRNDKVDFGEGLPEIGDVTQFWANLWENPTEHNGDGMWLAEEERQCDGIGDMTAVVVTAQDIREATRYTRNWAAPGPDFVHNFWYKKLTTIHGRMAECFNTVLGDPTQLPEFITRGVTFLLPKDQHTADPAKYRPITCLSSLYKVLSSVIARRVQAHCDANNVMTEEQKGCRRNTQGCKDQVIVDAVIVGQATQKQRNLSMAYIDYKKAYDSVPHSYLLKVLQLYKVDGNVIRLMQHAMGMWSTSLHITDGTAVLRSRTLSIRRGIFQGDTFSPLWFCLAMNPLSKALNQCNYGYQLKSGERSTRVTHTFYMDDLKLFAESVQRLHQLLQLVTTFSNDIRMEFGIDKCRSIHLRRGQVMDASCFRVNEQEEIRNMVEGETYKYLGFLQLRGIRHTMIKKELQEKFLSRVNCILKSFLSAGNKVKAINTFAVPLLTYSFGVVKWTKTDLKAIERAVRVAFTKHRLRHPKSSIERVTLPRAAGGRGVTDIQALCVSQIQQLRAYFVESQNRHEIYRTVCEADHGFSALHLAQEDYQLNCDIKTVDEMIAMWKQKELHGTHPHQLELEHIDKVASNTWLVRGDLFSETEGFMVAIQDRVIATKNYRHYILHEDVEDRCRKCNSVGETIEHVVAGCSVLAGSAYLDRHNEVAKIVHQQLALKHNLVDRFVPYYKYLPDPVLENSCIKLYWDREIITDVLIRANRPDIVVYDKRMKRVTLIDIAVPLDHNVQSTFSNKIAKYHDLAEELKQMWHLEDVRIVPVVLSATGIVPKSLLRSLDELELKKDLHSIQKAVILGTCSIVRRFLNHHN

SEQ ID NO: 9973 - protein, 1217 aa, Aedes albopictus
METRARRNRRMRSPEEGAPTGAGPGTGDRASGQRLEEEVVQERPSSQRAQPVPRTQSRNGSNSNHQGHAAPANVAVADRRQSLTLAGGRRQRIMWTREMNMYVIRCYFVCTRMETDMSGRSGMLEMFNERFPRFANQLDLNKLYTRQRAIMSHNMLTAAEVECIKLEAQRELGEERTRSSDTSRRSSDGLDASNASESRDTTAPTAPGPTADMQRQQLRDELALHMATAVTQFRGTDPMSRHRIPKLRNSYRLTSAVSILNQDILPQYLEAVQHLEDLQFTVYSAAVAVVKTLGLRTRPQGDGEGRTRPSTQKPAWMRRLENRIATLRTKIGRLTQYKQGNRSTRLVRYVAEIVKPAELRDLTEVNITEILDTHVQRLSALAKRLRRYGECSKRKEQNRMFNINEREFYNCIRNDKPDYGEGLPEIGEVTQFWANLWENPVQHSDDGMWLAEEERQCNGVGDMTAVVVTAQDIREATRYTRNWAAPGPDFVHNFWYKKLTTIHGRMAECFNMVLEDPTQLPEFITRGITYLLPKDQNTADPAKYRPITCLSSLYKVLSSVIARRIQTHCDANNVMTEEQKGCRKNTQGCKDQVIIDAVIVGQATDKQRNLSMAYIDYKKAYDSVPHSYLLKVLQLYKVDGNVIRLMQHAMGMWSTSLQITDGTAVLRSRTLSIRRGIFQGDTFSPLWFCLAMNPLSRALNQCNYGYQLKSGGRSTRITHTFFMDDLKLFAESVQRLHQLLQLVTVFSNDIRMEFGIDKCRSVHLRRGQVVDASCFRVNEQEEIRNMVEGEVYKYLGFLQLRGIRHTAIKKELQDKFLHRVNCVLRSFLSAGNKVKAINTFAVPLLTYSFGVVKWTKTDLEALERAVRVAFTKHRMRHPKSSIERVTLPRAVGGRGVTDIQALCVSQIQQLRAYFVESQNRHEMYRTVCEADHGYSALHLAQEDYQLNCDIKTVDEMIVTWKQKELHGTHPHQLELEHIDKAASNAWLVRGDLFSETEGFMVAIQDRVIATKNYRRYILHEDVEDRCRKCNSVGETIEHVVAGCSVLAGSAYLDRHNEVAKIVHQQLALKHNLVDRFVPYYKYQPDPVLENSCIKLYWDREIITDVLIRANRPDIVVFDKRMKRVTLIDIAVPLDHNVQSTFSGKITKYHDLAEELKQMWHLEDVRIVPVVLSATGVVPKSLLRSLDELELKKDLNSILKAVILGTCSIVRRFLNHHN

SEQ ID NO: 9974 - protein, 1124 aa, Aedes albopictus
MWTREMNMYVIRCYFVCTRMETDMSGRSGMLEMFNERFPRFANQLDLNKLYTRQRAIMSHNMLTAAEVECIKLEAQRELGEERTRSSDTSRRSSDGLDASNASESRDTTAPTAPGPTADMQRQQLRDELALHMATAVTQFRGTDPMSRHRIPKLRNSYRLTSAVSILNQDILPQYLEAVQHLEDLQFTVYSAAVAVVKTLGLRTRPQGDGEGRTRPSTQKPAWMRRLENRIATLRTKIGRLTQYKQGNRSTRLVRYVAEIVKPAELRDLTEVNITEILDTHVQRLSALAKRLRRYGECSKRKEQNRMFNINEREFYNCIRNDKPDYGEGLPEIGEVTQFWANLWENPVQHSDDGMWLAEEERQCNGVGDMTAVVVTAQDVREATRYTRNWAAPGPDFVHNFWYKKLTTIHGRMAECFNMVLEDPTQLPEFITRGITYLLPKDQNTADPAKYRPITCLSSLYKVLSSVIARRIQTHCDANNVMTEEQKGCRKNTQGCKDQVIIDAVIVGQATDKQRNLSMAYIDYKKAYDSVPHSYLLKVLQLYKVDGNVIRLMQHAMGMWSTSLQITDGTAVLRSRTLSIRRGIFQGDTFSPLWFCLAMNPLSRALNQCNYGYQLKSGGRSTRITHTFFMDDLKLFAESVQRLHQLLQLVTVFSNDIRMEFGIDKCRSVHLRRGQVVDASCFRVNEQEEIRNMVEGEVYKYLGFLQLRGIRHTAIKKELQDKFLHRVNCVLRSFLSAGNKVKAINTFAVPLLTYSFGVVKWTKTDLEALERAVRVAFTKHRMRHPKSSIERVTLPRAVGGRGVTDIQALCVSQIQQLRAYFVESQNRHEMYRTVCEADHGYSALHLAQEDYQLNCDIKTVDEMIVTWKQKELHGTHPHQLELEHIDKAASNAWLVRGDLFSETEGFMVAIQDRVIATKNYRRYILHEDVEDRCRKCNSVGETIEHVVAGCSVLAGSAYLDRHNEVAKIVHQQLALKHNLVDRFVPYYKYQPDPVLENSCIKLYWDREIITDVLIRANRPDIVVFDKRMKRVTLIDIAVPLDHNVQSTFSGKITKYHDLAEELKQMWHLEDVRIVPVVLSATGVVPKSLLRSLDELELKKDLNSILKAVILGTCSIVRRFLNHHN

SEQ ID NO: 9975 - protein, 1218 aa, Aedes aegypti
MKANPAMETRSMRNRRMRSPEEGAPTGAGPGTGDRASGQRLEEDNVQERPSSQRAQPVPRTQNRNGSSRNHQGHVAPTDVAVADRRQSLTLAGGRRQRIMWTREMNMYVIRCYYVCTRMETDMSGRSGMLEMFNERFPRFARQLDLNKLYTRQRAIMSHNMLTAAEVEYIKLEVQREIGEEGTRSSDTSRRSSVGLDAPITSESRDSPAPTAPGPTADMQRQQLRDELALHMGTAVTQFRGTDPMSRHRIPKLRYSYRLTSAVSILNQDILPQYLEAVENLEDLQFIVYSAAIAVVKTLGLRTRPQGEDGTRPNAQKPVWMRRLESRIATLRSKVGRLTQYKQGNRSTRLVRHVAEIVRPAELRDLREVDITEILDTHVQRLSALAKRLRRYGECSKRKEQNRMFNINEREFYNRIRNDKVDFGEGLPEIGDVTQFWANLWENPTEHNDDGMWLAEEGRQCDGIGDMTAVVVTAQDIREATRYTRNWAAPGPDFVHNFWYKKLTTIHGRMAECFNTVLGDPTQLPEFITRGVTFLLPKDQHTADPAKYRPITCLSSLYKVLSSVIARRVQAHCDANNVMTEEQKGCRRNTQGCKDQVIVDAVIVGQATQKQRNLSMAYIDYKKAYDSVPHSYLLKVLQLYKVDGNVIRLMQHAMGMWSTSLHITDGTAVLRSRTLSIRRGIFQGDTFSPLWFCLAMNPLSKALNQCNYGYQLKSGERSTRVTHTFYMDDLKLFAESVQRLHQLLQLVTTFSNDIRMEFGIDKCRSIHLRRGQVMDASCFRVNEQEEIRNMVEGETYKYLGFLQLRGIRHTMIKKELQEKFLSRVNCILKSFLSAGNKVKAINTFAVPLLTYSFGVVKWTKTDLEAIERAVRVAFTKHRMRHPKSSIERVTLPRAAGGRGVTDIQALCVSQIQQLRAYFVESQNRHEIYRTVCEADHGFSALHLAQEDYQLNCDIKTVDEMIAMWKQKELHGTHPHQLELEHIDKVASNTWLVRGDLFSETEGFMVAIQDRVIATKNYRHYILHEDVEDRCRKCNSVGETIEHVVAGCSVLAGSAYLDRHNEVAKIVHQQLALKHNLVDRFVPYYKYLPDPVLENSCIKLYWDREIITDVLIRANRPDIVVYDKRMKRVTLIDIAVPLDHNVQSTFSNKIAKYHDLAEELKQMWHLEDVPVVLSATGIVPKSLLRSLDELELKKDLHSIQKGVILGTCSIVRRFLNHHN

SEQ ID NO: 9976 - protein, 1217 aa, Aedes albopictus
METRARRNRRMRSPEEGAPTGAGPGTGDRASGQRLEEEVVQERPSSQRAQPVPRTQSRNGSNSNHQGHAAPVNVAVADRRQSLTLAGGRRQRIMWTREMNMYVIRCYFVCTRMETDTSGRSGMLEMFNERFPRFANQLDLNKLYTRQRAIMSHNMLTAAEVECIKLEAQRELGEERTRSSDTSRRSSDGLDASNASESRDTTAPTAPGPTADMQRQQLRDELALHMATAVTQFRGTDPMSRHRIPKLRNSYRLTSAVSILNQDILPQYLETVQHLEDLQFTVYSAAVAVVKTLGLRTRPQGDGEGRTRPSTQKPAWMRRLENRIATLRTKIGRLTQYKQGNRSTRLVRYVAEIVKPAELRDLTEVNITEILDTHVQRLSALAKRLRRYGECSKRKEQNRMFNINEREFYNCIRNDKPDYGEGLPEIGEVTQFWANLWENPVQHSNDGMWLAEEERQCNGVGDMTAVVVTAQDIREATRYTRNWAAPGPDFVHNFWYKKLTTIHGRMAECFNMVLEDPTQLPEFITRGITYLLPKDQNTADPAKYRPITCLSSLYKVLSSVIARRIQTHCDANNVMTEEQKGCRKNTQGCKDQVIIDAVIVGQATDKQRNLSMAYIDYKKAYDSVPHSYLLKVLQLYKVDGNVIRLMQHAMGMWSTSLQITDGTAVLRSRTLSIRRGIFQGDTFSPLWFCLAMNPLSRALNQCNYGYQLKSGGRSTRITHTFFMDDLKLFAESVQRLHQLLQLVTVFSNDIRMEFGIDKCRSVHLRRGQVVNASCFRVNEQEEIRNMVEGEVYKYLGFLQLRGIRHTAIKKELQDKFLHRVNCVLRSFLSAGNKVKAINTFAVPLLTYSFGVVKWTKTDLEALERAVRVAFTKHRMRHPKSSIERVTLPRAVGGRGVTDIQALCVSQIQQLRAYFVESQNRHEMYRTVCEADHGYSALHLAQEDYQLNCDIKTVDEMIVTWKQKELHGTHPHQLELEHIDKAASNAWLVRGDLFSETEGFMVAIQDRVIATKNYRRYILHEDVEDRCRKCNSVGETIEHVVAGCSVLAGSAYLDRHNEVAKIVHQQLALKHNLVDRFVPYYKYQPDPVLENSCIKLYWDREIITDVLIRANRPDIVVFDKRMKRVTLIDIAVPLDHNVQSTFSGKITKYHDLAEELKQMWHLEDVRIVPVVLSATGVVPKSLLRSLDELELKKDLNSILKAVILGTCSIVRRFLNHHN

SEQ ID NO: 9977 - protein, 1067 aa, Aedes albopictus
MSHNMLTAAEVECIKLEAQRKLGEERTRSSDTSRRSSDGLDASNASESRDTTAPTAPGPTADMQRQQLRDELALHMATAVTQFRGTDPMSRHRIPKLRNSYRLTSAVSILNQDILPQYLEAVQHLEDLQFTVYSAAVAVVKTLGLRTRPQGDGEGRTRPSTQKPAWMRRLENRIATLRTKIGRLTQYKQGNRSRRLVRYVAEIVKPAELRDLTEVNITEILDTHVQRLSALAKRLRRYGECSKRKEQNRMFNINEREFYNCIRNDKPDYEEGLPEIGEVTQFWANLWENPVQHSDDGMWLAEEERQCNGVGNMTAVVVTAQDVREATRYTRNWAAPGPDFVHNFWYKKLTTIHGRMAECFNMVLEDPTQLPEFITRGITYLLPKDQNTADPAKYRPITCLSSLYKVLSSVIARRIQTHCDANNVMTEEQKGCRKNTQGCKDQVIIDAVIVGQATDKQRNLSMAYIDYKKAYDSVPHSYLLKVLQLYKVDGNVIRLMQHAMGMWSTSLQITDGTAVLRSRTLSIRRGIFQGDTFSPLWFCLAMNPLSRALNQCNYGYQLKSGGRSTRITHTFFMDDLKLFAESVQRLHQLLQLVTVFSNDIRMEFGIDKCRSVHLRRGQVVDASCFRVNEQEEIRNMVEGEVYKYLGFLQLRGIRHTAIKKELQDKFLHRVNCVLRSFLSASNKVKAINTFAVPLLTYSFGVVKWTKTDLEALERAVRVAFTKHRMRHPKSSIERVTLPRAVGGRGVTDIQALCVSQIQQLRAYFVESQHRHEMYRTVCEADHGYSALHLAQEDYQLNCDIKTVDEMIVTWKQKELHGTHPHQLELEHIDKAASNAWLVRGDLFSETEGFMVAIQDRVIATKNYRRYILHEDVEDRCRKCNSVGETIEHVIAGCSVLAGSAYLDRHNEVAKIVHQQLALKHNLVDRFVPYYKYQPDPVLENSCIKLYWDREIITDVLIRANRPDIVVFDKRMKRVTLIDIAVPLDHNVQSTFSGKITKYHDLAEELKQMWHLEDVRIVPVVLSATGVVPKSLLRSLDELELKKDLNSILKAVILGTCSIVRRFLNHHN

SEQ ID NO: 9978 - protein, 901 aa, Aedes aegypti
MRRLESRIATLRSKVGRLTQYKQGNRSTRLVRHVAEIVRPAELRDLREVDITEILDTHVQRLSALAKRLRRYGECSKRKEQNRMFNINEREFYNRIRNDKVDFGEGLPEIGDVTQFWANLWENPTEHNGDGMWLAEEERQCDGIGDMAAVVVTTQDIREATRYTRNWAAPGPDFVHNFWYKKLTTIHGRMAECFNTVLRDPTQLPEFITRGVTFLLPKDQHTADPAKYRPITCLSSLYKVLSSVIARRVQAHCDANNVMTEEQKGCRRNTQACKDQVIVDAVIVGQATQKQRNLSMAYIDYKKAYNSVPHSYLLKVLQLYKVDGNVIRLMQHAMGMWSTSLHITDGTAVLRSRTLSIRRGIFQGDTFSPLWFCLAMNPLSKALNQCNYGYQLKSGERSTKVTHTFYMDDLKLFAESVQRLHQLLQLVTTFSNDIRMEFGIDKCRSIHLRRGQVMDASCFRVNEQEEIRNMVEGETYKYLGFLQLRGIRHTMIKKELQEKFLSRVNCILKSFLSAGNKVKAINTFAVPLLTYSFGVVKWTKTDLEAIERAVRVAFTKHRMRHPKSSIERVTLPRAAGGRGVTDIQALCVSQIQQLRAYFVESQNRHEIYRTVCEADHGFSALHLAQKDYQLNCDIKTVDEMIATWKQKELHGTHPHQLELEHIDKVASNTWLMRGDLFSETEGFMVAIQDRVIATKNYRHYILHENVEDRCRKCNSVGETIEHVVAGCSVLAGSAYLDRHNEVAKIVHQQLALKHNLVDRFVPYYKYLPDPVLENSCIKLYWDREIITDVLIRANRPDIVVYDKRMKRVTLIDIAVPLDHNVQSTFSNKIAKYHDLAEELKQMWHLEDVRIVPVVLSATGIVPKSLLRSLNELELKKDLHSIQKAVILGTCSIVRRFLNHHN

SEQ ID NO: 9979 - protein, 1005 aa, Aedes albopictus
MQRQQLRDELALHMATAVTQFRGTDPMSRHRIPKLRNSYRLTSAVSILNQDILPQYLEAVQHLEDLQFTVYSAAVAVVKTLGLRTRPQGDGEGRTRPSTQKPAWMRRLENRIATLRTKIGRLTQYKQGNRSTRLVRYVAEIVKPAELRDLTEVNITEILDTHVQRLSALAKRLRRYGECSKRKEQNRMFNINEREFYNCIRNDKPDYGEGLPEIGEVTQFWANLWENPVQHSDDGMWLAEEERQCNGVGDMTAVVVTAQDVREATRYTRNWAAPGPDFVHNFWYKKLTTIHGRMAECFNMVLEDPTQLPEFITRGITYLLPKDQNTADPAKYRPITCLSSLYKVLSSVIARRIQTHCDANNVMTEEQKGCRKNTQGCKDQVIIDAVIVGQAADKQRNLSMAYIDYKKAYDSVPHSYLLKVLQLYKVDGNVIRLMQHAMGMWSTSLQITDGTAVLRSRTLSIRRGIFQGDTFSPLWFCLAMNPLSRALNQCNYGYQLKSGGRSTRITHTFFMDDLKLFAESVQRLHQLLQLVTVFSNDIRMEFGIDKCRSVHLRRGQVVDASCFRVNEQEEIRNMVEGEVYKYLGFLQLRGIRHTAIKKELQDKFLHRVNCVLRSFLSAGNKVKAINTFAVPLLTYSFGVVKWTKTDLEALERAVRVAFTKHRMRHPKSSIERVTLPRAVGGRGVTDIQALCVSQIQQLRAYFVESQNRHEMYRTVCEADHGYSALHLAQEDYQLNCDIKTVDEMIVTWKQKELHGTHPHQLELEHIDKAASNAWLVRGDLFSETEGFMVAIQDRVIATKNYRRYILHEDVEDRCRKCNSVGETIEHVVAGCSVLAGSAYLDRHNEVAKIVHQQLALKHNLVDRFVPYYKYQPDPVLENSCIKLYWDREIITDVLIRANRPDIVVFDKRMKRVTLIDIAVPLDHNVQSTFSGKITKYHDLAEELKQMWHLEDVRIVPVVLSATGVVPKSLLRSLDELELKKDLNSILKAVILGTCSIVRRFLNHHN

SEQ ID NO: 9980 - protein, 1217 aa, Aedes albopictus
METRARRNRRMRSPEEGAPTGAGPGTGDRASGQRLEEEVVQERPSSQRAQPVPRTQSRNGSNSNHQGHAAPANVAVADRRQSLTLAGGRRQRIMWTREMNMYVIRCYFVCTRMETDMSGRSGMLEMFNERFPRFANQLDLNKLYTRQRAIMSHNMLTAAEVECIKLEAQRELGEERTRSSDTSRRSSDGLDASNASESRDTTAPTAPGPTADMQRQQLRDELALHMATAVTQFRGTDPMSWHRIPKLRNSYRLTSAVSILNQDILPQYLEAVQHLEDLQFTVYSAAVAVVKTLGLRTRPQGDGEGRTRPSTQKPAWMRRLENRIATLRTKIGRLTQYKQGNRSTRLVRYVAESVKPAELRDLTEVNITEILDTHVQRLSALAKRLRRYGECSKRKEQNRMFNINEREFYNCIRNDKPDYGEGLPEIGEVTQFWANLWENPVQHSDDGMWLAEEERQCNGVGDMTAVVVTAQDVREATRYTRNWAAPGPDFVHNFWYKKLTTIHGRMAECFNMVLEDPTQLPEFITRGITYLLPKDQNTADPAKYRPITCLSSLYKVLSSVIARRIQAHCDANNVMTEEQKGCRKNTQGCKDQVIIDAVIVGQATDKQRNLSMAYIDYKKAYDSVPHSYLLKVLQLYKVDGNVIRLMQHAMGMWSTSLQITDGTAVLRSRTLSIRRGIFQGDTFSPLWFCLAMNPLSRALNQCNYGYQLKSGGRSTRITHTFFMDDLKLFAESVQRLHQLLQLVTVFSNDIRMEFGIDKCRSVHLRRGQVVDASCFRVNEQEEIRNMVEGEVYKYLGFLQLRGIRHTAIKKELQDKFLHRVNCVLRSFLSAGNKVKAINTFAVPLLTYSFGVVKWTKTDLDALERAVRVAFTKHRMRHPKSSIERVTLPRAVGGRGVTDIQALCVSQIQQLRAYFVESQNRHEMYLTVCEADHGYSALHLAQEDYQLNCDIKTVDEMIVTWKQKELHGTHPHQLELEHIDKAASNAWLVRGDLFSETEGFMVAIQDRVIATKNYRRYILHEDVEDRCRKCNSVGETIEHVVAGCSVLAGSAYLDRHNEVAKIVHQQLALKHNLVDRFVPYYKYQPDPVLENSCIKLYWDREIITDVLIRANRPDIVVFDKRMKRVTLIDIAVPLDHNVQSTFSGKITKYHDLAEELKQMWHLEDVRIVPVVLSATGVVPKSLLRSLDELELKKDLNSILKAVILGTCSIVRRFLNHHN

SEQ ID NO: 9981 - protein, 1217 aa, Aedes albopictus
METRARRNRRMRSPEEGAPTGAGPGTGDRASGQRLEEEVVQERPSSQRAQPVPRTQSRNGSNSNHQGHAAPANVAVADRRQSLTLAGGRRQRIMWTREMNMYVIRCYFVCTRMETDMSGRSGMLEMFNERFPRFANQLDLNKLYTRQRAIMSHNMLTAAEVECIKLEAQRELGEERTRSSDTSRRSSDGLDASNASESRDTTAPTAPGPTADMQRQQLRDELALHMATAVTQFRGTDPMSRHRIPKLRNSYRLTSAVSILNQDILPQYLEAVQHLEDLQFTVYSAAVAVVKTLGLRTRPQGDGEGRTRPSTQKPAWMRRLENRIATLRTKIGRLTQYKQGNRSTRLVRYVAEIVKPAELRDLTEVNITEILDTHVQRLSALAKRLRRYGECSKRKEQNRMFNINEREFYNCIRNDKPDYGEGLPEIGEVTQFWANLWENPVQHSDDGMWLAEEERQCNGVGDMTAVVVTAQDVREATRYTRNWAAPGPDFVHNFWYKKLTTIHGRMAECFNMVLEDPTQLPEFITRGITYLLPKDQNTADPAKYRPITCLSSLYKVLSSVIARRIQTHCDANNVMTEEQKGCRKNTQGCKDQVIIDAVIVGQATDKQRNLNMAYIDYKKAYDSVPHSYLLKVLQLYKVDGNVIRLMQHAMGMWSTSLQITDGTAVLRSRTLSIRRGIFQGDTFSPLWFCLAMNPLSRALNQCNYGYQLKSGGRSTRITHTFFMDDLKLFAESVQRLHQLLQLVTVFSNDIRMEFGIDKCWSVHLRRGQVVDASCFRVNEQEEIRNMVEGEVYKYLGFLQLRGIRHTAIKKELQDKFLHRVNCVLRSFLSAGNKVKAINTFAVPLLTYSFGVVKWTKTDLEALERAVRVAFTKHRMRHPKSSIERVTLPRAVGGRGVTDIQALCVSQIQQLRAYFVESQNRHEMYRTVCEADHGYSALHLAQEDYQLNCDIKTVDEMIVTWKQKELHGTHPHQLELEHIDKAASNAWLVRGDLFSETEGFMVAIQDRVIATKNYRRYILHEDVEDRCRKCNSVGETIEHVVAGCSVLAGSAYLDRHNEVAKIVHQQLALKHNLVDRFVPYYKYQPDPVLENSCIKLYWDREIITDVLIRANRPDIVVLDKRMKRVTLIDIAVPLDHNVQSTFSGKITKYHDLAEELKQMWHLEDVRIVPVVLSATGVVPKFLLRSLDELELKKDLNSILKAVILGTCSIVRRFLNHHN

SEQ ID NO: 9982 - protein, 1217 aa, Aedes albopictus
METRARRNRRMRSPEEGAPTGAGPGTGDRASGQRLEEEVVQERPSSQRAQPVPRTQSRNGSNSNHQGHAAPVNVAVADRRQSLTLAGGRRQRIMWTREMNMYVIRCYFVCTRMETDMSGRSGMLEMFNERFPRFANQLDLNKLYTRQRAIMSHNMLTAAEVECIKLEAQRELGEERTRSSDTSRRSSDGLDASNASESRDTTAPTAPGPTADMQRQQLRDELALHMATAVTQFRGTDPMSRHRIPKLRNSYRLTSAVSILNQDILPQYLEAVQHLEDLQFTVYSAVVAVVKTLGLRTRPQGDGEGRTRPSTQKPAWMRRLENRIATLRTKIGRLTQYKQGNRSTRLVRYVAEIVKPAELRDLTEVNITEILDTHVQRLSALAKRLRRYGECSKRKEQNRMFNINEREFYNCIRNDKPDYGEGLPEIGEVTQFWANLWENPVQHSDDGMWLAEEERQCNGVGDMTAVVVTAQDVREATRYTRNWAAPGPDFVHNFWYKKLTTIHGRMAECFNMVLEDPTQLPEFITRGITYLLPKDQNTADPAKYRPITCLSSLYKVLSSVIARRIQTHCDANNVMTEEQKGCRKSTQGCKDQVIIDAVIVGQATDKQRNLSMAYIDYKKAYDSVPHSYLLKVLQLYKVDGNVIRLMQHAMGMWSTSLQITDGTAVLRSRTLSIRRGIFQGDTFSPLWFCLAMNPLSRALNQCNYGYQLKSGGRSTRITHTFFMDDLKLFAESVQRLHQLLQLVTVFSNDIRMEFGIDKCRSVHLRRGQVVDASCFRVNEQEEIRNMVEGEVYKYLGFLQLRGIRHTAIKKELQDKFLHRVNCVLRSFLSAGNKVKAINTFAVPLLTYSFGVVKWTKTDLEALERAVRVAFTKHRMRHPKSSIERVTLPRAVGGRGVTDIQALCVSQIQQLRAYFVESQNRHEMYRTVCEADHGYSALHLAQEDYQLNCDIKTVDEMIVTWKQKELHGTHPHQLELEHIDKAASNAWLVRGDLFSETEGFMVAIQDRVIATKNYRRYILHEDVEDRCRKCNSVGETIEHVVAGCSVLAGSAYLDRHNEVAKIVHQQLALKHNLVDRFVPYYKYQPDPVLENSCIKLYWDREIITDVLIRANRPDIVVFDKRMKRVTLIDIAVPLDHNVQSTFSGKITKYHDLAEELKQMWHLEDVRIVPVVLSATGVVPKSLLRSLDELELKKDLNSILKAVILGTCSIVRRFLNHHN

SEQ ID NO: 9983 - protein, 977 aa, Aedes aegypti
MSRHRIPKLRYSYRLTSAVSILNQDILPQYLEAVENLEDLQFIVYSAAIAVVKTLGLRTRPQGEDGTRPNAQKPVWMRRLESRIATLRSKVGRLTQYKQGNRSTRLVRHVAEIVRPAELRDLREVDITEILDTHVQRLSALAKRLRRYGECSKRKEQNRMFNINEREFYNRIRNDKVDFGEGLPEIGDVTQFWANLWENPTEHNDDGMWLAEEGRQCDGIGDMTAVVVTALDIREATRYTRNWAAPGPDFVHNFWYKKLTTIHGRMAECFNTVLGDPTQLPEFITRGVTFLLPKDQHTADPAKYRPITCLSSLYKVLSSVIARRVQAHCDANNVMTEEQKGCRRNTQGCKDQVIVDAVIVGQATQKQRNLSMAYIDYKKAYDSVPHSYLLKVLQLYKVDGNVIRLMQHAMGMWSTSLHITDGTAVLRSRTLSIRRGIFQGDTFSPLWFCLAMNPLSKALNQCNYGYQLKSGERSTRVTHTFYMDDLKLFAESVQRLHQLLQLVTTFSNDIRMEFGIDKCRSIHLRRGQVMDASCFRVNEQEEIRNMVEGETYKYLGFLQLRGIRHTMIKKELQEKFLSRVNCILKSFLSAGNKVKAINTFAVPLLTYSFGVVKWTKTDLEAIERAVRVAFTKHRMRHPKSSIERVTLPRAAGGRGVTDIQALCVSQIQQLRAYFVESQNRHEIYRTVCEADHGFSALHLAQEDYQLNCDIKTVDEMIAMWKQKELHGTHPHQLELEHIDKVASNTWLVRGDLFSETEGFMVAIQDRVIATKNYRHYILHEDVEDRCRKCNSVGETIEHVVAGCSVLAGSAYLDRHNEVAKIVHQQLALKHNLVDRFVPYYKYLPDPVLENSCIKLYWDREIITDVLIRANRPDIVVYDKRMKRVTLIDIAVPLDHNVQSTFSNKIAKYHDLAEELKQMWHLEDVRIVPVVLSATGIVPKSLLRSLDELELKKDLHSIQKAVILGTCSIVRRFLNHHN

SEQ ID NO: 9984 - protein, 1217 aa, Aedes albopictus
METRARRNRRMRSPEEGAPTGAGPGTGDRASGQRLEEEVVQERPSSQRAQPVPRTQSRNGSNSNHQGHAAPANVAVADRRQSLTLAGGRRQRIMWTREMNMYVIRCYFVCTRMETDMSGRSGMLEMFNERFPRFANQLDLNKLYTRQRAIMSHNMLTAAEVECIKLEAQRELGEERTRSSDTSRRSSDGLDASIASESRDTTAPTAPGPTADMQRQQLRDELALHMATTVTQFRGTDPMSRHRIPKLRNSYRLTSAVSILNQDILPQYLEAVQHLEDLQFTVYSAAVAVVKTLGLRTRPQGDGEGRTRPSTQKPAWMRRLENRIATLRTKIGRLTQYKQGNRSTRLVRYVAEIVKPAELRDLTEVNITEILDTHVQRLSALAKRLRRYGECSKRKEQNRMFNINEREFYNCIRNDKPDYGEGLPEIGEVTQFWANLWENPVQHSDDGMWLAEEERQCNGVGDMTAVVVTAQDVREATRYTRNWAAPGPDFVHNFWYKKLTTIHGRMAECFNMVLEDPTQLPEFITRGITYLLPKDQNTADPAKYRPITCLSSLYKVLSSVIARRIQTHCDANNVMTEEQKGCRKNTQGCKDQVIIDAVIVGQATDKQRNLSMAYIDYKKAYDSVPHSYLLKVLQLYKVDGNVIRLMQHAMGMWSTSLQITDGTAVLRSRTLSIRRGIFQGDTFSPLWFCLAMNPLSRALNQCNYGYQLKSGGRSTRITHTFFMDDLKLFAESVQRLHQLLQLVTVFSNDIRMEFGIDKCRSVHLRRGQVVDASCFRVNEQEEIRNMVEGEVYKYLGFLQLRGIRHTAIKKELQDKFLHRVNCVLRSFLSAGNKVKAINTFAVPLLTYSFGVVKWTKTDLEALERAVRVAFTKHRMRHPKSSIERVTLPRAVGGRGVTDIQALCVSQIQQLRAYFVESQNRHEMYRTVCEADHGYSALHLAQEDYQLNCDIKTVDEMIVTWKQKELHGTHPHQLELEHIDKAASNAWLVRGDLFSETEGFMVAIQDRVIATKNYRRYILHEDVEDRCRKCNSVGETIEHVVAGCSVLAGSAYLDRHNEVAKIVHQQLALKHNLVDRFVPYYKYQPDPVLENSCIKLYWDREIITDVLIRANRPDIVVFDKRMKRVTLIDIAVPLDHNVQSTFSGKITKYHDLAEELKQMWHLEDVRIVPVVLSATGVVPKSLLRSLDELELKKDLNSILKAVILGTCSIVRRFLNHHN

SEQ ID NO: 9985 - protein, 1217 aa, Aedes albopictus
METRARRNRRMRSPEEGAPTGAGPGTGDRASGQRLEEEVVQERPSSQRAQPVPRTQSRNGSNSNHQGHAAPANVAVADRRQSLTLAGGRRQRIMWTREMNMYVIRCYFVCTRMETDMSGRSGMLEMFNERFPRFANQLDLNKLYTRQRAIMSHNMLTAAEVECIKLEAQRELGEERTRSSDTSRRSSDGLDASNASESRDTTAPTAPGPTADMQRQQLRDELALHMATAVTQFRGTDPMSRHRIPKLRNSYRLTSAVSILNQDILPQYLEAVQHLEDLQFTVYSAAVAVVKTLGLRTRPQGDGEGRTRPSTQKPAWMRRLENRIATLRTKIGRLTQYKQGNRSTRLVRYVAEIVKPAELRDLTEVNITEILDTHVQRLSALAKRLRRYGECSKRKEQNRMFNINEREFYNCIRNDKPDYGEGLPEIGEVTQFWANLWENPVQHSDDGMWLAEEERQCNGVGDMTAVVVTAQDVREATRYTRNWAAPGPDFVHNFWYKKLTTIHGRMAECFNMVLEDPTQLPEFITRGITYLLPKDQNTADPAKYRPITCLSSLYKVLSSVIARRIQTHCDANNVMTEEQKGCRKNTQGCKDQVIIDAVIVGQATDKQRNLSMAYIDYKKAYDSVPHSYLLKVLQLYKVDGNIIRLMQHAMGMWSTSLQITDGTAVLRSRTLSIRRGIFQGDTFSPLWFCLAMNPLSRALNQCNYGYQLKSGGRSTRITHTFFMDDLKLFAESVQRLHQLLQLVTVFSNDIRMEFGIDKCRSVHLRRGQVVDASCFRVNEQEEIRNMVEGEVYKYLGFLQLRGIRHTAIKKELQDKFLHRVNCVLRSFLSAGNKVKAINTFAVPLLTYSFGVVKWTKTDLEALERAVRVAFTKHRMRHPKSSIERVTLPRAVGGRGVTDIQVLCVSQIQQLRAYFVESQNRHEMYRTVCEADHGYSALHLAQEDYQLNCDIKTVDEMIVTWKQKELHGTHPHQLELEHIDKAASNAWLVRGDLFSETEGFMVAIQDRVIATKNYRRYILHEDVEDRCRKCNSVGETIEHVVAGCSVLAGSAYLDRHNEVAKIVHQQLALKHNLVDRFVPYYKYQPDPVLENSCIKLYWDREIITDVLIRANRPDIVVFDKRMKRVTLIDIAVPLDHNVQSTFSGKITKYHDLAEELKQMWHLEDVRIVPVVLSATGVVPKSLLRSLDELELKKDLKSILKAVILGTCSIVRRFLNHHN

SEQ ID NO: 9986 - protein, 1217 aa, Aedes albopictus
METRARRNRRMRSPEEGAPTGAGPGTGDRASGQRLEEELVQERPSSQRAQPVPRTQSRNGSNSNHQGHAAPANVAVADRRQSLTLAGGRRQRIMWTREMNMYVIRCYFVCTRMETDMSGRSGMLEMFNERFPRFANQLDLNKLYTRQRAIMSHNMLTAAEVECIKLEAQRELGEERTRSSDTSRRSSDGLDASNASESRDTTAPTAPGPTADMQRQQLRDELALHMATAVTQFRGTDPMSRHRIPKLRNSYRLTSAVSILNQDILPQYLEAVQHLEDLQFTVYSAAVAVVKTLGLRTRPQGDGEGRTRPSTQKPAWMRRLENRIATLRTKIGRLTQYKQGNRSTRLVRYVAEIVKPAELRDLTEVNITEILDTHVQRLSALAKRLRRYGECSKRKEQNRMFNINEREFYNCIRNDKPDYGEGLPEIGEVTQFWANLWENPVQHSDDGMWLAEEERQCNGVGDMTAVVVTAQDVREATRYTRNWAAPGPDFVHNFWYKKLTTIHGRMAECFNMVLEDPTQLPEFITRGITYLLPKDQNTADPAKYRPITCLSSLYKVLSSVIARRIQTHCDANNVMTEEQKGCRKNTQGCKDQVIIDAVIVGQATDKQRNLSMAYIDYKKAYDSVPHSYLLKVLQLYKVDGNIIRLMQHAMGMWSTSLQITDGTAVLRSRTLSIRRGIFQGDTFSPLWFCLAMNPLSRALNQCNYGYQLKSGGRSTRITHTFFMDDLKLFAESVQRLHQLLQLVTVFSNDIRMEFGIDKCRSVHLRRGQVVDASCFRVNEQEEIRNMVEGEVYKYLGFLQLRGIRHTAIKKELQDKFLHRVNCVLRSFLSAGNKVKAINTFAVPLLTYSFGVVKWTKTDLEALERAVRVAFTKHRMRHPKSSIERVTLPRAVGGRGVTDIQALCVSQIQQLRAYFVESQNRHEMYRTVCEADHGYSALHLAQEDYQLNCDIKTVDEMIVTWKQKELHGTHPHQLELEHIDKAASNAWLVRGDLFSETEGFMVAIQDRVIATKNYRRYILHEDVEDRCRKCNSVGETIEHVVAGCSVLAGSAYLDRHNEVAKIVHQQLALKHNLVDRFVPYYKYQPDPVLENSCIKLYWDREIITDVLIRANRPDIVVFDKRMKRVTLIDIAVPLDHNVQSTFSGKITKYHDLAEELKQMWHLEDVRIVPVVLSATGVVPKSLLRSLDELELKKDLNSILKAVILGTCSIVRRFLNHHN

SEQ ID NO: 9987 - protein, 1124 aa, Aedes albopictus
MWTREMNMYVIRCYFVCTMMETDMSGRSGMLEMFNERFPRFANQLDLNKLYTRQRAIMSHNMLTAAEVECIKLEAQRELGEERTRSSDTSRRSPDGLDASNASESRDTTAPTAPGPTADMQRQQLRDELALHMATAVTQFRGTDPMSRHRIPKLRNSYRLTSAVSILNQDILPQYLEAVQHLEDLQFTVYSAAVAVVKTLGLRTRPQGDGEGRTRPSTQKPAWMRRLENRIATLRTKIGRLTQYKQGNRSTRLVRYVAEIVKPAELRDLTEVNITEILDTHVQRLSALAKRLRRYGECSKRKEQNRMFNINEREFYNCIRNDKPDYGEGLPEIGEVTQFWANLWENPVQHSDDGMWLAEEERQCNGVGDMTAVVVTAQDVREATRYTRNWAAPGPDFVHNFWYKKLTTIHGRMAECFNMVLEDPTQLPEFITRGITYLLPKDQNTADPAKYRPITCLSSLYKVLSSVIARRIQTHCDANNVMTEEQKGCRKNTQGCKDQVIIDAVIVGQATDKQRNLSMAYIDYKKAYDSVPHSYLLKVLQLYKVDGNVIRLMQHAMGMWSTSLQITDGTAVLRSRTLSIRRGIFQGDTFSPLWFCLAMNPLSRALNQCNYGYQLKSGGRSTRITHTFFMDDLKLFAESVQRLHQLLQLVTVFSNDIRMEFGIDKCRSVHLRRGQVVDASCFRVNEQEEIRNMVEGEVYKYLGFLQLRGIRHTAIKKELQDKFLHRVNCVLRSFLSAGNKVKAINTFAVPLLTYSFGVVKWTKTDLEALERAVRVAFTKHRMRHPKSSIERVTLPRAVGGRGVTDIQALCVSQIQQLRAYFVESQNRHEMYRTVCEADHGYSALHLAQEDYQLNCDIKTVDEMIVTWKQKELHGTHPHQLELEHIDKAASNAWLVRGDLFSETEGFMVAIQDRVIATKNYRRYILHEDVEDRCRKCNSVGETIEHVVAGCSVLAGSAYLDRHNEVAKIVHQQLALKHNLVDRFVPYYKYQPDPVLENSCIKLYWDREIITDVLIRANRPDIVVFDKRMKRVTLIDIAVPLDHNVQSTFSGKITKYHDLAEELKQMWHLEDVRIVPVVLSATGVVPKSLLRSLDELELKKDLNSILKAVILGTCSIVRRFLNHHN

SEQ ID NO: 9988 - protein, 911 aa, Aedes aegypti
MAHAPTHRNPYRCDALRAATLRSKVGRLTQYKQGNRSTRLVRHVAEIVRPAELRDLREVDITEILDTHVQRLSALAKRLRRYGECSKRKEQNRMFNINEREFYNRIRNDKVDFGEGLPEIGDVTQFWANLWENPTEHNDDGMWLAEEGRQCDGIGDMTAVVVTAQDIREATRYTRNWAAPGPDFVHNFWYKKLTTIHGRMAECFNTVLGDPTQLPEFITRGVTFLLPKDQHTADPAKYRPITCLSSLYKVLSSVIARRVQAHCDANNVMTEEQKGCRRNTQGCKDQVIVDAVIVGQATQKQRNLSMAYIDYKKAYDSVPHSYLLKVLQLYKVDGNVIRLMQHAMGMWSTSLHITDGTAVLRSRTLSIRRGIFQGDTFSPLWFCLAMNPLSKALNQCNYGYQLKSGERSTRVTHTFYMDDLKLFAESVQRLHQLLQLVTTFSNDIRMEFGIDKCRSIHLRRGQVMDASCFRVNEQEEIRNMVEGETYKYLGFLQLRGIRHTMIKKELQEKFLSRVNCILKSFLSAGNKVKAINTFAVPLLTYSFGVVKWTKTDLEAIERAVRVAFTKHRMRHPKSSIERVTLPRAAGGRGVTDIQALCVSQIQQLRAYFVESQNRHEIYRTVCEADHGFSALHLAQEDYQLNCDIKIVDEMIAMWKQKELHGTHPHQLELEHIDKVASNTWLVRGDLFSETEGFMVAIQDRVIATKNYRHYILHEDVEDRCRKCNSVGETIEHVVAGCSVLAGSAYLDRHNEVAKIVHQQLALKHNLVDRFVPYYKYLPDPVLENSCIKLYWDREIITDVLIRANRPDIVVYDKRMKRVTLIDIAVPLDHNVQSTFSNKIAKYHDLAEELKQMWHLEDVRIVPVVLSATGIVPKSLLRSLDELELKKDLHSIQKAVILGTCSIVRRFLNHHN

SEQ ID NO: 9989 - protein, 1217 aa, Aedes albopictus
METRARRNRRMRSPEEGAPTGAGPGTGDRASGQRLEEEVVQERPSSQRAQPVPRTQSRNGSNSNHQGHAAPANVAVADRRQSLTLAGGRRQRIMWTREMNMYVIRCYFVCTRMETDMSGRSGMLEMFNERFPRFANQLDLNKLYTRQRAIMSHNMLTAAEVECIKLEAQRELGEERTRSSDTSRRSSDGLDASNASESRDTTAPTAPGPTADMQRQQLRDELALHMATAVTQFRGTDPMSRHRIPKLRNSYRLTSAVSILNQDILPQYLEAVQHLEDLQFTVYSAAVAVVKTLGLRTRPQDDGEGRTRPSTQKPAWMRRLENRIATLRTKIGRLTQCKQGNRSTRLVRYVAEIVKPAELRDLTEVNITEILDTHVQRLSALAKRLRRYGECSKRKEQNRMFNINEREFYNCIRNDKPDYGEGLPEIGEVTQFWANLWENPVQHSDDGMWLAEEERQCNGVGDMTAVVVTAQDIREATRYTRNWAAPGPDFVHNFWYKKLTTIHGRMSECFNMVLEDPTQLPEFITRGITYLLPKDQNTADPAKYRPITCLSSLYKVLSSVIARRIQTHCDANNVMTEEQKGCRKNTQGCKDQVIIDAVIVGQATDKQRNLSMAYIDYKKAYDSVPHSYLLKVLQLYKVDGNVIRLMQHAMGMWSTSLQITDGTAVLRSRTLSIRRGIFQGDTFSPLWFCLAMNPLSRALNQCNYGYQLKSGGRSTRITHTFFMDDLKLFAESVQRLHQLLQLVTVFSNDIRMEFGIDKCRSVHLRRGQVVDASCFRVNEQEEIRNMVEGEVYKYLGFLQLRGIRHTAIKKELQDKFLHRVNCVLRSFLSAGNKVKAINTFAVPLLTYSFGVVKWTKTDLEALERAVRVAFTKHRMRHPKSSIERVTLPRAVGGRGVTDIQALCVSQIQQLRAYFVESQNRHEMYRTVCEADHGYSALHLAQEDYQLNCDIKTVDEMIVTWKQKELHGTHPHQLELEHIDKAASNAWLVRGDLFSETEGFMVAIQDRVIATKNYRRYILHEDVEDRCRKCNSVGETIEHVVAGCSVLAGSAYLDRHNEVAKIVHQQLALKHNLVDRFVPYYKYQPDPVLENSCIKLYWDREIITDVLIRANRPDIVVFDKRMKRVTLIDIAVPLDHNVQSTFSGKITKYHDLAEELKQMWHLEDVRIVPVVLSATGVVPKSLLRSLDELELKKDLNSILKAVILGTCSIVRRFLNHHN

SEQ ID NO: 9990 - protein, 1217 aa, Aedes albopictus
METRARRNRRMRSPEEGAPTGAGPGTGDRASGQRLEEEVVQERPSSQRAQPVPRTQSRNGSNSNHQGHAAPANVAVADRRQSLTLAGGRRQRIMWTREMNMYVIRCYFVCTRMETDMSGRSGMLEMFNERFPRFANQLDLNKLYTRQRAIMSHNMLTAAEVECIKLEAQRELGEERTRSSDTSRRSSDGLDASNASESRDTTAPTAPGPTADMQRQQLRDELALHMATAVTQFRGTDPMSRHRIPKLRNSYRLTSAVSILNQDILPQYLEAVQHLEDLQFTVYSAAVAVVKTLGLRTRPQGDGEGRTRPSTQKPAWMRRLENRIATLRTKIGRLTQYKQGNRSTRLVRYVAEIVKPAELRDLTEVNITEILDTHVQRLSALAKRLRRYGECSKRKEQNRMFNINEREFYNCIRNDKPDYGEGLPEIGEVTQFWANLWENPVQHSDDGMWLAEEERQCNGVGDMTAVVVTAQDVREATRYTRNWAAPGPDFVHNFWYKKLTTIHGRMAECFNMVLEDPTQLPEFITRGITYLLPKDQNTADPAKYRPITCLSSLYKVLSSVIARRIQTHCDANNVMTEEQKGCRKNTQGCKDQVIIDAVIVGQATDKQRNLSMAYIDYKKAYDSVPHSYLLKVLQLYKVDGNIIRLMQHAMGMWSTSLQITDGTAVLRSRTLSIRRGIFQGDTFSPLWFCLAMNPLSRALNQCNYGYQLKSGGRSTRITHTFFMDDLKLFAESVQRLHQLLQLVTVFSNDIRMEFGIDKCRSVHLRRGQVVDASCFRVNEQEEIRNMVEGEVYKYLGFLQLRGIRHTAIKKELQDKFLHRVNCVLRSFLSAGNKVKAINTFAVPLLTYSFGVVKWTKTDLEALERAVRVAFTKHRMRHPKSSIERVTLPRAVGGRGVTDIQALCVSQIQQLRAYFVESQNRHEMYRTVCEADHGYSALHLAQEDYQLNCDIKTVDEMIVTWKQKELHGTHPHQLELEHIDKAASNAWLVRGDLFSETEGFMVAIQDRVIATKNYRRYILHEDVEDRCRKCNSVGETIEHVVAGCSVLAGSAYLDRHNEVAKIVHQQLALKHNLVDRFVPYYKYQPDPVLENSCIKLYWDREIITDVLIRANRPDIVVFDKRMKRVTLIDIAVPLDHNVQSTFSGKITKYHDLAEELKQMWHLQDVRIVPVVLSATGVVPKSLLRSLDELELKKDLNSILKAVILGTCSIVRRFLNHHN

SEQ ID NO: 9991 - protein, 1217 aa, Aedes albopictus
METRARRNRRMRSPEEGAPTGAGPGTGDRASGQRLEEEVVQERPSSQRAQPVPRTQSRNGSNSNHQGHAAPANVAVADRRQSLTLAGGRRQRIMWTREMNMYVIRCYFVCTRMETDMSGRSGMLEMFNERFPRFANQLDLNKLYTRQRAIMSHNMLTAAEVECIKLEAQRELGEERTRSSDTSRRSSDGLDASNASESRDTTAPTAPGPTADMQRQQLRDELALHMATAVTQFRGTDPMSRHRIPKLRNSYRLTSAVSILNQDILPQYLEAVQHLEDLQFTVYSAAVAVVKTLGLRTRPQGDGEGRTRPSTQKPAWMRRLENRIATLRTKIGRLTQYKQGNRSTRLVRYVAEIVKPAELRDLTEVNITEILDTHVQRLSALAKRLRRYGECSKRKEQNRMFNINEREFYNCIRNDKPDYGEGLPEIGEVTQFWANLWENPVQHSDDGMWLAEEERQCNGVGDMTAVVVTAQDVREATRYTRNWAAPGPDFVHNFWYKKLTTIHGRMAECFNMVLEDPTQLPEFITRGITYLLPKDQNTADPAKYRPITCLSSLYKVLSSVIARRIQTHCDANNVMTEEQKGCRKNTQGCKDQVIIDAVIVGQATDKQRNLSMAYIDYKKAYDSVPHSYLLKVLQLYKVDGNVIRLMQHAMGMWSTSLQITDGTAVLRSRTLSIRRGIFQGDTFSPLWFCLAMNPLSRALNQCNYGYQLKSGGRSTRITHTFFMDDLKLFAESVQRLHQLLQLVTVFSNDIRMEFGIDKCRSVHLRRGQVVDASCFRVNEQEEIRNMVEGEVYKYLGFLQLRGIRHTAIKKELQDKFLHRVNCVLRSFLSAGNKVKAINTFAVPLLTYSFGVVKWTKTDLEALERAVRVAFTKHRMRHPKSSIERVTLPRAVGGRGVTDIQALCVSQIQQLRAYFVESQNRHEMYRTVCEADHGYSALHLAQEDYQLNCDIKTVDEMIVTWKQKELHGTHPHQLELEHIDKAASNAWLVRGDLFSETEGFMVAIQDRVIATKNYRRYILHEDVEDRCRKCNSVGETIEHVVAGCSVLAGSAYLDRHNEVAKIVHQQLALKHNLVDRFVPYYKYQPDPVLENSCIKLYWDREIITDVLIRANRPDIVVFDKRMKRVTLIDIAVPLDHNVQSTFSGKITKYHDLAEELKQMWHLEDVRIVPVVLSATGVVPKSLLRSLDELELKKDLNSILKVVILGTCSIVRRFLNHHN

SEQ ID NO: 9992 - protein, 992 aa, Aedes albopictus
MATAVTQFRGTDPMSRHRIPKLRNSYRLTSAVSILNQDILPQYLEAVQHLEDLQFTVYSAAVAVVKTLGLRTRPQGDGEGRTRPSTQKPAWMRRLENRIATLRTKIGRLTQYKQGNRSTRLVRYVAEIVKPAELRDLTEVNITEILDTHVQRLSALAKRLRRYGECSKRKEQNRMFNINEREFYNCIRNDKPDYGEGLPEIGEVTQFWANLWENPVQHSDDGMWLAEEERQCNGVGDMTAVVVTAQDVREATRYTRNWAAPGPDFVHNFWYKKLTTIHGRMAECFNMVLEDPTQLPEFITRGITYLLPKDQNTADPAKYRPITCLSSLYKVLSSVIARRIQTHCDANNVMTEEQKGCRKNTQGCKDQVIIDAVIVGQATDKQRNLSMAYIDYKKAYDSVPHSYLLKVLQLYKVDGNIIRLMQHAMGMWSTSLQITDGTAVLRSRTLSIRRGIFQGDTFSPLWFCLAMNPLSRALNQCNYGYQLKSGGRSTRITHTFFMDDLKLFAESVQRLHQLLQLVTVFSNDIRMEFGIDKCRSVHLRRGQVVDASCFRVNEQEEIRNMVEGEVYKYLGFLQLRGIRHTAIKKELQDKFLHRVNCVLRSFLSAGNKVKAINTFAVPLLTYSFGVVKWTKTDLEALERAVRVAFTKHRMRHPKSSIERVTLPRAVGGRGVTDIQALCVSQIQQLRAYFVESQNRHEMYRTVCEADHGYSALHLAQEDYQLNCDIKTVDEMIVTWKQKELHGTHPHQLELEHIDKAASNAWLVRGDLFSETEGFMVAIQDRVIATKNYRRYILHEDVEDRCRKCNSVGETIEHVVAGCSVLAGSAYLDRHNEVAKIVHQQLALKHNLVDRFVPYYKYQPDPVLENSCIKLYWDREIITDVLIRANRPDIVVFDKRMKRVTLIDIAVPLDHNVQSTFSGKITKYHDLAEELKQMWHLEDVRIVPVVLSATGVVPKSLLRSLDELELKKDLNSILKAVILGTCSIVRRFLNHHN

SEQ ID NO: 9993 - protein, 1095 aa, Aedes albopictus
MLEMFNERFPRFANQLDLNKLYTRQRAIMSHNMLTAAEVECIKLEAQRELGEERTRSSDTSRRSSDGLDASNASESRDTTAPTAPGPTADMQRQQLRDELALHMATAVTQFRGTDPMSRHRIPKLRNSYRLTSAVSILNQDILPQYLEAVQHLEDLQFTVYSAAVAVVKTLGLRTRPQGDGEGRTRPSTQKPAWMRRLENRIATLRTKIGRLTQYKQGNRSTRLVRYVAEIVKPAELRDLTEVNITEILDTHVQRLSALAKRLRRYGECSKRKEQNRMFNINEREFYNCIRNDKPDYGEGLPEIGEVTQFWANLWENPVQHSDDGMWLAEEERQCNGVGDMTAVVVTAQDVREATRYTRNWAAPGPDFVHNFWYKKLTTIHGRMAECFNMVLEDPTQLPEFITRGITYLLPKDQNTADPAKYRPITCLSSLYKVLSSVIARRIQTHCDANNVMTEEQKGCRKNTQGCKDQVIIDAVIVGQATDKQRNLSMAYIDYKKAYDSVPHSYLLKVLQLYKVDGNIIRLMQHAMGMWSTSLQITDGTAVLRSRTLSIRRGIFQGDTFSPLWFCLAMNPLSRALNQCNYGYQLKSGGRSTRITHTFFMDDLKLFAESVQRLHQLLQLVTVFSNDIRMEFGIDKCRSVHLRRGQVVDASCFRVNEQEEIRNMVEGEVYKYLGFLQLRGIRHTAIKKELQDKFLHRVNCVLRSFLSAGNKVKAINTFAVPLLTYSFGVVKWTKTDLEALERAVRVAFTKHRMRHPKSSIERVTLPRAVGGRGVTDIQALCVSQIQQLRAYFVESQNRHEMYRTVCEADHGYSALHLAQEDYQLNCDIKTVDEMIVTWKQKELHGTHPHQLELEHIDKAASNAWLVRGDLFSETEGFMVAIQDRVIATKNYRRYILHEDVEDRCRKCNSVGETIEHVVAGCSVLAGSAYLDRHNEVAKIVHQQLALKHNLVDRFVPYYKYQPDPVLENSCIKLYWDREIITDVLIRANRPDIVVFDKRMKRVTLIDIAVPLDHNVQSTFSGKITKYHDLAEELKQMWHLEDVRIVPVVLSATGVVPKSLLRSLDELELKKDLNSILKAVILGTCSIVRRFLNHHN

SEQ ID NO: 9994 - protein, 1217 aa, Aedes albopictus
METRARQNRRMRSPEEGAPTGAGPGTGDRASGQRLEEEVVQERPSSQRAQPVPRTQGRNGSNSNHQGHAAPANVAVADRRQSLTLAGGRRQRIMWTREMNMYVIRCYFVCTRMETDMSGRSGMLEMFNERFPRFANQLDLNKLYTRQRAIMSHNMLTAAEVECIKLEAQRELGEERTRSSDTSRRSSDGLDASNARESRDTTAPTAPGPTADMQRQQLRDELALHMATAVTQFRGTDPMSRHRIPKLRNSYRLTSAVSILNQDILPQYLEAVQHLEDLQFAVYSAAVAVVKTLGLRTRPQGDGEGRTRPSTQKPAWMRRLENRIATLRTKIGRLTQYKQGNRSTRLVRYVAEIVKPAELRDLTEVNITEILDTHVQRLSALAKRLRRYGECSKRKEQNRMFNINEREFYNCIRNDKPDYGEGLPEIGEVTQFWANLWEYPVQHSDDGMWLAEEERQCNGVGDMTTVVVTAQDVREATRYTRNWAAPGPDFVHNFWYKKLTTIHGRMAECFNMVLEDPTQLPEFITRGITYLLPKDQNTADPAKYRPITCLSSLYKVLSSVIARRIQTHCDANNVMTEEQKGCRKNTQGCKDQVIIDAVIVGQATDKQRNLSMAYIDYKKAYDSVPHSYLLKVLQLYKVDGNVIRLMQHAMGMWSTSLQITDGTAVLRSRTLSIRRGIFQGDTFSPLWFCLAMNPLSRALNQCNYGYQLKSGGRSTRITHTFFMDDLKLFAESVQRLHQLLQLVTVFSNDIRMEFGIDKCRSVHLRRGQVVDASCFRVNEQEEIRNMVEGEVYKYLGFLQLRGIRHTAIKKELQDKFLHRVNCVLRSFLSAGNKVKAINTFAVPLLTYSFGVVKWTKTDLEALERAVRVAFTKHRMRHPKSSIERVTLPRAVGGRGVTDIQALCVSQIQQLRAYFVESQNRHEMYRTVCEADHGYSALHLAQEDYRLNCDIKTVDEMIVTWKQKELHGTHPHQLELEHIDKAASNAWLVRGDLFSETEGFMVAIQDRVIATKNYRRYILHEDVEDRCRKCNSVGETIEHVVAGCSVLAGSAYLDRHNEVAKIVHQQLALKHNLVDRFVPYYKYQPDPVLENSCIKLYWDREIITDVLIRANRPDIVVFDKRMKRVTLIDIAVPLDHNVQSTFSGKITKYHDLAEELKQMWHLEDVRIVPVVLSATGVVPKSLLRSLDELELKKDLNSILKAVILGTCSIVRRFLNHHN

SEQ ID NO: 9995 - protein, 1214 aa, Aedes albopictus
METRARRNRRMRSPEEGAPTGAGPGTGDRASGQRLEEEVVQERPSSQRAQPVPRTQSRNGSNSNHQGHAAPANVAVADRRQSLTLAGGRRQRIMWTREMNMYVIRCYFVCTRMETDMSGRSGMLEMFNERFPRFANQLDLNKLYTRQRAIMSHNMLTAAEVECIKLEAQRELGEERTRSSDTSRRSSDGLDASNASESRDTTAPTAPGPTADMQRQQLRDELALHMATAVTQFRGTDPMSRHRIPKLRNSYRLTSAVSILNQDILPQYLEAVQHLEDLQFTVYSAAVAVVKTLGLRTRPQGDGEGRTRPSTQKPAWMRRLENRIATLRTKIGRLTQYKQGNRSTRLVRYVAEIVKPAELRDLTEVNITEILDTHVQRLSALAKRLRRYGECSKRKEQNRMFNINEREFYNCIRNDKPDYGEGLPEIGEVTQFWANLWENPVQHSDDGMWLAEEERQCNGVGDMTAVVVTAQDVREATRYTRNWAAPGPDFVHNFWYKKLTTIHGRMAECFNMVLEDPSQLPEFITKGITYLLPKDQNTADPAKYRPITCLSSLYKVLSSVIARRIQTHCDANNVMTEEQKGCRKNTQGCKDQVIIDAVIVGQATDKQRNLSMAYIDYKKAYDSVPHSYLLKVLKLYKVDGNVIRLMQHAMGMWSTSLQITDGTAVLRSRTLSIRRGIFQGDTFSPLWFCLAMNPLSRALNQCNYGYQLKSGGRSTRITHTFFMDDLKLFAESVQRLHQLLQLVTVFSNDIRMEFGIDKCRSVHLRRGQVVDASCFRVNEQEEIRNMVEGEVYKFLQLRGIRHTAIKKELQDKFLHRVNCVLRSFLSAGNKVKAINTFAVPLLTYSFGVVKWTKTDLEALERAVRVAFTKHRMRHPKSSIERVTLPRAVGGRGVTDIQALCVSQIQQLRAYFVESQNRHEMYRTVCEADHGYSALHLAQEDYQLNCDIKTVDEMIVTWKQKELHGTHPHQLELEHIDKAASNAWLVRGDLFSETEGFMVAIQDRVIATKNYRRYILHEDVEDRCRKCNSVGETIEHVVAGCSVLAGSAYLDRHNEVAKIVHQQLALKHNLVDRFVPYYKYQPDPVLENSCIKLYWDREIITDVLIRANRSDIVVFDKRMKRVTLIDIAVPLDHNVQSTFSGKITKYHDLAEELKQMWHLEDVRIVPVVLSATGVVPKSLLRSLDELELKKDLNSILKAVILGTCSIVRRFLNHHN

SEQ ID NO: 9996 - protein, 954 aa, Aedes aegypti
MRYSMSYFNNIIMVKLDMIAKFVLILSLDVGTLGLRTGPQGEDGTRPNAQKPVWMRRLESRIAKLRSKVGRLTQYKKGNRSTRLVRHVAEIVRPAELRDLREVDITEILDTHVQRLSVLAKRLRRYGKCSKRNEQNRKFNINEREFYNRIQNDKVDFGEGLPEIGDVTQFWANLWENPTEHNGDGMWLAEEERQCDGIGDMAAVVVTAQDIREATRYTRHWSAPGPDFVHNFWYKKLTTIHGRMAECFNTVLGDPTQLPEFITRGVTFLLPKDQHTADPAKYRPITCLSSLYKVLSSVIARRVEAHCDANNVMTEEQKGCRRNTQGCKDQVIVDAVIVGQATQKQRNLSMAYIDYKKAYDSVPHSYLLKVLQLYKVDGNVIRLMQHAMGMWSTSLHITDGTAVLRFRTLSIRRGIFQGDTFSPLWFCLAMNPLSKALNQCNYGYQLKSGERSTRVTHTFYMDDLKLFAESVQRLHQLLQLVTTFSNDIRMEFGIDKCRSIHLRRGQVMASCFRVNEQEEIRNMVEGETYKYLGFRQLRGIRHTMIKKELQEKFLSRVNCILKSFLSAGNKVKAINTFAVPLLTYSFGVVKWTKTDLEAIERAVRVAFTKHRMRHPKSSIERVTLPRAAGGRGVTDIQALCVSQIQQLRAYFVGSQNRHEIYRTVCEADHGFSALHLAQEDYQLNCDIKTVDEMIAMWKQKELHGTHPHQLELGHIDKVASNTWLVRGDLFSETEGSMVAIQDRVIATKNYRHYILHEYVEDRCRKCNSVGETIEHVVAGCSVLAGSAYLDRHNEVAKIVHQQLALKHNLVGRFVPYYKYLPDPVLENSCIKLYWDREIITDVLIRANRPDIVVYDKRMKRVTLIDIAVPLDHNVQSTFSNKIAKYHDLAEELKQMWHLEDVRIVPIVLSATGIVPKSLLRSLDELELKKDLHSIQKAVILGTCSIVRRFLNHHN

SEQ ID NO: 9997 - protein, 870 aa, Aedes albopictus
MRRLENRIATLRTKVGRLTQYKQGNRSTRLVRYVAEIVKPAELRDLTEVNITEILDTHVQRLSALAKRLRRYGECSKRKEQNRMFNINEREFYNCIRNDKPDYGEGLPEIGEVTQFWANLWENPVQHSDDGMWLAEEERQCNGVGDMTAVVVTAQDVREATRYTRNWAAPGPDFVHNFWYKKLTTIHGRMAECFNMVLEDPTQLPEFITRGITYLLPKDQNTADPAKYRPITCLSSLYKVLSSVIARRIQTHCDANNVMTEEQKGCRKNTQGCKDQVIIDAVIVGQATDKQRNLSMAYIDYKKAYDSVPHSYLLKVLQLYKIDGNVIRLMQHAMGMWSTSLQITDGTAVLRSRTLSIRRGIFQGDTFSPLWFCLAMNPLSRALNQCNYGYQLKSGGRSTRITHTFFMDDLKLFAESVQRLHQLLQLVTVFSNDIRMEFGIDKCRSVHLRRGQVVDASCFRVNEQEEIRNMHRINCVLRSFLSAGNKVKAINTFAVPLLSYSFGVVKWTKTDLEALERAVRVAFTKHRMRHPKSSIERVTLPRAVGGRGVTDIQALCVSQIQQLRAYFVESQNRHEMYRTVCEADHGYNALHLAQEDYQLNCDIKTVDEMIVTWKQKELHGTHPHQLELEHIDKAASNAWLVRGDLFSETEGFMVAIQDRVIATKNYRRYILHEDVEDRCRKCNSVGETIEHVVAGYSVLAGSAYLDRHNEVAKIVHQQLALKHNLIDRFVPYYKNQPDPVLENSCIKLYWDREIITDVLIRANRPDIVVFDKRMKRVTLIDIAVPLDHNVQSTFSGKITKYHDLAEELKQMWHLEDVRIVPVVLSATGVVPKSLLRSLDELELKKDLNSILKAVILGTCSIVRRFLNHHN

SEQ ID NO: 9998 - protein, 918 aa, Sitophilus oryzae
MRYSPAFHKILAIANACLEQTISQSTDLEELHLFIYCTAMASVTSNDQKQPIPRSTTVSKKAKPPWEIRIAQNIENLRKDIGRLQQMANGTTSRKITSKLPSELTKQLNGKPKQETRAIIIDYLDTLKQKLAAFSKRLRRYQESYQRRVQNNQFVKNERYFYRSLESREDVGESPELADVTKFWKDIWSNKINHRENAPWICVQEQKLRGNPMNPVTVTTDDVRKVISKLANWKAPGKDGIQNFWFKRLTCTHACLASQFNRVLQKPEELPSFLTSGVTYLLPKSENTKDPSQYRPITCLPTLYKILSAVIRDKIDTYLEQENIMTEEQKDVKRRALGCKEQITIDAVILEQARQRQRNVCMAYVDYQKAFDSIPHSWLLKVLEIYSIDNTIINFLQHTMTKWNTSLSIKHQESNIESGIIRLQRGIFQGDSLSALWFCLALNPISETLKETGFGFALKFGKHSKVISHLLFMDDLKIYAANQKQLDAALKLTYQMSTDIAMDFGVKKCQTVTVERGKLIEGPEFQLNPNTKVASMSRDPYKYLGVLQTNKIEHSKIKEILTGQFKTRLKKLLKSKLNSKNLTKAINSYAIPILQYSFGVVKWTQTDLERINRLVRTELSKFRKHHPGSAVERINLPRKDGGRGIIDVVASCKQQIDHLRKYFRSTNNDIHRAVVKVDNNLTTLNLNADNHDHLSVKNREQSLREWGSKALHGRFYNELQRETVDKQASVQWLVDGYLFPETEGFMISIQDQVTATLSYRKFIMKENITSVSCRKCKMESETIEHILSACQLLAGTKYVERHDRVATIVYLELLKNYSFEVETNTRYYQYKPAPVVENTRARVYWNKGIITDKTIPHNKPDITVIDKQHNNAFLIDISIPNNHNMDRKHREKVEKYTELKRKLKICGGSTRSKLFRSS

SEQ ID NO: 9999 - protein, 1067 aa, Adalia bipunctata
MDFPCVCGKSFASQKNLRDHVRRHCRGPPPTPPANPTLCVCGKEYSSVKNLRAHQRRFCTGVVATADQDGDGDSHQCPVCSSTYNSLIGVRQHIKHAHPVEYNNEAEEEYQSKRHNRLWTSEEMEDMAREEAEYPGTELTERLMVMTGRSKDAIKKRRKHPAYLTILEKYKKEKDERVAGCPSTSSAAAPVTPERVPSEEIDPNNGIEEINLEQMDPIKKHIIEISPQLEEVEDIELAKCVCLMEPGHKKAIDVWVKTLVAQYSKPLTRKNPTPKDRPVPPMSHRKKRVYEYAETQRKYNSNRRELAQEIISGASTTSSSAPKRPSNNRIQEEYERVIGADSAEDQQPFQVGPGPDVNIYGPISGEEIAGMLSGCPRTSPGPDGVTRADVQKIPTIRLELLYNVMLYAQYVPKPFKTSRTTLIPKNSGDQSRVDGWRPITISSILLRMLNRLMAERMKAIPLHNSQRGFSEIDGCFANNLTVHTIIKKKRLSGRGFVMVALDLQKAFDTVSHHSVRRALNRLKVDPKTTNYIMDNLSRCKTKISCLGEEVASIKIKRGLKQGDPLSPVLFNAVLDELLQELSVKRGLRLENYRVSALAYADDILLLADLVEDAQKLLKCACEFFDRRGLSLNAKKCESVTLRTLPSKKKVFTVTTPLFYIAGQPIRPIGVEDRLRYLGQKFSHTGSEKCEVKELPKQLGRIMKSPLKPQQKMCLIKTYLIPQYIHSMQSPAINKKVLKEVDRKIRMAVKKVLHLPQHTADSVIYSPARMGGLGVFSFTKKIPIIMKNRWVQITNICDSFQGLLLEAAGWVNRIQRMIKPDATTKEQVDRKNGESLDRSYYGGGTMQYQNDSASNHLIDNPPNFWSGQDYIKSIHLRCNCLPTKALPYNPPAERLCRTGCGRVESLSHILQRCSVVNGARTRRHNFVATRIKNMALKKGWCVEWEPHIRNIRGILNKPDLVFSNNEKVLVVDVGVSWETPRDLSESYEIKRLVYDQPEFRAALEIRHPNKEIKILPFIIGARGMWCRQSSEALQELGIDGIECRRELVRTTMRGGWYIHQDFMKLVWR

SEQ ID NO: 10000 - protein, 1025 aa, Coccinella septempunctata
MTLTNLRAHKRRYCTATNMPQTSGSRDGEDGLHPCPVCPDRYSTRIGMRQHMKQAHPAEYNEEAEMEYELKRHNRLWTTEEMEDMAKEEAEHRGTELVERLMQITGRTREAIKKRRKHPEYLVILEKYIQERDTRLNTLTPDNANSTPICSSPITQDPDPDATTLEDINLEELDPVRRHIIEISPLLEELDDIELARCVCLRLPGYKSQINEWTKNLIARFSKPLRNQKRNTEEPPPPNLSKKKKRVYDYARTQKKYTANRRELAQEIISGINNGSCASQERPTDAEIQKEYEGILGVPSAPDEHPVELKPGEDTNIYKPITSEEVGRITSKCPKTSPGPDGMTRNDLLKIPAIRIELLYNILLYTQHVPDCLKKSRTTLIPKNSGDPRKVEGWRPITISSILLRTLNRLMAERLAVIPLNENQRGFSEIAGCFANNLTVHTIVKRKRRSGRSVVLITLDLRKAFDTVSHQSVKRALQRLKVDEKTTNYVMDNLTGCETTISCLGQKVATLPIKRGLKQGDPLSPILFNAMLDELLDELATKRGLTLGQYKVSALAYADDILLLADTVESARRLLKCACEFFEKRGLSPNPSKCESMTLRTLPSKKKLFVVTTPLFYIGGTPVQTVGVDDTFKYLGQRFSNTGAIKCSTKELPDQLGRVMRAPLKPQQKLYIIKNYLIPQYIHAMQSPTINKKILREVDRKIRMAIKKILHLPQHIVDAVVYSPAKMGGLGVFSFAKKIPIIMKNRWLSISRKSADFKYLLDEAKDWTARIGKMIKPDAITKEQVDRKNGTTLDQSYYGGGTLQFQNDSSSNHIIDNPPKYWSGQDFIRAIHLRTNSLPTRALPYNPPEERMCRTGCGRVESLSHILQRCSIVNGARMQRHNHVASRIKAAALRKGWCIEWEPHIRNTRGVLNKPDLVFSNQEKVVVVDVSVSWETPRDLSESWEFKRLVYEQPEFRAALETRYPERAIKILPFIIGARGMWCRQSTECLEELNVNNVSLRRDLVQTTMRGSWYIHRDFMKRVWS

SEQ ID NO: 10001 - protein, 1080 aa, Harmonia axyridis
MFTCACGKAYATERGRRDHERRYCRGAPGSGSSEKTCQYCQRDFASYMAMRKHLSVAHPQQYNHELYVETESTNRRQMWTDGELEEMARLEATYSGDGLLDYLADMMGRPRGGLRKKRYNVRYKEMVERFQRSALSEDTSPVTPEQLAPVMSNMTRPYTRSQAGQTLTSVPTSMENPTLGELNAGPRTLASVASRSVYERMPPIAENTSVETDPNADNILEPVPEESEDPVERHLLELCGGSEDADAIAICRSVCRKEDTFKENLDAWTTRLCELYGRAMRARRGVPSEILTERKGRRRLRAQLYKYTQNKYKTNKKELAREIIDDIQQATHSTTPSKEDIMSHYREIFESPSPPDDLPITDLNKEQVNIYAPIDSITIRETIRAIGKTAAGPDGIDSSRLSRIPLEKIEFLCNMILLSRYIPAPLRHSRTILIAKTKINLDKVDNWRPITISSILLRIVNKIVAGRLSATVRLDECQRGFTSMDGCFANNLTLQTIIKERRKARKPLTVLTLDLKKAFDSVSHSSVLRALRRFKVDPQSISLIMANFRDQSTTMYCGGEEVGVFRIWRGVKQGDPLAPILFNMVLDELLDSLKERRGVHIGGVNVSVLGYADDLLLMAECTKDAQFLLRFALRFFEARHLTLNPDKCTSLDLAVVPGRKTLFLHPAPKFYVAGIPIPPIETVSDTFKYLGHHYTCAGVTPCDSTNLDAQLGRIMRAPLKPQQKFDLVNHYLIPRYVHSMQSPSVNSKVLKKTDRQIRRAVKKILRLPVHIIDESLYTPVHLGGLGVFSFSRKIPIIMMARVEKTRRSCELFDGVMTSNTSWTDRVRKMIKPHLNTKHAVDKNNAEILERSFYGGGTRQAENDGASNFYVHSPPMVWSGEDYIAAIKLRTKSLPTRGLPYGPRESRMCRAGCGKVESLSHMLQQCPLGHTKRMNRHNFVVKRIVDAARKKGWEVVEEPHIRDTRGRLNKPDMICTKGAEVIVADVGVSWEAPRSLSETYDLKRATYDQPELLEVVAARNPGRSIRVLPFIIGARGFWCRESSALLQALSIDTTQIRRDLVMTTLRGGWSIHKDVSRRAWD

SEQ ID NO: 10002 - protein, 1080 aa, Harmonia axyridis
MFTCACGKAYATERGRRDHEKRYCRGAPGSGSSEKTCQYCQRDFASYMAMRKHLSVAHPQQYNHELYVETESTNRRQMWTDGELEEMARLEATYSGDGLLDYLADMMGRPRGGLRKKRYNVRYKEMVERFQRSALSEDTSPVTPEQLAPVMSNMTRPYTRSQAGQTLTSVPTSMENPTLGVLNAGPRTLASVASRSVYERMPPIAENTSVETDPNADNRLEPVPEESEDPVERHLLELCGRSEDADAIAICRSVCRKEDTFKENLDAWTTRLCELYGRAMRARRVVPSEILTERKGRRRLRAQLYKYTQNKYKTNKKELAREIIDDIQQATHSTTPSKEDIMSHYREIFESPSPPDDLPITDLNKDQVNIYAPIDSITIRETIRAIGKTAAGPDGIDSSRLSRIPLEKIEFLCNMILLSRYIPAPLRHSRTILIAKTKINLDKVDNWRPITISSILLRIVNKIVAGRLSATVRLDECQRGFTSMDGCFANNLTLQTIIKERRKARKPLTVLTLDLKKAFDSVSHSSVLRALRRFKVDPQSISLIMANFRDQSTTMYCGGEEVGVFRIWRGVKQGDPLAPILFNMVLDELLDSLKERKGVHIGGVNVSVLGYADDLLLMAECTKDAQFLLRFALRFFEARHLTLNPDKCTSLDLAAVPGKKTLFLHPAPKFYVAGIPIPPIETVSDTFKYLGHHYTCAGVTPCDSTNLDAQLGRIMRAPLKPQQKFDLVNHYLIPRYVHSMQSPSVNSKVLKKTDRQIRRAVKKILRLPVHIIDESLYTPVHLGGLGVFSFSRKIPIIMMARVEKTRRSCELFDGVMTSNTSWTDRVRKMIKPHLNTKHAVDKNNAEILERSFYGGGTRQAENDGASNFYVHSPPMVWSGEDYIAAIKLRTKSLPTRGLPYGPRESRMCRAGCGKVESLSHMLQQCPLGHTKRMNRHNFVVKRIVDAARKKGWEVVEEPHIRDTRGRLNKPDMICTKGAEVIVADVGVSWEAPRSLSETYDLKRATYDQPELLEVVAARNPGRSIRVLPFIIGARGFWCRESSALLQALSIDTTPIRRDLVMTTLRGGWSIHKDVSRRAWD

SEQ ID NO: 10003 - protein, 973 aa, Anoplius nigerrimus
MPGCGREFATLRGRGVHEQRAHKNWHDERQVAEIDIRKPPWSNEELALLARQEAKLTLDGVKFMNQALLPYFPNRSLEAIKGQRRTQKYKSKELEIIREPGNVTEQVATPPEECQPDDVRQIMAAILDVHKHLDPLDGDDYGAKRLGSIYNKIGTVPLETILEELELYLLEIFPIPSRRRKRADYKSTQPLSRRKERRMEYARTQQAWRRNPCKCIRMILDDKQTSQIPPKDVMIPFWKTVMTCGGNQSPGIEPGVPTIDDLWKPVMPQEISASFPEMNTAPGPDGLTTRQLKAVPLSIMARIFNLFMLCGRLPKHLLESRTTLIPKKANACEPGDFRPITVSSVMARTFHKLLARRLMKRVGLDPRQKAFIPLDGCASNIFDLDVVLRYHCQNFKPLYIASMDIAKAFDSVTHNTIKCAMHAAGVPQSMVQYIMSTYERSTTRVMCGDWESDEFHPTCGVKQGDPLSPVLFNLVMDRLLKKITPDVGVDVDGVHFNVLAFADDLVFMATTPNGLQTSINLAAGYLTSCGLNINATKSFTVSIRNVPHIKKSVVDPGIRFTCQGRQLPSLSREDEWRYLGVQFTPEGRQSSNDLALINGALEKLTKAPLKPQQRMFALRVMVLPSVYHTLILGNTNLSKLKKIDKSVRGTIRKWLNLPHDVTNAYFHANVKDGGLSIPTLRWFVPLRRKKRLEEMAKTKGESTYLTVEIQKASRRLRDGAVEVNSTRELEQRWARCLHATSDGMGLRESKKVPQQNQWVTEGSRFLSGRDYLNITRLRINALPTRSRTGRGQRKDRICRAGCNQVETLNHVLQICHRTHGARIERHNAIAKYLQRALENKHAKVEDEPHFKTNEGLRKPDIVAIQNSQATVIDVQIVGEQSSLEIAHRKKIDYYRPLERTIKEKYGVEDVKFTTAILSCRGIWCKTSAEDLLTLGIIRREELKLISTRVLIGGLNAFWRFNRMTSVRQRTGIG

SEQ ID NO: 10004 - protein, 1073 aa, Mellicta athalia
MSCPSEDQINDTGTRTPDLICPICRKKYKRQAWFQKHLASHGGVDAGQSSISSPTIVADRVNPHMSQDDTEHAFAVNQEPIIIRPRLSFPSIPDKTWKSHDLRLAVLLEHSVQNQPLHGQIEAFQNTVYDYFGDFYPPTQGSQGTKKENGFKSKLRRRKRELTKQLRLAKAAGDKQLSHGLARALRSILKLIQEVSQQILNDEREYSRAKTEVAFDKNPFKFSKKVFSTGVGKLDVKKEVVAKYFEDTYKRPLVPASYDDPCDQKPAEAEIAFQTEAPNIDELEAVIRKKPSDSAPGPDGIPYIIYKKCPFVRKCLLKLITKIWHQKEIPKQFCLARFILIPKKEEVSHPRDCRPIALTNTISKVFFSILQHRSMRFMLDNKYLEPKYQKGFLPGVSGCIEHNSLVSDCLEDARKHERQITICWLDLENAFGSVRHELIQFALKWYNFPDVLCRMIESYYKQLQFTVSIGTERTGTITYGVGLFQGCCLSPTVFNIIFNILIDLLLKHEKRWGYRLKRNEQYISVALAFADDLTLITKNPIQCRALLQVVEKFCAWTNGMRIRPAKSYCLCLARRGTTFGPIDPNLEANDRRIAVVSEGKPFKFLGKKIDHRGKSNNSLLIQQKLNEDLKTVDKLTLAGPKKVWIYENYMTSQFSWPFLVYDLDKTVLKTLDAMVTKFLKSWLGVARQVDPSLLYRSTNNFGLNYKRPSTIYAKLRITKHYILKESKDDLIMHIDVDSDKMKNLESRLQFHKAFLSGTGQGRSGLGTLPRPTDKELLKQFVERDAEHNYTLHATGLEIQNDWLSIGDYCIPLALKWRSVLYNWSPELLKFYLNAFQLSLPDPSNLVRWGKADDKRCQKCQADVCTTRHILTGCKAELDAGLYAYRHDRVLEIIREALSLAVARSKKGLTKSSGKITFVKEGGKAGSQKDKPSSIIEKADDWTLLMDTYEKHYTMPDQLCVTSRRPDILLYSMQRKLVFFVELTVPWETNIPKDHEYKMNKYYDLVDGLIRKGLRTRHYAVEMGARGLPAKSLYSLLKDLGLPRPSISTFLERMTKAALAASYRIWLGRGCDRI

SEQ ID NO: 10005 - protein, 1305 aa, Ochropleura plecta
MLTRSAHARSARHPPPGSSLSSASPPPEPSLVVSAVTPAVAVASSSSDEYFSPPTTPPPVRRRGRHRPPDGLGPRGPPASDRVPALGGSVQRMRWTQSINENVMRSYYGATEGGNNLTAYRVRMLSLFQVLEPAVNVSAQRLSDQVRVIQRNRMLDDTVLDRLRTEMQSSQVITSSSQVVVPPQSHQVVNRANEVSNGMATNVSTQCSEEMRSTLEGAIREYRYMSPELRPRLPRLPMHNKNRALVAALDSQLSSYFDNCENLTDAHSILYCAAVAACRVVHVKFPDDRATRPKPAIPFWQCRIERRIGAARALIGKLICFREGNTRPRVMRFVRRAFAGTDISPPDYMSRIAERIDFLKQKVYAWANRIRRYKRRVERYTQNRTFQSDERWVYRAWERPDQGVSDTHLPDDDAMCLFWRSIWSVPVSHTEGEWTREVERACDPIPEMGVLTISPQDVACAVRPLPNWKSPGPDGLHNFWIKWIQRSHVRLAALFQSALESGSLPKFLTTGLTHLLHKSGSTAEPKNYRPITCLPTLYKVLTSILRAKITKHIDDNSIMSASQNGCRNGSRGTKELLLIDMAISQQVRRSRRHLSTCWIDYKKAYDSVPHTWLMRVLEMYKVDATLRTFLSSCMRQWSTVLRYPGCRQFQMNSEPIRIERGIFQGDSLSPLWFCLALNPLSTLLENSGLGYRLRRGGQVISHLLYMDDLKLFAPNDLQLMELLKVTETFSSAIRMEFGVDKCAVMHVKRGEIVESVGTQLSDSINLRSLSATETYKYLGMSEALGINGADMKQSLKERFFGRLRKVLNSLLSGGNKVRAFNGWVMPVLMYSFGILKWTQTELDTLDRKVRTLLTAFRMHHPRSSVMRLYIPRSCGGRGFLNAKTLHNREICSLREYFLETDVGMHRDVVAVDKGLTPLSLAKENWRKPVVLDTNDRREVWQSKELHGRFFRALHGPDVDQSASVAWLRSGDLFGETEGFVCAIMDEVMMTNNYRRFIVKDGTVDICRACHRPGESIRHIISGCSRLANGEYLHRHNLVARIIHQQLALKYNLVELEVPYYRYEPDPVLEHGNITLYWDRSIITDRTIVANKPDIVVVDRSERRAMIVDITVPHDENLVKAEKDKRSLYRLKNILPSHIKATLVQSLIFPIVDYADVCYYDLNADLLNKLDRLLNNCIRFVFNLRKYDHVSAHRSLLKWLPIRERRALRALTTLFSLLNKPTSPSYLSSHCQYLCSAHSKNLRSANNRLLRCPSHRSGFIKSAFFVQAVFLWNELPQSIRMEISPFTFKRKVREHIYKKLVDSSRK

SEQ ID NO: 10006 - protein, 1193 aa, Mesoligia furuncula
MLTRSRARQLNKTTHPTSSGSSLSSASPLPEPAPDVSPETPAAAVASSSSDEYFSPPTTPPPPVCRRGRGRPPATLGLRGPPASYRVPAPGGSVQRMRWTQTVNENVMRAYFGATEGGSNLTAYRGRMLSLFQVLEPAINVSAQRLSDQVRVILRNHMLDNVVLDRLRLESRNSHVTSASSSVAVQLQNLPNVSQRPDRVDVEDGDEAISVSPQCNARLRSALEDAFCEYRSVPPGLRPRLPRLPMHKKNKALVCALDSQLANYFNDSKDLTDTHSILYCAAVAACRVAHVKFPNSDRAPRPKPAVPAWQCRIECRIGEARALIGKLICFREGNTRPRVMRFVRRAFSGTDISSRDYLSRVTERIDFLKQKICAWANRIRRYRRRVERYTQNRTFQSDERWVYRTWERPDHCVTDTRLPGDDAMCSFWRNIWSVPVSHTEGDWTRKIERTCDLLPEMGVLTISPQDVARAVRPLPNWKSPGPDGLHNFWIKWFQGSHARLASQFQSALESGSLPKFLTTGITHLLHKSGSTADPKNYRPITCLPTVYKVLTSILRAKINKHIDTNSIMSVSQNGCGNGSRGTKELLLIDMTISQQVRRFRKDLSTCWIDYKKAYDSVPHTWLMRVLELYKVDTTLRTFLMSCMGQWRTVLSYPGCRNIQRNSEPIRIERGIFQGDSLSPLWFCLALNPLSTLLEDSGLGYRLRRGGQVISHLLYMDDLKLFAPNNLQLMELLKITETFSSAIRMEFGVDKCAVMHVKRGEIVESVGTQLSDSTNLRALSASETYKYLGMSEALGINVTDMKQSLKERFFGRLKKVFNSLLSGGNKVRAFNGWVMPVLMYSFGILKWTQTELDALDRKVRTLLTANRMHHPRSSVMRLYIPRKCGGRGFLNAKTLHNREICSLREYFLETDVGMHRDVVAVDKGLTPLSLGKENWRKPVVLDTNDRMEVWQSKELHGRFFRALHGPDVDLIASVAWLRFGDLFGETEGFVCAIMDEVMMTNNYRRFIVKDGTVDICRACHRPGESIRHIISGCSRLANGEYLHRHNLVARIIHQQLALKYSLVESEVPYYRYVPDPVLENGNITLYWDRSIITDRTIVANKPDIVVVDRSERRAMIVDITVPHDENLVKAEKDKQVKYLDLAREVVDMWDVDSAIIVPIVVTANGLIAKSLDQHLKRLSLGTARIVRRFLSLEP

SEQ ID NO: 10007 - protein, 1075 aa, Mesoligia furuncula
MLSLFQVLEPAVNVSAQRLSDQVRVIQRNHMLDDTVLDRLRSEMQSSHVIAPQSQTAVILPQPNISHADEGSNDTAINVSTQCNEELRSALEDAIQEYRFMSPELRPRLPRLPMHNKNRALVAALDSQLSKYFDTCEDLIDTHSILYCAAVAACRVAHVKFANDSRATRPKEAVPAWQCRIERRIGGARTLIGKLICFREGNTRPRVMRFVRRAFSGTDISPQDYMSCVTERIDFLKQKVYAWANRIRRYRRRVERYTQNRTFQSDERWVYRGWERLDQGVAETCLPDDDAMCSFWRNIWSVPVSHTEGDWAREVERACDPIPEMGAITIIPQDVARAVRPLPNWKSPGPDGLHNFWIKWFPRSHALLASQFQTALKSGSLPQFLTTGITHLLHKSGSTAEPKNYRPITCLPTVYKVLTSILRTKINKHIDTNSIMSASQNGCRNGSRGTKELLLIDMAISQQVRRFRKDLSTCWIDYKKAYDSVPHTWLMRVLELYKVDTTLRTFLMSCMGQWRTVLRYPGCRNIQRNSEPIRIERGIFQGDSLSPLWFCLALNPLSTLLEDSGLGYRLRRGGQVISHLLYMNDLKLFAPNNLQLMELLKITETFSSAIRMEFGVDKCAVMHVKRGEIVESVGTQLSDSTNLRALSASETYKYLGMSEALGINVTDMKQSVKERFFGRLKKVLNSLLSGGNKVRAFNGWVMPVLMYSFGILKWTQTELDALDRRVRTLLTANRMHHPRSSVMRLYIPRKCGGRGFLNAKTLHNREICSLREYFLETDVGMHRDVVIVDKGLTPLSLAKENWRKPVVLDTNDRMEVWQSKELHGRFLRALRGPDVDLQGSVAWLRFGNLFGETEGFVCAIMDEVMMTNNYRRFIVKDGTVDICRACHRPGESIRHIISGCSRLANGEYLHRHNLVARIIHQQLALKYNLVESEVPYYRYVPDPVLENGNITLYWDRSIITDRTIVANKPDIVVVDRSERRAMIVDITVPHDENLVKAEKDKQIKYLDLAREVVDMWDVDTAIIVPIVVTANGLIAKSLDQQLRRLSLGSWIKGLIQRAVLLDTARIVRRFLSLEP

SEQ ID NO: 10008 - protein, 868 aa, Mesoligia furuncula
MRFVRRAFSGTDISSRDYLSRVTERIDFLKQKIYAWANRIRRYRRRVERYTQNRTFQSDERWVYRAWERPDHGVTDTRLPDDGAMCSFWRNIWSVPVSHTEGDWTAKIERACDLIPEMGVLTISPQDIARAVRPLPNWKSPGPDGLHNFWIKWFQGSHARLASQFQSALESGSLPQFLTTGITHLLHKSGSTADPKNYRPITCLPTVYKVLTSILKAKINKHIDTNSIMSVSQNGCKNGSRGTKELLLIDMTISQQVRRFRKDLSTCWIDYKKAYDSVPHTWLMRVLELYKVDTTLRTFLMSCMRQWRTVLRYPGCRNIQRNSEPIRIERGIFQGDSLSPLWFCLALNPLSTLLEDSGLGYRMRRGGQAISHLLYMDDLKLFAPNNLQLMELLKITETFSSAIRMEFGVDKCAVMHVKRGVIVESVGIQLSDSTNLRALSASETYKYLGMSEALAINVTDMKQSLKERFFGRLKKVFNSLLSGGNKVRAFNGWVMPVLMYSFGILKWTQTELDALDRKVRTLLTANRMHHPRSSVMRLYIPRKCGGRGFLNVKTLHNREICSLREYFLETDVGMHRDVVAVDKGLTPLSLGKENWRKPVVLDTNDRMEVWQSKELHGRFFRALHGPDVDLIASVAWLRFGDLFGETEGFVCAIMDEVMMTNNYRRFIVKDGTVDICRACHRPGESIRHIISGCSRLANGEYLHRHNLVARIIHQQLALKYSLVESEVPYYRYVPDPVLENGNITLYWDRAIITDRTIVANKPDIVVVDRSERRAMIVDITVPHDENLVKAENDKQVKYLDLAREVVDMWDVDSAIIVPIVVTANGLIAKSLDQHLKRLSLGSWIKGLIQKAVLLDTARIVRRFLSLEP

SEQ ID NO: 10009 - protein, 1199 aa, Spilarctia lutea
MLTRARRRAQLSPPDSSLRSALPSPEEAIEVPAGAEASSSSSSDEFFSPPTSPIPVRRQGRGRPPTSLESRGPLTSNRAPAAGGDVRRMKWTHSINENVMRAYFRATELGTNLTAYRVRLVSLFQELEPAVNVSAQRLSDQVRAIQRCHLLDDAALERIRSDIRNSLTVPSSSHVLNVVTNSTPQVPQNDDISELVDSEIISVSTQYNDRIRSTLEDAIREYRYVNLNNRPRLSRLPIHKRNLALVSALDSLLPKYFSNSEDLSDTHSILYCAAIAVCRVAGVKFAEYTTTTRQENTLPAWQYRIERRIAEARTLIGKLMSFRSGNTRPRVMRFVKRAFLGTTISPQEYMSCVTERIDFLKQKVYAWANRIRRYRKRVDRYNQNRMFQRNEKWVYRKWENLSPCMSDGQVPDENATNSFWRNMWSVPVTHTEGDWYRDVERSCESLLPMEPISIDEEDVSCAVRSLPNWKAPGPDGLHNFWLKWFRSSHACLASQFQTALDSGSLPQFLTTGITHLLYKSGDAMDPKNFRPITCLPTLYKLLTSILRLKITTHINHNSILSISQNGCRSGTRGTKELLIIDMTISQQVRRNRKSLATCWIDYKKAFDSVPHTWLLKVLELYKIDTTLCTFLKVCMGQWRTALRYPGCRQSAMNDVLIKIERGIFQGDSLSPLWFCLALNPLSTLLEGSGLGYRLQKDDRVISHLFYMDDLKLLAPTKLQLTALLKVTENFSNSIKMEFGVDKCAVMYVKKGEIMESEGIELSDSTKLRSLSATETYKYLGFSQSLGMPESDMKQTLRERFFSRLKKVLKSLLSGGNKVRACNGWVMPVLMYSFGVLRWTQTELDAIDRRVRTLLTAFRMHHPRSSVMRLYIPRRLGGRGLLNIKTLHNREVYNLREYFLQTDVGVHRSVVTVDTGLTPLALAKENWRKPVVLSTNDRREVWKGKELHGRFYRALHGPDIDFKTSTSWLRYGDLFGETEGFVCAIMDEVIMTNNYRKYILRDGTVDICRACHRPGESIRHIISGCSRLANGEYLHRHNQVARIVHQQLALKYHLVNSEVPYYRYVPDPVLENGRATLYWDRSIITDRTIVANKPDIVVIDRLERRAIIIDIAVPHDENLVKVEKEKQIKYLDLSHEIVDMWNVDSVIIVPIVVSAHGLIAKSLDQHLKRLTLEGWIKGLVQKAVLLDTARIVRRFLSLEP

SEQ ID NO: 10010 - protein, 1199 aa, Spilarctia lutea
MLTRARRRAQLSPPDSSLRSALPSPEEEIEVPAGAEASSSSSSDEFFSPPTSPIPVRRQGRGRPPTSLGSRGPLTSNRAPAAGGDVRRMKWTHSINENVMRAYFRATELGTNLTAYRVRLVSLFQELEPAVNVSAQRLSDQVRAIQRCHLLDDAALERIRSDIRNSLTVPSSSHVLNVVTNSTPQVPQNDDISELVDSEIISVSTQYNDRIRSTLEDAIREYRYVNLNNRPRLSRLPIHKRNLALVSALDSLLPKYFSNSEDLSDTHSILYCAAIAVCRVAGVKFAEYTTTTRKENTLPAWQYRIERRIAEARTLIGKLMSFRSGNTRPRVMRFVKRAFLGTTISPQEYMSCVTERIDFLKQKVYAWANRIRRYRKRVDRYNQNRMFQRNEKWVYRKWENLSPCMSDGQVPDENATNSFWRNMWSAPVTHTEGDWYRDVERSCESLLPMEPISIDEEDVSCAVRSLPNWKAPGPDGLHNFWLKWFRSSHACLASQFQTALDSGSLPQFLTTGITHLLYKSGDAMDPKNFRPITCLPTLYKLLTSILRLKITTHINHNSILSISQNGCRSGTRGTKELLIIDMTISQQVRRNRKSLATCWIDYKKAFDSVPHTWLLKVLELYKIDTTLCTFLKVCMGQWRTALRYPGCRQSAMNDVLIKIERGIFQGDSLSPLWFCLALNPLSTLLEGSGLGYRLQKDDRVISHLFYMDDLKLLAPTKLQLTALLKVTENFSNSIKMEFGVDKCAVMYVKKGEIVESEGIELSDSTKLRSLSATETYKYLGFSQSLGMPESDMKQTLRERFFSRLKKVLKSLLSGGNKVRACNGWVMPVLMYSFGVLRWTQTELDAIDRRVRTLLTAFRMHHPRSSVMRLYIPRRLGGRGLLNIKTLHNREVYNLREYFLQTDVGVHRSVVTVDTGLTPLALAKENWRKPVVLSTNDRREVWKGKELHGRFYRALHGPDIDFKTSTSWLRYGDLFGETEGFVCAIMDEVIMTNNYRRYILKDGTVDICRACHRPGESIRHIISGCSRLANGEYLHRHNQVARIVHQQLALKYHLVNSEVPYYRYVPDPVLENGRATLYWDRSIITDRTIVANKPDIVVIDRLERRAIIIDIAVPHDENLVKVEKEKQIKYLDLSHEIVDMWNVDSVIIVPIVVSAHGLIAKSLDQHLKRLTLEGWIKGLIQKAVLLDTARIVRRFLSLGP

SEQ ID NO: 10011 - protein, 1197 aa, Spilarctia lutea
MLTRARRRALITSPDSSLRSALPSPEEAIEVPAGAEASSSSSSDEFFSPPTSPIPVRRQGRDRPPTSLGSRGPLTSNRAPATGGDVRRMKWTHSINENVMRAYFRATELGTNLTAYRVRLVSLFQELEPAVNVSAQRLSDQVRAIQRCHLLDDAVLERIRSDVRNTLTIPSSSHTVDVVVNTPQLPDNHDVDEQRESEIISVSTQCNDRIRSALEDAIQEYRYVNYNNRPRLPRLPIHKRNLALVGALNSLLPDYFGNSEDLSDTHSILYCAAIAVCRVVGVKFIERITTRTKNTVPAWQYRIERRIAETRTLIGKLISFKSGNTRPRVMRFVKQAFLGTTISPQQYMSSVTERIDFLKQKVCAWANRIRRYKKRGDRFNQNRMFQTNEKWVYRKWEAPNPCDRDGHLPDENATNTFWRNIWSVPVTHTDGDWMRDVKRSCESITNMEPVRINKEDVSCAVRSLPNWKAPGPDGLHNFWLKWFRSSHACLASQFQAALDSGSLPQFLTTGITHLLYKSGGTMDPKNFRPITCLPTLYKLLSSILRIKITTHINHNSILSISQNGCRSGTRGTKELLIIDMTISQQVRRNRRNLATCWIDYKKAYDSVPHTWLLKVLELYKIDKTLCTFLKSCMGQWRTVLRYPGCRQSPMTDVLIKIERGIFQGDSLSPLWFCLALNPLSTLLEGSELGYGLRKDDRVISHLLYMDDLKLLAPTKLQLTALLKITENFSNSIKMEFGVDKCAVMYVKKGLIVESEGVELSDSTKLRSLSVTEGYKYLGFTQSLGIPESDMKQALRERFFGRLKKVLKSLLSGGNKVRAYNGWVMPVLMYSFGILRWTQTELDALDRGVRTLLTAFRMHHPRSSVMRLYIPRKLGGRGLLNIKTLHNREIYNLREYFLHTDVGMHRSVVAVDTGLTPLALAKENWRKPVVLSTDDRREVWKGKELHGRFFRALHGPDIDFKTSTSWLRYGDLFGETEGFVCAIMDEVIMTNNYRKYILKDGTVDICRACHRPGESIRHIISGCSRLANGEYLHRHNQVARIVHQQLALKYNLVISEVPYYRYVPDPVLENGRATLYWDRSIITDRTIVANKPDIVVIDRLERRAIIIDIAVPHDENLVKVEKEKQIKYLDLSHEIVDMWNVDSVIIVPIVVSVHGLIARSLDQHLKRLTLDGWIKGLIQKAVLLDTARIVRRFLSLEP

SEQ ID NO: 10012 - protein, 1199 aa, Spilarctia lutea
MLTRARRRAQLSPPDSSLRSALPSPEEAIEVPAGAEASSSSSSDEFFSPPTSPIPVRQQGRGRPPTSLGSRGPLTSNRAPAAGGDVRRMKWTHSINENVMRAYFRATELGTNLTAYRVRLVSLFQELEPAVNVSAQRLSDQVRAIQRCHLLDDAALERIRSDIRNSLTVPSSSHVLNVVTNSTPQVPQNDDISELVDSEIISVSTQYNDRIRSTLEDAIREYRYVNLNNRPRLSRLPIHKRNLALVSALDSLLPKYFSNSEDLSDTHSILYCAAIAVCRVAGVKFAEYTTTTRQENTLPAWQYRIERRIAEARTLIGKLMSFRSGNTRPRVMRFVKRAFLGTTISPQEYMSCVTERIDFLKQKVYAWANRIRRYRKRVDRYNQNRMFQRNEKWVYRKWENLSPCMSDGQVPDENATNSFWRNMWSVPVTHTEGDWYRDVERSCESLLPMEPISIDEEDVSCAVRSLPNWKAPGPDGLHNFWLKWFRSSHACLASQFQTALDSGSLPQFLTTGITHLLYKSGDAMDPKNFRPITCLPTLYKLLTSILRLKITTHINHNSILSISQNGCRSGTRGTKELLIIDMTISQQVRRNRKSLATCWIDYQKAFDSVPHTWLLRVLELYKIDTTLCTFLKVCMGQWRTALRYPGCRQSAMNDVLIKIERGIFQGDSLSPLWFCLALNPLSTRLEGSGLGYRLQKDDRVISHLFYMDDLKLLAPTKLQLTALLKVTENFSNSIKMEFGVDKCAVMYVKKGEIVESEGIELSDSTKLRSLSATETYKYLGFSQSLGMPESDMKQTLRERFFSRLKKVLKSLLSGGNKVRACNGWVMPVLMYSFGVLRWTQTELDAIDRRVRTLLTAFRMHHPRSSVMRLYIPRRLGGRGLLNIKTLHNREVYNLREYFLQTDVGVHRSVVTVDTGLTPLALAKENWRKPVVLSTNDRREVWKGKELHGRFYRALHGPDIDFKTSTSWLRYGDLFGETEGFVCAIMDEVIMTNNYRKYILKDGTVDICRACHRPGESIRHIISGCSRLANGEYLHRHNQVARIVHQQLALKYHLVNSEVPYYRYVPDPVLENGRATLYWDRSIITDRTIVANKPDIVVIDRLERRAIIIDIAVPHDENLVKVEKEKQIKYLDLSHEIVDMWNVDSVIIVPIVVSAHGLIAKSLDQHLKRLTLEGWIKGLIQKAVLLDTARIVRRFLFLEP

SEQ ID NO: 10013 - protein, 1199 aa, Xestia c-nigrum
MLTRAAARRARLSPPDPSLSSASPPPEPSPIVSAVTPAVAVASSSSDEYFSPPTTPPPARRRGGRRPPDGLGPRGPPASDRVPAPGGSVQRMRWTQSNNENVMRAYYGATEGGINLTAYRVRMLSLFQVLEPAVNVSAQRLSDQVRVIQRNRMLDDTVLDRLRTEVQSSRVTATPPSQAVVPPQSTVTTPYCDGDVSSDIVTNVSTQCSEDMRSALEGAIREYRFMTPELRPRLPRLPMHNKNKMLMAVLDSQLSNYFDSCEDLTDIHSILYCAAVAACRVAHVKFSDDRATRPKPAVPAWQYRIEQRIGGARALIGKLICFREGNTRPRVMRFVRRAFSGTDISPRDYMFRVTERIDFLKQKVYAWASRIRRYKRRVDRYTQNRTFQRDERWVYRAWERPDQGVADTRLPDDDAMCSFWRSIWSVPVSHAEGEWTRVVERACDPVPEMGAITISPQDVACAVRPLPNWKSPGPDGLHNFWIKWFTRSHARLATLFQSALESGSLPEFLTTGITHLLHKSGSTAEPKNYRPITCLPTVYKVLTSILRAKITKHIDENSVMSASQNGCRNGSRGTKELLLIDMAINQQVRRSRKDLSTCWIDYKKAYDSVPHTWLRRVLELYKVDATLRTFLMSCMGQWRTVLRYPGCRQIQRNSEPIRIERGIFQGDSLSPLWFCLALNPLSTLLEDSGLGYQLRKDGRVISHLLYMDDLKLFAPNDLQLMELLKVTETFSSAIRMEFGVDKCAVMHVKRGGIVESVGTQLSDSINLRSLSATETYKYLGMSEALGISVADMKQSLKERFFGRLKKVFNSLLSGGNKVRAFNGWVMPVLMYSFGILKWTQTELDALDTKVRKLLTAYRMHHPRSSVMRLYIPRKCGGRGFLNAKTLHNREICSLREYFLAADVGMHRDVVAMDKGLTPLSLAKENWRIPVVFTTDDRRKEWQSKELHGRFYRALHGPDVDFQASVSWLRSGDLFGETEGFVCAIMDEVMMTNNYRRFIVKDGTVDICRACHRPGESIRHIISGCSRLANGEYLHRHNLVARIIHQQLALKYNLVESEVPYYRYVPDPVLNSGSITLYWDQSIITDRTVIANRPDIVVMDRSERRAMIVDITVPHDENLVKAEKDKQIKYLDLAREVVDMWEVDSAIIVPIVVSAHGLIAKSLDQYLRRLSLGSWIKGLIQKAVLLDTARIVRRFLSLEP

SEQ ID NO: 10014 - protein, 1047 aa, Xestia c-nigrum
MLDDTVLDRLRTEVQSSRVTATPPSQAVVPPQSTVTTPYCDGDVSSDMVTNVSTQCSEDMRSALEGAIREYRFMTPELRPRLPRLPMHNKNKMLMAVLDSQLSNYFDSCEDLTDIHSILYCAAVAACRVAHVKFSDDRATRPKPAVPAWQYRIEQRIGGARALIGKLICFREGNTRPRVMRFVRRAFSGTDISPRDYMFRVTERIDFLKQKVYAWASRIRRYKRRVDRYTQNRTFQRDERWVYRAWERPDQGVADTRLPDDDAMCSFWRSIWSVPVSHAEGEWTRVVERACDPVPEMGAITISPQEVACAVRPLPNWKSPGPDGLHNFWIKWFTRSHARLATLFQSALESGSLPEFLTTGITHLLHKSGSTAEPKNYRPITCLPTVYKVLTSILRAKITKHIDENSVMSASQNGCRNGSRGTKELLLIDMAISQQVRRSRKDLSTCWIDYKKAYDSVPHTWLRRVLELYKVDATLRTFLMSCMGQWRTVLRYPGCRQIQRNSEPIRIERGIFQGDSLSPLWFCLALNPLSTLLEDSGLGYRLRKDGRVISHLLYMDDLKLFAPNDFQLMELLKVTETFSSAIRMEFGVDKCAVMHVKRGGIVESVGTQLSDSINLRSLSATETYKYLGMSEALGISVADMKQSLKERFFGRLKKVFNSLLSGGNKVRAFNGWVMPVLMYSFGILKWTQTELDALDTKVRKLLTAYRMHHPRSSVMRLYIPRKCGGRGFLNAKTLHNREICSLREYFLAADVGMHRDVVAMDKGLTPLSLAKENWRIPVVFTTDDRRKEWQSKELHGRFYRALHGPDVDFQASVSWLRSGDLFGETEGFVCAIMDEVMMTNNYRRFIVKDGTVDICRACHRPGESIRHIISGCSRLANGEYLHRHNLVARIIHQQLALKYNLVESEVPYYRYVPDPVLVNGSITLYWDQSIITDRTVIANRPDIVVMDRSERRAMIVDITVPHDENLVKAEKDKQIKYLDLAREVVDMWEVDSAIIVPIVVSAHGLITKSLDQHLRRLSLGSWIKGLIQKAVLLDTARIVRRFLSLEP

SEQ ID NO: 10015 - protein, 1198 aa, Xestia c-nigrum
MLTRSAARRALLPPPDPSLSSASPPPEPSPIVSAVTPAVAVASSSSDEYFSPPTTPPPARRRGGRRPPDGLGPRGPPASDRVPAPGGSVQRMRWTQSNNENVMRAYYGATEGGNNLTAYRVRMLSLFQVLEPAVNVSAQRLSDQVRVIQRNRMLDDTVLDRLRTEVQSSHVTATPPSLAVVPPQSTIITDRDDDVCSDMITNVATQCSEDMRSALEGAIREYRFVTPELKQRLPRLPMNNKNRMLVAVLDSQLSNYFDDCEDLTDVHSVLYCAAVAACRVARVKFSDDRATRPKPAVPAWQYRIEQRIGGARALIGKLICFREGNTRPRVMRFVRRAFSGNDISPRDYMSRVTERIDFLKQKVYAWASRIRRYKRRVDRYTQNRTFQRDERWVYRAWERPDQGVADTHLPDDDAMCSFWRSIWSVPVSHAEGEWTRVIERACDPVPEMGAITISPQDVACAVRPLPNWKSPGPDGLHNFWIKWFTRSHARLATLFQSALESGSLPEFLTTGLTHLLHKSGSTAEPKNYRPITCLPTVYKVLTSILRTKICKHIDDNSVMSASQNGCRNGSRGTKELLLIDMAISQQVRRSRKDLSTCWIDYKKAYDSVPHTWLMRVLELYKVDATLRTFLMSCMRQWRTVLRYPGCRQIQRNSEPIRIERGIFQGDSLSPLWFCLALNPLSTLLEDSGLGYQLRKDGRVISHLLYMDDLKLFAPNDLQLMELLKVTETFSSAIRMEFGVDKCAVMHVKRGEIVESVGTQLSDSINLRSLSATETYKYLGMSEALGINVADMKQSLKERFFGRLKKVFNSLLSGGNKVRAFNGWVMPVLMYSFGILKWTQTELDALDTKVRKLLTAFRMHHPRSSVMRLYIPRKCGGRGFLNAKTLHNREICSLREYFQEADVEMHRDVVAMDKGLTPLSLAKENWRKPIVLTTDDRRKEWQGKELHGRFYRALHGPDVDFLASVSWLRSGDLFGETEGFVCAIMDEVMMTNNYRRFIVKDGTVDICRACHRPGESIRHIISGCSRLANGEYLHRHNLVARIIHQQLALKYNLVESEVPYYRYVPDPVLVNGNITLYWDQSIITDRTVIANRPDIVVMDRSERRAMIVDITVPHDENLVKAEKDKQIKYLDLAREVVDMWEVDSAIIVPIVVSAHGLIAKSLDQHLRRLSLGSWIKGLIQKAVLLDTARIVRRFFSLEP

SEQ ID NO: 10016 - protein, 1198 aa, Xestia c-nigrum
MLTRSAARRALLPPPDPSLSSASPPPEPSPIVSAVTPAVAVASSSSDEYFSPPTTPPPARRRGGRRPPDGLGPRGPPASDRVPAPGGSVQRMRWTQSNNENVMRAYYGATEGGNNLTAYRVRMLSLFQVLEPAVNVSAQRLSDQVRVIQRNRMLDDTVLDRLRTEVQSSHVTATPPSQAVVPPQSTVITDRDDDVCSDMITNVATQCSEDMRSALEGAIREYRFVTPELRPRLPRLPMNNKNRMLVAVLDSQLSNYFDDCEDLTDVHSVLYCAAVAACRVARVKFSDDRVTRPKPAVPAWQYRIEQRIGGARALIGKFICFREGNTRPRVMRFVRRAFSGTDISPRDYMSRVTERIDFLKQKVYAWASRIRRYKRRVDRYTQNRTFQRDERWVYRAWERPDQGVADTHLPDDDAMCSFWRSIWSVPVSHAEGEWTRVIERACDPVPEMGAITISPQDVACAVRPLPNWKSPGPDGLHNFWIKWFTGSHARLATLFQSALESGSLPEFLTTGLTHLLHKSGSTAEPKNYRPITCLPTVYKVLTSILRTKICKHIDDNSVMSASQNGCRNGSRGTKELLLIDMAISQQVRRSRKDLSTCWIDYKKAYDSVPHTWLMRVLELYKVDATLRTFLMSCMRQWRTVLRYPGCRQIQRNSEPIRIERGIFQGDSLSPLWFCLALNPLSTLLEDSGLGYQLRKDGRVISHLLYMDDLKLFAPNDLQLMELLKVTETFSSAIRMEFGVDKCAVMHVKRGEIVESVGTQLSDSINLRSLSATETYKYLGMSEALGINVADMKQSLKERFFCRLKKVFNSLLSVGNKVRAFNGWVMPVLMYSFGILKWTQTELDALDTKVRKLLTAFRMHHPRSSVMRLYIPRKCGGRGFLNAKTLHNREICSLREYFQEADVEMHRDVVAMDKGLTPLSLAKENWRKPIVLTTDDRRKEWQGKELHGRFYRALHGPDVDFLASVSWLRSGDLFGETEGFVCAIMDEVMMTNNYRRFIVKDGTVDICRACHRPGESIRHIISGCSRLANGEYLHRHNLVARIIHQQLALKYNLVESEVPYYRYVPDPVLVNGNITLYWDQSIITDRTVIANRPDIVVMDRSERRAMIVDITVPHDENLVKAEKDKQIKYLDLAREVVDMWEVDSAIIVPIVVSAHGLIAKSLDQHLRRLSLGSWIKGLIQKAVLLDTARIVRRFFSLEP

SEQ ID NO: 10017 - protein, 1197 aa, Griposia aprilina
MLTRSAALRARLPTPDSSLSSASPPPVSSPIVSAVTTPAAVVASSSSDEYFSPPTTPPPARRRGGHRPPDGLGPRGPPASDRVPAPGGSVQRMRWTQSINENVMRSYYGATEGGNNLTAYRVRMLSLFQVLEPAVNVSAQRLSDQVRVIQRNHMLDDTVLDRLRSEMQSSHVIAPPSQTVVVLPQPITSHDEGSDDRATNVSTQCNEELRSALEGAIREYRFMSPELRPRLPRLPMHNKNRALVAALDSQLSNYFDDCVDLTDTHSILYCAAVAACRVAHVKFANDSRATRPKPAVPAWQCRIERRIGGARALIGKLICFREGNSRPRVMRFVRRAFAGTDVSPQGYISCVTERIDFLKQKVYAWASRIRRYKRRVERYTQNRTFQRDERWVYRDWERPDQGVADTYLPDDDAMCSFWHNIWSVPVSHTEGDWTREVERACEPIPEMGAITICPQDVARAVRPLPNWKSPGPDGLHNFWIKWFLKSHARLAAQFQAALESGLLPQFLTTGVTHLLHKSGSIAEPKNYRPITCLPTVYKVLTSILRAKINKHIDTNSIMSASQNGCRNGSRGTKELLLIDMAISQQVRRSRKDLSTCWIDYKKAYDSVPHTWLMRVLELYKVDATLRTFLKSCMGQWRTVLRYPTCRNTQRNSEPIRIERGIFQGDSLSPLWFCLALNPLSTLLEDSGLGYRLRRGGRVISHLLYMDDLKLFAPNNLQLIELLKVTETFSSAIRMEFGLDKCAVMHVKRGEIVESVGTQLSDSMNLRALSASETYKYLGMSEALGVNNTDMKQSLKERFFGRLKKVFNSLLSGGNKVRAFNGWVMPVLMYSFGILKWTQTELDTLDRRVRTLLTANRMHHPRSSVMRLYIPRKCGGRGFLNAKTLHNREICSLREYFLEADVGMHRDVVAVDKGLTPLSLAKENWRKPVVLDTNDRMEVWQSKELHGRFFRALHGPDVDVQASVAWLRFGDLFGETEGFVCAIMDEVMMTNNYRRFIVKDGTVDICRACHRPGESIRHIISGCSRLANEEYLHRHNLVARIIHQQLALKYSFVESEVPYYRYVPDPVLENGNITLYWDRSIITDRTIIANKPDIVLVDRRERRAMIVDITIPHDGNLVKAEKDKKIKYLDLAREVVDMWDVDSAIIVPIVVTANGLIAKSLDQHLRRLSLSSWIKGLIQKAVLLDTARIVRRFLSLEP

SEQ ID NO: 10018 - protein, 1199 aa, Griposia aprilina
MMLTRSAKRRAHPPPPDSSLSSASPPPVSSPTVSAVTTPAAVVASSSSDEYFSPPTTPPPVRRRGGHRPPDGLGPRGPPASDRVPAPGGSVQRMRWTRSINENVMRSYYGATEGGNNLTAYRVRMLSLFQVLEPAVNVSAQRLSDQVRVIQRNHMLDDTVLDRLRNEMQSSHVIAPPSQTVVVLPQSNTSQADEESDDRATNVSIQCNDELRSALEDAIREYRFISPELRPRLPRLPMHNKNRVLVAALDAQLSNYFDDCVDLTDTHSILYCAAVAACRVAHIKFANDSRPTRPKPAVPAWQCRIERRIGGARALIGKLICFREGNTRPRVMRFVRRAFAGTNISPQDYMSCVTERIDFLKQKVYAWANRIRRYKRRVERYTQNRTFQRDERWVYRGWERPDQGVADTCLPDDDAMCSFWRNIWSVPVSHTEGDWGREVERACDPIPEMGAISICPQDVTRAVRPLPNWKSPGPDGLQNFWIKWFGRSHARLAAQYQVAIESGSLPQFLTTGVTHLLHKSGSTAEPKNYRPITCLPTVYKVLTSILRAKINKHIDTNSIMSPSQNGCRNGSRGTKELLLIDMAISQQVRRSRKDLSTCWIDYKKAYDSVPHTWLVRVLELYKVDATLRTFLKSCMGQWRTILHYPGCRNIQRDNEPIRIERGIFQGDSLSPLWFCLALNPLSTLLEDSGLGYRLRRGGQVISHLLYMDDLKLFAPNNLQLMELLKVTETFSSAIRMEFGVDKCAVMHVKRGEIVESVGTQLSYSINLRALSASDTYKYLGMSEALGINGTDMKQSLKERFFGRLKKVFNSLLSGGNKVRAFNGWVMPVLMYSFGILKWTQTELDALDRKVRTLLTANRMHHPRSSVMRLYIPRKCGGRGFLNAKTLHNREICSLREYFLEADVGMHTDVVKVDKGLTPLSLAKENWRKPVVLDTNDRMEVWQSKELHGRFFRALHEPDVDQLASVAWLRFGDLFGETEGFVCAIMDEVILTNNYRRHIMKDGTVDVCRACHRPGESIRHIISGCSRLANEEYLHRHNLVARIIHQQLALKYSLVESEVPYYRYVPDPVLENGHITLYWDRSIITDRTIVANKPDIVVGDRLERRAMIVDITVPHDGNLVKAEKDKQIKYLDLAREVVDMWDVDSAIIVPIVVTANGLIAKSLDQHLRRLSLGSWIKGLIQKAVLLDTARIVRRFLSLEP

SEQ ID NO: 10019 - protein, 1199 aa, Griposia aprilina
MMLTRSAKRRAHPPPPDSSLSSASPPPVSSPTVSAVTTPAAVVASSSSDEYFSPPTTPPPVRRRGGHRPPDGLGPRGPPASDRVPAPGGSVQRMRWTRSINENVMRSYYGATEGGNNLTAYRVRMLSLFQVLEPAVNVSAQRLSDQVRVIQRNHMLDDTVLDRLRNEMQSSHVIAPPSQTVVVLPQSNTSQADEESDDRATNVSTQCNDELRSALEDAIREYRFISPELRPRLPRLPMHNKNRVLVAALDAQLSNYFDDCVDLTDTHSILYCAAVAACRVAHIKFANDSRPTRPKPAVPAWQCRIERRIGGARALIGKLICFREGNTRPRVMRFVRRAFAGTNISPQDYMSCVTERIDFLKQKVYAWANRIRRYKRRVERYTQNRTFQRDERWVYRGWERPDQGVADTCLPDDDAMCSFWRNIWSVPVSHTEGDWGREVERACDPIPEMGAISICPQDVTRAVRPLPNWKSPGPDGLQNFWIKWFGSSHARLAAQYQVAIESGSLPHFLTTGVTHLLHKSGSTAEPKNYRPITCLPTVYKVLTSILRAKINKHIDTNSIMSPSQNGCRNGSRGTKELLLIDMAISQQVRRSRKDLSTCWIDYKKAYDSVPHTWLVRVLELYKVDATLRTFLKSCMGQWRTILHYPGCRNIQRDNEPIRIERGIFQGDSLSPLWFCLALNPLSTLLEDSGLGYRLRRGGQVISHLLYMDDLKLFAPNNLQLMELLKVTETFSSAIRMEFGVDKCAVMHVKRGEIVESVGTQLSYSINLRALSASDTYKYLGMSEALGINGTDMKQSLKERFFGRLKKVFNSLLSGGNKVRAFNGWVMPVLMYSFGILKWTQTELDALDRKVRTLLTANRMHHPRSSVMRLYIPRKCGGRGFLNAKTLHNREICSLREYFLEADVGMHTDVVKVDKGLTPLSLAKENWRKPVVLDTNDRMEVWQSKELHGRFFRALHGPDVDQLASVAWLRFGDLFGETEGFVCAIRDEVILTNNYRRHIMKDGTVDVCRACHRPGESIRHIISGCSRLANEEYLHRHNLVARIIHQQLALKYSLVESEVPYYRYVPDPVLENGHITLYWDRSIITDRTIVANKPDIVVVDRLERRAMIVDITVPHDGNLVKAEKDKQIKYLDLAREVVDMWDVDSAIIVPIVVTANGLIAKSLDQHLRRLSLGSWIKGLIQKAVLLDTARIVRRFLSLEP

SEQ ID NO: 10020 - protein, 962 aa, Griposia aprilina
MHNKNRVLVAALDAQLSNYFDDCVDLTDTHSILYCAAVAACRVAHIKFANDSRPTRPKPAVPAWQCRIERRIGGARALIGKLICFREGNTRPRVMRFVRRAFAGTNISPQDYMSCVTERIDFLKQKVYAWANRIRRYKRRVERYTQNRTFQRDERWVYRGWERPDQGVADTCLPDDDAMCSFWRNIWSVPVSHTEGDWGREVERACDPIPEMGAISICPQDVTRAVRPLPNWKSPGPDGLQNFWIKWFGRSHARLAAQYQVAIESGSLPQFLTTGVTHLLHKSGSTAEPKNYRPITCLPTVYKVLTSILRAKINKHIDTNSIMSPSQNGCRNGSRGTKELLLIDMAISQQVRRSRKDLSTCWIDYKKAYDSVPHTWLARVLELYKVDATVRTFLKSCMGQWRTILHYPGCRNIQRDNEPIRIERGIFQGDSLSPLWFCLALNPLSTLLEDSGLGYRLRRGGQVISHLLYMDDLKLFAPNNLQLMELLKVTETFSSAIRMEFGVDKCAVMHVKRGEIVESVGTQLSYSINLRALSASDTYKYLGMSEALGINGTDMKQSLKERFFGRLKKVFNSLLSGGNKVRAFNGWVMPVLMYSFGILKWTQTELDALDRKVRTLLTANRMHHPRSSVMRLYIPRKCGGRGFLNAKTLHNREICSLREYFLEADVGMHTDVVKVDKGLTPLSLAKENWRKPVVLDTNDRMEVWQSKELHGRFFRALHGPDVDQLASVAWLRFGDLFGETEGFVCAIMDEVILTNNYRRHIMKDGTVDVCRACHRPGESIRHIISGCSRLANEEYLHRHNLVARIIHQQLALKYSLVESEVPYYRYVPDPVLENGHITLYWDRSIITDRTIVANKPDIVVVDRLERRAMIVDITVPHDGNLVKAEKDKQIKYLDLAREVVDMWDVDSAIIVPIVVTANGLIAKSLDQHLRRLSLGSWIKGLIQKAVLLDTARIVRRFLSLEP

SEQ ID NO: 10021 - protein, 1198 aa, Griposia aprilina
MLTRSAARRARPPPPDSSLSSASLPPVSSPTVSAVTTPAAVVASSSSDEYFSPPTTPPPVRRRGGHRPPDGLGPRGPPASDRVPAPGGSVQRMRWARSINENVMRSYYGATEGGNNLTAYRVRMLSLFQVLEPAVNVSAQRLSDQVRVIQRNHMLDDTVLDRLRNEMQSSHVIAPPSQTVVVLPQSNTSQADKESDDRATNVSTQCNDELRSALEDAIREYRFISPELRPRLPRLPMHNKNRVLVAALDAQLSNYFDDCVDLTDTHSILYCAAVAACRVAHVKFANDSRATRPKPAVPAWQCRIQRRIGGARALIGKLICFREGNTRPRVMRFVRRAFAGTNISPQDYMSCVTERIDFLKQKVYAWANRIRRYKRRVERYTQNRTFQRDERWVYRGWERPDQSVADTCLPDDDAMCSFWRNIWSVPVSHTEGDWTREVERACDSIPEMGAITICPQDVTRAVRPLPNWKSPGPDGLHNFWIKWFGRSHARLAAQYQVALESGSLPQFLTTGVTHLLHKSGSTAEPKNYRPIACLPTVYKVLTSILRDKINKHIDTNYIMSPSQNGCRNGSRGTKELLLIDMAISQQVRRSRKDLSTCWIDYKKAYDSVPHTWLMRVLELYKVEATLRTFLMSYMGQWRTVLHYPACRNTQRNSEPIRIERGIFQGDSLSPLWFCLALNPLSTLLEDSGLGYRLRRGGQVISHLLNMDDLKLFAPNNSQLMDLLKVTETFSSAIRMEFGVDKCAVMHVKRGEIVESVGTQLSDSINLRALSASETYKYLGMSEALGINGTDMKQSLKDRFFGRLKKVFNSLLSGGNKVRAFNGWVMPVLMYSFGILKWTQTELDALDRKVRTLLTANRMHHPRSSVMRLYIPRKCGGRGFLNAKTLHNREICSLREYFLEADVGMHRDVVTVDKGLTPLSLAKENWRKPVVLDTNDRMEVWQSKELHGRFFRALHGPDVDQLASVAWLRFGDLFGETEGFVCAIMDEVMMTNNYRRFIVKDGTVDICRACHRPGESIRHIISGCSRLANEEYLHRHNLVARIIHQQLALKYSLVESEVPYYRYVPDPVLENGHITLYWDRSIITDRTIVANKPDIVMVDRLERRAMIVDITVPHDGNLVKAEKDKQIKYLDLAREVVDMWDVDSAIIVPIVVTANGLIAKSLDQHLRRLSLGSWIKGLIQKAVLLDTARIVRRFLSLEP

SEQ ID NO: 10022 - protein, 1198 aa, Griposia aprilina
MLTRSAARRARPPPPDSSLSSASLPPVSSPTVSAVTTPAAVVASSSSDEYFSPPTTPPPVRRRGGHRPPDGLGPRGPPASDRVPAPGGSVQRMRWTRSINENVMRSYYGATEGGNNLTAYRVRMLSLFQVLEPAVNVSAQRLSDQVRVIQRNHMLDDTVLDRLRNEMQSSHVIAPPSQTVVVLPQSNTSQADEESDDRATNVSTQCNDELRSALEDAIREYRFISPELRPRLPRLPMHNKNRVLVAALDAQLSNYFDDCVDLTDTHSILYCAAVAACRVAHVKFANDSRATRPKPAVPAWQCRIERRIGEARALIGKLICFREGNTRPRVMRFVRRAFAGTNISPQDYMSCVTERIDFLKQKVYAWANRIRRYKRRVERYTQNRTFQRDERWVYRGWERPDQGVADTCLPDDDAMCSFWRNIWSVPVSHTEGDWTREVERACDPIPEMGAITICPQDVTRAVRPLPNWKSPGPDGLHNFWIKWFGRSHARLAAQYQVALESGSLPQFLTTGVTHLLHKSGSTAEPKNYRPIACLPTVYKVLTSILRDKINKHIDTNYIMSPSQNGCRNGSRGTKELLLIDMAISQQVRRSRKDLSTCWIDYKKAYDSVPHTWLMRVLELYKVEATLRTFLMSCMGQWRTVLHYPACRNTQRNSEPIRIERGIFQGDSLSPLWFCLALNPLSTLLEDSGLGYRLRRGGQVISHLLYMDDLKLFAPNNSQLMDLLKVTETFSSAIRMEFGVDKCAVMHVKRGEIVESVGTQLSDSINLRALSASETYKYLGMSEALGINGTDMKQSLKDRFFGRLKKVFNSLLSGGNKVRAFNGWVMPVLMYSFGILKWTQTELDALDRKVRTLLTANRMHHPRSSVMRLYIPRKCGGRGFLNAKTLHNREICSLREYFLEADVGMHRDVVTVDKGLTPLSLAKENWRKPVVLDTNDRMEVWQSKELHGRFFRALHGPDVDQLASVAWLRFGDLFGETEGFVCAIMDEVMMTNNYRRFIVKDGTVDICRACHRPGESIRHIISGCSRLANEEYLHRHNLVARIIHQQLALKYSLVESEVPYYRYVPDPVLENGHITLYWDRSIITDRTIVANKPDIVMVDRLERRAMIVDITVPHDGNLVKAEKDKQIKYLDLAREVVDMWDVDSAIIVPIVVTANGLIAKSLDQHLRRLSLGSWIKGLIQKAVLLDTARIVRRFLSLEP

SEQ ID NO: 10023 - protein, 962 aa, Griposia aprilina
MHNKNRALVATLDSQLSNYIDDCEDLTDTHSILYCAAVAACRVAHVKFANDSRATRPKPAVPAWQCRIERRIGGARALIGKLTCFREGNTRPRVMRFVRRAFAGTNISPQDYMSCVTERIDFLKQKVYTWANRIRRYKRRVERYTQNRTFQRDERWVYRDWERPDQGVTDTYLPDDDAMCSFWRNIWSVPVSHTEGDWTREVERACEPIPEMGAITICPQDVARAVRPLPNWKSPGPDGLHNFWIKSFLRSHARLAAQFQVALESGSLPQFLTTGVTHLLHKSGSTAEPKNYRPITCLPRVYKVLTSILRAKINNHIDTNSIMSPSQNGCRNGSRGTKELLLIDMTISQQVRRSRKDLSTCWIDYKKAYDSVPHTWLMRVLELYKVDSTLRTFLKSCMEQWRTVLHYPGCRNIQRNSEPIRIERGIFQGDSLSPLWFCLALNPLSTLLENSGLGYRLRRGGQVISHLLYMDDLKLFAPNNLQLMELLKVTETFSSAIRMDFGVDKCAVMHVKRGEIVESVGTQLSDSINLRALSASETYKYLGISEALGINGTDMKQSLKERFFGRLKKVFNSLLSGGNKVRAFNGWVMPVLMYSFDILKWTQTELDALDKKVRSLLTANRMHHPRSSVMTLYIPRKCGGRGFLNAKTLHNREICSLREYFLEADVGMHRDVVTVDKGLTPLSLAKENWRKPVVLDTNDRMEVWQSKELHGRFFRALHGPDVDQLASVAWLRYGDLFGETEGFVCAVMDEVMMTKNFRRFIVKDGTVDICRACHRPGESIRHIISGCSRLANEEYLHRHNLVARIIQQQLALKYSLVESEVPYYRYVPDPVLENGHITLYWDRSIITDRTIVANKPDIVVVDRTERRAVIVDITIPHDGNLVKAEKDKQIKYLDLAREVVDMWDVDSAIIVPIVVTANGLIAKNLDQHLRRLSLGSWIKGLIQKAVLLDTARIVRRFLSLES

SEQ ID NO: 10024 - protein, 962 aa, Griposia aprilina
MHNKNRVLVAALDAQLSNYFDDCVDLTDTHSILYCAAVAACRVAHVKFANDSRATRPKPAVPAWQCRIERRIGEARALIGKLICFREGNTRPRVMRFVRRAFAGTNISPQDYMSCVTERIDFLKQKVYAWANRIRRYKRRVERYTQNRTFQRDERWVYRGWERPDQGVADTCLPDDDAMCSFWRNIWSVPVSHTEGDWTREVERACDPIPEMGAITICPQDVTRAVRPLPNWKSPGPDGLHNFWIKWFGRSHARLAAQYQVALESGSLPQFLTTGVTHLLHKSGSTAEPKNYRPIACLPTVYKVLTSILRDKINKHIDTNYIMSPSQNGCRNGSRGTKELLLIDMAISQQVRRSRKDLSTCWIDYKKAYDSVPHTWLMRVLELYKVEATLRTFLMSCMGQWRTVLHYPACRNTQRNSEPIRIERGIFQGDSLSPLWFCLALNPLSTLLEDSGLGYRLRRGGQVISHLLYMDDLKLFAPNNSQLMDLLKVTETFSSAIRMEFGVDKCAVMHVKRGEIVESVGTQLSDSINLRALSASETYKYLGMSEALGINGTDMKQSLKDRFFGRLKKVFNSLLSGGNKVRAFNGWVMPVLMYSFGILKWTQTELDALDRKVRTLLTANRMHHPRSSVMRLYIPRKCGGRGFLNAKTLHNREICSLREYFLEADVGMHRDVVTVDKGLTPLSLAKENWRKPVVLDTNDRMEVWQSKELHGRFFRALHGPDVDQLASVAWLRFGDLFGETEGFVCAIMDEVMMTNNYRRFIVKDGTVDICRACHRPGESIRHIISGCSRLANEEYLHRHNLVARIIHQQLALKYSLVESEVPYYRYVPDPVLENGHITLYWDRSIITDRTIVANKPDIVMVDRLERRAMIVDITVPHDGNLVKAEKDKQIKYLDLAREVVDMWDVDSAIIVPIVVTANGLIAKSLDQHLRRLSLGSWIKGLIQKAVLLDTARIVRRFLSLEP

SEQ ID NO: 10025 - protein, 1201 aa, Omphaloscelis lunosa
MLTRLAARRARLPPPDSPLSSASSPPVRSPTVNAVMTPAAAVASSSSDEYFSPPTTPPPARRRGRRRPPDGLGPRGPPASDRVPAPGGSVQRMRWTRSINENVMRSYYGATEGGNNLTAYRVRMLSLFQVLEPAVNVSAQRLSDQVRVIQRNHMLDDTVLDRLRSEMQSSHVIAPPLRSVIIPSQMSSVITSQADERIDDRATNVSTQCNEDLRSALEGAIQEYRFMSPELRPRLPRLPMHNKNKALVAVLDSQLSNYFDDCEDLTDTHSILYCAAVAVCRVAHLKFSNDSRATRPKPAAPAWQCRIERRISGARTLIGKLICFREGNTRPRVMRFVRRAFLGTDISPQDYMTRVTERIDFLKQKVYAWANRIRRYKRRVERYTQNRTFQSDEKWVYKAWERPDQGVADTHLPDDDAMCSFWRSIWSVPVSHTEGDWTREVERACDPIPEMGAITICPQDVARAVRPLPNWKSPGPDGLHNFWIKWFVRSHARLAAQYQTALESGSLPQFLTTGVTHLLHKSGSTAEPKNYRPITCLPTVYKVLTSILRAKINKHIDTNSIMSVSQNGCRNGSRGTKELLLIDMAISQQVRRSRKDLSTCWIDYKKAYDSVPHTWLMRVLELYKVHTTLRTFLMSCMGQWRTVLRYPGCRNIQRNSEPIRIERGIFQGDSLSPLWFCLALNPLSTLLEDSGLGYRLRRGGQVISHLLYMDDLKLFAPNNLQLMELLKVTETFSSAIRMEFGVDKCAVMHVKRGEIMESVGTQLSDSINLRALSASETYKYLGMSEALGINVTDMKQSLKERFFGRLKKVLNSLLSGGNKVRAFNGWVMPVLMYSFGILKWTQTELDALDRRVRTLLTAYRMHHPRSSVMRLYIPRKCGGRGFLNAKTLHNREICSLREYFLGVDVGMHRDVVVVDKGLTPLSLAKENWRKPVVLDTKDRMEIWQSKELHGRYFRALHGPDVDLPASVTWLRFGDLFGETEGFVCAIMDEVMMTNNYRRFIVKDGTVDICRACHRPGESIRHIISGCSRLANEEYLHRHNLVARIIHQQLALKYSLVESEVPYYRYVPDPVLENGNITLYWDRSIITDRTIAANKPDIVVVDRGERRTMIIDITVPHDENLAKAEKDKQIKYLDLAREVVDMWDVDSAIIVPIVVTANGLIAKSLDQHLRRLSLGSWIKGLIQRAVLLDTARIVRRFLSLEP

SEQ ID NO: 10026 - protein, 1198 aa, Omphaloscelis lunosa
MLTRSAARRARLPPPDSPLSSASSPPVLSPTVNAVMTPAAAVASSSSDEYFSPPTTPPPARRRGRRRPPDGLGPRGPPASDRVPAPGGSVQRMRWTRSINENVMRSYYGATEGGNNLTAYRVRMLSLFQVLEPAVNVSAQRLSDQVRVIQRNHMLDDTVLDRLRSEMQSSHVIAPPVRSVIVPSQIITSQADERIDDRATNVSTQCNEELRSALEGAIHEYRFMSPELRPRLPRLPMHNKNRALVAALDSQLSNYFDDCEDLTDTHSILYCAAVAVCRVAHVKFSNDSRATRPKPAVPAWQCRIERRICGARTLIGKLICFREGNTRPRVMRFVRRAFLGTDISPQDYMTRVTERIDFLKQKVYAWANRIRRYKRRVERYTQNRTFQSDERWVYRAWERPNQGVTDTHLPDEDAMCSFWRSIWSVPVSHTEGDWTREVERACDSIPEMGAITICPQDVARAVRPLPNWKSPGPDGLHNFWIKWFVRSHAHLAAQYQTALESGSLPQFLTTGVTHLLHKSGSTAEPKNYRPITCLPTVYKVLTSVLRAKINKHIDTNSIMSASQNGCRNGSRGTKELLLIDMAISQQVRCSRKDLSTCWIDYKKAYDSVPHTWLMRVLELYKVDITLRTFLMSCMGQWRTVLRYPGCRNIQRNSEPIRIERGIFQGDSLSPLWFCLALNPLSTLLEDSGLGYRLRRGGQVISHLLYMDDLKLFAPNNLQLMELLKVTETFSSAIRMEFGVDKCAVMHVKRGKIMESVGTQLSDSINLRALSASETYKYLGMSEALGINVTDMKQSLKERFFGRLKKVLNSLLSGGNKVRAFNGWVMPVLMYSFGILKWSQTELDALDRRVRTLLTAYRMHHPRSSVMRLYIPRKCGGRGFLNAKTLHNREICSLREYFLEADVGMHRDVVVVDKGLTPLSLAKENWRKPVVLDTKNRMEIWQSKELHGRYFRALHGPDVDLPASVAWLRCGDLFGETEGFVCAIMDEVMMTNNYRRFIVKDGTVDICRACHRPGESIRHIISGCSRLANEEYLHRHNLVARIIHQQLALKYSLVESEVSYYRYVPDPVLENGNITLYWDRSIITDRTIVANKPDIVVVDRGERSAMIIDITVPHDENLVKAEKDKQIKYLDLAREVVDMWDVDSAIIVPIVVTANGLIAKSLDQHLRRLSLGSWIKGLVQKAVLLDTARIVRRFLSLEP

SEQ ID NO: 10027 - protein, 1201 aa, Omphaloscelis lunosa
MLTRLAARRARLPPPDSPLSSASSPPVRSPTVNAVMTPAAAVASSSSDEYFSPPTTPPPARRRGRRRPPDGLGPRGPPASDRVPAPGGSVQRMRWTRSINENVMRSYYGATEGGNNLTAYRVRMLSLFQVLEPAVNVSAQRLSDQVRVIQRNHMLDDTVLDRLRSEMQSSHVIAPPLRSVIIPSQMSSVITSQADERIDDRATNVSTQCNEDLRSALEGAIQEYRFMSPELRPRLPRLPMHNKNKALVAVLDSQLSNYFDDCEDLTDTHSILYCAAVAVCRVAHLKFSNDSRATRPKPAAPAWQCRIERRISGARTLIGKLICFREGNTRPRVMRFVRRAFLRTDISPQDYMTRVTERIDFLKQKVYAWANRIRRYKRRVERYTQNRTFQSDERWVYRAWERPDQGVADTHLPDDDAMCSFWRSIWSVPVSHTEGDWTREVERACDPIPEMGAITICPQDVARAVRPLPNWKSPGPDGLHNFWIKWFVRSHARLAAQYQTALESGSLPQFLTTGVTHLLHKSGSTAEPKNYRPITCLPTVYKVLTSILRAKINKHIDTNCIMSVSQNGCRNGSRGTKELLLIDMAISQQVRRSRKDLSTCWIDYKKAYDSVPHTWLMRVLELYKVHTTLRTFLMSCMGQWRTVLRYPGCRNIQRNSEPIRIERGIFQGDSLSPLWFCLALNPLSTLLEDSGLGYRLRRGGQVISHLLYMDDLKLFAPNNLQLMELLKVTETFSSAIRMEFGVDKCAVMHVKRGEIMESVGTQLSDSINLRALSASETYKYLGMSEALGINVTDMKQSLKKRFFGRLKKVLNSLLSGGNKVRAFNGWVMPVLMYSFGILKWTQTELDALDRRVRTLLTAYRMHHPRSSVMRLYIPRKCGGRGFLNAKTLHNREICSLREYFLGVDVGMHRDVVVVDKGLTPLSLAKENWRKPVVLDTKDRMEIWQSKELHGRYFRALHGPDVDLPASVTWLRFGDLFGETEGFVCAIMDEVMMTNNYRRFIVKDGTVDICRACHRPGESIRHIISGCSRLANEEYLHRHNLVARIIHQQLALKYNLVESEVPYYRYVPDPVLENGNITLYWDRSIITDRTIAANKPDIVVVDRGERRTMIIDITVPHDENLVKAEKDKQIKYLDWAREVVDMWDVDSAIIVPIVVTANGLIAKSLDQHLRRLSLGSWIKGLIQRAVLLDTARIVRRFLSLEP

SEQ ID NO: 10028 - protein, 1205 aa, Omphaloscelis lunosa
MLTRSRARKLIDTHPTSSGSSLSSASQLPDPAPDVSPVIPVAAVASSSSDEYFSPPTTPPPTRQRGRGRPPASLGLRGPPASDRVPAPGGSVQRMRWTQTVNENVMRAYFGATEGGSNLTAYRGRMLSLFQVLEPAVNVSAQRLSDQVRVIQRNHMLDDVVLDRLRLESRNNHVTPASPLVTVQLQNLPSSSPRSDRVGEEDDDGVISVSSQCNVRLRSALEDAFREYRSIPPGLRPQLPRLPMHKKNKALMCTLDSLLSNCFDGSKDLADTHSILYCAAVAACRVAHVKFPNSDRAPRPKPAVPAWQCRIERRIGEARVLIGKLICFREGNTRPRVMRFVKRAFSGTDISFQDYLTRVTERIDFLKQKIYAWANRIRRYRRRVERYTQNRTFQSDERWVYRAWERPDQGVADTHLPDDDAMCSFWRSIWSVPVSHTEGDWTREVERACDPIPEMGAITICPQDVARAVRPLPNWKSPGPDGLHNFWIKWFQRSHARLASQFQSALESGSLPQFLTTGITHLLHKSGSTAEPKNYRPITCLPTVYKVFTSILRTKINKHIDTNSIMSASQNGCRNGSRGTKELLLIDMAINQQVRRSRRDLSTCWIDYKKAYDSVPHTWLMRVLELYKVNATLRTFLMSCMGQWRTVLRYPGCRQILRNSEPIRIERGIFQGDSLSPLWFCLALNPLSTLLEDSGLGYRLRRGGQVISHLLYMDDLKLFAPNNLQLLELLKVTETFSSAIRMEFGVDKCAVMHVKRGEIVESVGTQLSDSIQLRSLSSIETYKYLGMSEALGVNAADMKQSLKERFFNRLNKVLNSLLSGGNKVRAFNGWVMPVLMYSFGILKWTQTELDALDRRVRTLLTANRMHHPRSSVMRLYIPRKCGGRGFLNAKTLHNREVCSLREYFLEADVGMHRDVVTVDKGLTPLSLANENWRKPIVLDTNDRREVWQSKELHGRFYRALHGPDVDLLASVSWLRFGDLFGETEGFVFAIMDEVMMTNNYRKYIVKDGTVDICRACHRPGESIRHIISGCSRLANGDYLHRHNLVARIIHQQLALKYSLVESEVPYYRYVPDPVLENGNITLYWDRSIITDRTIVANKPDIVVIDRLERRTMIIDIAVPHDENLVKAEKDKQIKYLDLAREVVDMWDVDTAIIVPIVVTANGIIAKSLDQHLKRLSLGSWIKGLIQKAVLLDTARIVRRFLSQEP

SEQ ID NO: 10029 - protein, 1197 aa, Sesamia nonagrioides
MLTRSAARRARPPSPDSLLGSASPPPVSSPTVSAVTTPAAAVALSSSDEYFSPPTTPPPVRRRGGRRPPDRLGPRGPSASDRVPAPGGSVQRMRWTQSINENVMRSYYGATEGGNNLTAYRVRMLSLFQVLEPAVNVSAQRLSDQVRVIQRNHMLDDTVLDRLRNEMQSSRVIAHQSQTAEIPPQSTNYADEGSNDRATNVSTQCNEELINALEAAIREYRSTSAELRPRLPRLPMHNRNRALMAALDAQLSNYFDTCEDLTDTHSILYCAAVAACRVAHVKFPSDSRATRPKPVVPAWQHRIERRIGGARALIGKLICFREGNTRPRVMRFVRRAFSGTNISPQNYMARVTERIDFLKQKMYAWANRIRRYKRRVERYTQNRTFQNNERWVYRDWERPEQGVTDTCLPDDDVMCSFWRSIWSVPVSHTEGDWARDVERACDLIPEMGAITICPQDVACAVRPLPNWKSPGPDGLHNFWIKWFPRSHARLASQFQTALVSGSLPQFLTTGITHLLHKSGSTAEPKNYRPITCLPTVYKVLTSILKTKINKHIDSNSIMSASQNGCKSGSRGTKELLLIDMAISQQVRRSRKDLSTCWIDYRKAYDSVPHTWLMRVLELYKVDATLRTFLMSCMRTWRTVLRYPGCRNIQRNSEPIRIERGIFQGDSLSPLWFCLALNPLSTLLEDSGLGYRLRRGGQVISHLLYMDDLKLFAPNNSQLRELLKITETFSSSIRMEFGVDKCAVMHVKRGEIMESVGTQLTGSINLRALSASETYKYLGMSEALGINVTDMKQSLKERFFGRLKKVLNSLLSGGNKVRAFNGWVMPVLMYSFGILKWTQTELDALDQRVRTLLTANRLHHPRSSVMRLYIPRKCGGRGFLNAKTLHNREVCSLREYFLETDVGMHRDVVAADKGLTPLSLAKENWRKPVVLDTNDRLEVWKSKELHGRFFRALHGPDVDFQASVAWLRFGDLFGETEGFVFAIMDEVMMTNNYRRFIVKDGTVDICRACHRPGESIRHIISGCSRLANGEYLHRHNLVARIIHQQLALKYKLVESEVPYYRYMPDPVLENGHITLYWDRSIITDRTIVANKPDIVLVDRSERRAMIVDITIPHDENLVKAEKDKQIKYLDLAHEVVDMWEVDSAIIVPIVVTANGLIAKSLDQHLRRLSLGSWIKGLIQKAVLLDTARIVRKFLSLEP

SEQ ID NO: 10030 - protein, 1200 aa, Sesamia nonagrioides
MLTRSAARRARSPPPDSSPSSASPPPVSSPTVNAVMTPAAAVALSSSDEYFSPPTTPPPVRRRGGRRPPDCLGPRGPPASDRAPATGGNVQRMKWTQSINENVMRAYFGATEGGSNLTAYRGRMLSLFQVLEPAVNVSAQRLSDQVRVIQRNHMLDDVVLDRLRLESRNSHVTPASSLVAVQLNSVPSRPNLVDEENDDEAISVTPQCNEKVRSALVDTFREYRSTPPEFRPRLPRLPMHKKNKALVCALDSQLSNYLKESKDLADTHSILYCGAVAICRVAHVKFPDSDRATRPIPAVPAWQCRIERRIGETRALIGKLISFREGNTRPRVMRFVRRAFSGTDVSTRDYLLRVTERIDFLKQKIYAWANRIRRYRRRVERYSQNRNFQSDERWVYRAWERSDQGVTDTCLPDDDATRSFWRNIWSVPVSHTEGGWTRDVERACDPVPEMGAITICPQDVARAVRPLPNWKSPGPDGLHNFWIKWFSGSHACLASQFQTALESGSLPQFLTTGITHLLHKSGSTAEPKNYRPITCLPTVYKVLTSILKAKINTHIDSNSIMSASQNGCRNGSRGTKELLLIDMAISQQVRRSRKDLSTCWIDYKKAYDSVPHTWLMRVLELYKVDATLRTFLMTCMSQWRTVLRYPGCRNIQRNSEPIRIERGIFQGDSLSPLWFCLALNPLSTLLEDSGLGYRLRRGGQVISHLLYMDDLKLFAHTNSQLKELLKITETFSSAIRMEFGVDKCAVMHVQRGEIVESVGTQLTGSINLRSLSASETYKYLGMSEALGINVTDMKQSLKERFFGRLKKVLNSLLSGGNKVRAFNGWVMPVLMYSFGILKWTQTELDALDQRVRTLLTANRLHHPRSSVMKLYIPRKCGGRGFLNAKTLHNREVCSLREYFLKTDVGMHRDVVAVDKGLTPLSLAKENWRKPVVLETNDRMEVWQSKELHGRFFRALRGPDVDFQASVAWLRYGDLFGETEGFVCAIMDEVMMTNNYRKFIVKDGTVDICRACHRPGESIRHIISGCSRLANGEYLHRHNLVARIIHQQLALKYNLVESEVPYYRYMPDPVLENGHITLYWDRSIITDRTIVANKPDIVMVDRSERRAMIVDITIPHDENLVKAEKDKQIKYLDLAHEVVDMWEVDSAIIVPIVVTANGLIAKSLDQHLRRLSLGGWIKGLIQKAVLLDTARIVRKFLSLEP

SEQ ID NO: 10031 - protein, 1198 aa, Sesamia nonagrioides
MLTRSAARRARPPSPDSLLSSASPPPASSATVSAVTTPAAAAASSSSDEYFSPPTTPPPVRRWGGRRPPDCLGPRGPSASDRVPAPGGSVQRMRWTQSINENVMRSYYGATEGGTNLTAYRVRMLSLFQVLEPAVNVSAQRLQSDQVRVIQRNHMLDDTVLDRLRNEMQSSRVIAHQSQSAEIPPQPTNYADEGSNDRATNVSTQCNEELRNALEAAIREYRSISAELRPRLPRLPMHNRNRALMAALDAQLSNYFDTCEDLTDTHSILYCAAVAACRVAHVKFPSDSRATRPKPVVPAWQHRIERRIGGARALIGKLICFREGNTRPRVMRFVRRAFSGTNTSPLNYMARVTERIDFLKQKVYAWANRIRRYKRRVERYTQNRTFQSNERRVYRDWERPEQGVTDTCLPDDDAMCSFWRSIWSVPVSHTEGDWARDVERACDPIPQMGAITICPQDVAHAVRPLPNWKSPGPDGLHNFWIKWFPRSHARLASQFQTALVSGSLPQFLTTGITHLLHKLGSTAEPKNYRPITCLPTVYKVLTSILKTKINKHIDSNSILSASQNGCRSGSRGTKELLLIDTAISQQVRRSRKDLSTCWIDYKKAYDSVPHTWLMRVLELYKVDATLRTFLMTCMRTWRTVLRYPGCRNIQRNSEPIRIERGIFQGDSLSTLWFCLALNPLSTLLEDSGLGYRLRRGGQVISHLLYMDDLKLFAPNNSQLNELLKITEIFSSSIRMEFGVDKCAVMHVKRGEIMEPVGTQLTSSINLRALSASETYKYLGMSEALGINVTDMKQSLKERFFSRLKKVLNSLLSGGNKVRAFNGWVMPVLMYSFGILKWTQTELDALDQRVRTLLTANRLHHPRSSVMRLYIPQKCGGRGFLNAKTLHNREICSLRDYFLETNVGMHRDVVASDKGLTPLSLAKENWRKPVVLVTNDRMEVWKSKELHGRFFRALHGPDVDFQASVAWLRFGDLFGETEGFVFAIMDEVMMTNNYRRFIVKDGTVDICRACHRPGESIRHIISGCSRLANGEYLHRHNLVTRIIHQQLALKYKLVESEVPYYRYMPDPVLENGHITLYWDRSIITDRTIVANKPDIVLVDRSERRAMIVDITIPHDENLVKAEKDKQTKYLDLAHEVVDVWEVDSAIIVPIIVTANGLIAKSLDQHLRRLSLGSWIKGLIQKAVLLDTARIVRKFLSLEP

SEQ ID NO: 10032 - protein, 1197 aa, Sesamia nonagrioides
MLTRSAARRARPPSPDSLPSSASPPPASSTNVSAVTTPAAAVALSSSDEYFSPPTTPPPVRRRGGRRPPDCLGPRGPSASDRVPAPGGSVQRMRWTQSINENVMRSYYGATEGGNNLTAYRVRMLSLFQVLEPAVNVSAQRLSDQVRVIQRNHMLDDTVLDRLRNEMQSSRVITHQSQSAEIPPQPTNYADEGSNDRATNVSTQCNEELRNALEAAIREYRFMSAELRPRLPRLPMHNRNRALMAALDAQLSNYFDTCENLTDTHSILYCAAVAACRVAHVKFSSDSRATRPKPVVPAWQHRIERRIGGARALIGKLICFREGNTRPRVMRFVRRAFSGTNTSPQNYMARITERIDFLKQKVYAWANRIRRYKRRVERYTQNRTFQSNQRWVYRDWERPEQGVADTCLPDDDAMCSFWRSIWSVPVSHTEGDWARDVERACDPIPEMGAITICPQDVARAVRPLPNWKSPGPDGLHNFWIKWFPRSHASLASQFQTALVSGSLPQFLTTGITHLLHKSGSTAEPKNYRPITCLPTVYKVLTSILKAKINNHIDSNSIMSVSQNGCRSGSRGTKELLLIDMAISQQVRRSRKDLSTCWIDYKKAYDSVPHTWLMRVLELYKVDTTLRTFLMTCMGQWRTVLRYPGCRNIQRNSEPIRIERGIFQGDSLSPLWFCLALNPLSTLLEDSGLGYRLRRGGQVISHLLYMDDLKLFAPNNLQLKELLKISEIFSSAIRMEFGVDKCAVMHIKRGEIVESVGSQLTISINLRALSASETYKYLGMSEALDINVTGMKQSLKERFFGRLKKVLNSLLSGGNKVRAFNGWVMPVLMYSFGILKWTQTELDALDQRVCTLLTANRLHHPRSSVMRLYIPRKCGGRGFLNAKTLHNREICSLREYFLETDVGMHRDVVAVDKGLTPLPLAKENWRKPVVLDTNDRMEVWKSKELHGRFFRALHGPDVDLQASVAWLRFGDLFGETEGFVCAIMDEVMMTNNYRRFIVKDGTVDICRACHRPGESIRHIISGCSRLANGEYLHRHNLVARIIHQQLALKYNLVESEVPYYRYMPDPVLENGHITLYWDRSIITDRTIVANKPDIVMVDRSERRAMIVDITIPHDENLVKAEKDKQIKYLDLAHEVVDMWEVDSAIIVPIVVTANGLIAKSLDQHLRRLSLGSWIKGLIQKAVLLDTARIVRKFLSLEP

SEQ ID NO: 10033 - protein, 1200 aa, Sesamia nonagrioides
MLTRSAARRARPPSPDSLLGSASSPPVSSATASAVTTPAAAVASSSSDEYFSPPTTPPPARRRGGRRPPDRLGPRGPSASDRVPAPGGSVQRMRWTQSINENVMRSYYGATEGGNNLTAYRVRMLSLFQVLEPAVNVSAQRLSDQVRVIQRNHMLDDVVLDRLRLESRNSHVTPASSLVAVQLNSVPPRPNHVDEEDDDRAISVSPQCIEKLRSALEDAFCEYRSTPPELRPCLPRLPMHKKNKALVCALDSQLSYYLKDSKDLTDTHSILYCGAVAICRVAHVKFPDSDRATRPKSAVPAWQCRIERRIGETRALIGKLTSFREGNTRPRVMRFVRRAFSGTDTSTRDYLSRVTERIDFFKQKIYAWANRIRRYKRRVERYSQNRNFQSDERRVYRAWERSDQGVTDTCLPDDDATCSFWRNIWSVPVSHTEGSWTRVVERACDPVPEMGAITICPQDVARAVRPLPNWKSPGPDGLHNFWIKWFSRSHARLASQFQTALESGSLPQFLTTGVTHLLHKSGSTAEPKNYRPITCLPTVYKVLTSILKSKINTHIDSNSIMSASQNGCRSGSRGTKELLLIDMAISQQVRRSRKDLSTCWIDYKKAYDSVPHTWLMRVLELYKVDATLRTFLMTCMRTWRTVLRYPGCRNIQRNSEPIRIERGIFQGDSLSPLWFCLALNPLSTLLEDSGLGYRLRRGGQVISHLLYMDDLKLFAHTDSQLKELLKITETFSSSIRMEFGVDKCAVMHVKRGEIMESVGTQLTSSINLRALSASETYKYLGMSEALGINVTDMKQSLKERFFGRLKKVLNSLLSGGNKVRAFNGWVMPVLMYSFGILKWTQTELDALDQRVRTLLTANRLHHPRSSVMRLYIPRKCGGRGFLNAKTLHNREVCSLREYFLETDVGMHRDVVAADKGLTPLSLAKENWRKPVVLDTNDRLEVWKSKELHGRFFRALHGPDIDFQASVAWLRFGDLFGETEGFVFAIMDEVMMTNNYRRFIVKDGTVDICRACHRPGESIRHIISGCSRLANGEYLHRHNLVARIIHQQLALKYNLVESEVPYYRYMPDPVLEHGHITLYWDRSIITDRTIVANKPDIVLVDRSERRAMIVDITIPHDENLVKAEKDKQIKYLDLAHEVVDMWEVDSAIIVPIVVTANGLIAKSLDQHLRRLSLGSWIKGLIQKAVLLDTARIVRKFLSLEP

SEQ ID NO: 10034 - protein, 983 aa, Sesamia nonagrioides
MLSVSTALLRLNLDLVYLDCPCIKKNKALVCALDSQLSYYLKDSKDLTDTHSILYCGAVAICRVAHVKFPDSDRATRPKSAVPAWQCRIERRIGETRALIGKLTSFREGNTRPRVMRFVRRAFSGTDTSTRDYLFRVTERIDFFKQKIYAWANRIRRYKRRVERYSQNRNFQSDERRVYRAWERSDQGVTDTCLPDDDAMCSFWRNIWSVPVSHTEGSWTRVVERACDPVPEMGAITICPQDVARAVRPLPNWKSPGPDGLHNFWIKWFSGSHARLASQFQTALESGSLPQFLTTGVTHLLHKSGSTAEPKNYRPITCLPTVYKVLTSILKSKINTHIDSNSIMSASQNGCRSGSRGTKELLLIDMAISQQVRRSRKDLSTCWIDYKKAYDSVPHTWLMRVLELYKVDATLRTFLMTCMRTWRTVLRYPGCRNIQRNSEPIRIERGIFQGDSLSPLWFCLALNPLSTLLEDSGLGYRLRRGGQVISHLLYMDDLKLFAHTDSQLKELLKITETFSSSIRMEFGVDKCAVMHVKRGEIMESVGTQLTSSINLRALSASETYKYLGMSEALGINVTDMKQSLKERFFGRLKKVLNSLLSGGNKVRAFNGWVMPVLMYSFGILKWTQTELDALDQRVRTLLTANRLHHPRSSVMRLYIPRKCGGRGFLNAKTLHNREVCSLREYFLETDVGMHRDVVAADKGLTPLSLAKENWRKPVVLDTNDRLEVWKSKELHGRFFRALHGPDVDFRASVAWLRFGDLFGETEGFVFAIMDEVMMTNNYRRFIVKDGTVDICRACHRPGESIRHIISGCSRLANGEYLHRHNLVARIIHQQLALKYNLVESEVPYYRYMPDPVLENGHITLYWDRSIITDRTIVANKPDIVLVDRSERRAMIVDITIPHDENLVKAEKDKQIKYLDLAHEVVDMWEVDSAIIVPIVVTANGLIAKSLDQHLRRLSLGSWIKGLIQKAVLLDTARIVRKFLSLEP

SEQ ID NO: 10035 - protein, 1197 aa, Sesamia nonagrioides
MLTRSAARRARPPSPDSLLGSASPPPVSSPTVSAVTTPAAAVALSSSDEYFSPPTTPPPVRRRGGRRPPDRLGPRGPSASDRVPAPGGSVQRMRWTQSINENVMRSYYGATEGGNNLTAYRVRMLSLFQVLEPAVNVSAQRLSDQVRVIQRNHMLDDTVLDRLRNEMQSSRVIAHKSQTAEIPPQSTNYADEGSNDRATNVSTQCNEELINALEAAIREYRSTPAELRPRLPRLPMHNRNRALMAALDAQLSNYFDTCEDLTDTHSILYCAAVAACRVAHVKFPSDSRATRPKPVVPAWQHRIERRIGGARALIGKLICFREGNTRPRVMRFVRRAFAGTNISPQNYMARVTERIDFLKQKVYAWANRIRRYKRRVERYTQNRTVQNNERWVYRDWERPEQGVTDTCLPDDDVMCSFWRSIWSVPVSHTEGDWARDVERACDLIPEMGAITICPQDVACAVRPLPNWKSPGPDGLHNFWIKWFPRSHARLASQFQTVLVSGSLPQFLTTGITHLLHKSGSTAAPKNYRPITCLPTVYKVLTSILKTKINKHIDSNSILSASQNGCRSGSCGTKELLLIDMAISQQVRRSRKDLSTCWIDYRKAYDSVPHTWLMRVLELCKVDATLRTFLMSCMRTWRTVLRYPGCRNIQRNSEPIRIERGIFQGDSLSPLWFCLALNPLSTLLEDSGLGYRLRRGGQVISHLLYMDDLKLFAPDNSQLRELLKITETFSSSIRMEFGVDKCAVMHVKRGEIMESVGTQFTGSINLRALSASETYKYLGMSEALGINVTDMKQSLKERFFGRLKKVLTSLLSGGNKVRAFNGWVMPVLMYSFGILKWTQTELDALDQRVRTLLTANRLHRPRSSVMRLYIPRKCGGRGFLNAKTLHNREVCSLREYFLETDVGMHRDVVAADKGLTPLSLAKENWRKPVVLDTNDRLEVWKSKELHGRFFRALHGPDVDFQASVAWLRFGDLFGETEGFVFAIMDDVMMTNNYRRFIVKDGTVDICRVCHRPGESIRHIISGCSRLANGEYLHRHNLVARIIHQQLALKYKLVESEVPYYRYMPDPVLENGHITLYWDRSIITDRTIVANKPDIVLVDRSERRAMIVDITIPHDENLVKAEKDKQIKYLDLAHEVVDMWKVDSAIIVPIVVTANGLIAKSLDQHLRRLSLGSWIKGLIQKAVLLDTARIVRKFLSLEP

SEQ ID NO: 10036 - protein, 1197 aa, Sesamia nonagrioides
MLTRSAARRARPPSPDSLLGSASPPPVSSPTVSAVTTPAAAVALSSSDEYFSPPTTPPPVRRRGGRRPPDRLGPRGPSASDRVPAPGGSVQRMRWTQSINENVMRSYYGATEGGNNLTAYRVRILSLFQVLEPAVNVSAQRLSDQVRVIQRNHMLDDTVLDRLRNEMQSSRVIAHQSQTAEIPPQSTNYADEGSNDRATNVSTQCNEELINALEAAIREYRSTSAELRPRLPRLPMHNRNRALMAALDAQLSNYFDTCDDLTDTHSILYCAAVAACRVAHVKFPSDSRATRPKPVVPAWQHRIERRIGGARALIGKLICFREGNTRPRVMRFVRRAFAGTNISPQNYMARVTERIDFLKQKVYAWANRIRRYKRRVERYTQNRTFQNNERWVYRDWERPEQGVTDTCLPDDDVMCSFWRSIWSVPVSHTEGDWARDVERACDLIPEMGAITICPQDVACAVRPLPNWKSPGPDGLHNFWIKWFPRSHARLASQFQTALVSGSLPQFLTTGITHLLHKSGSTAEPKNYRPITCLPTVYKVLTSILKTKINKHIDSNSIMSASQNGCKSGSRGTKELLLIDMAISQQVRRSRKDLSTCWIDYRKAYDSVPHTWLMRVLELYKVDATLRTFLMSCMRTWRTVLRYPGCRNIQRNSEPIRIERGIFQGDSLSPLWFCLALNPLSTLLEDSGLGYRLRRGGQVISHLLYMDDLKLFAPNNSQLRELLKITETFSSSIRMEFGVDKCAVMHVKRGEIMESVGTQLTGSINFRALSASETYKYLGMSEALDINVTDMKQSLKERFFGRLKKVLNSLLSGGNKVRAFNGWVMPVLMYSFGILKWTQTELDALDQRVRTLLTANRLHHPRSSVMRLYIPRKCGGRGFLNAKTLHNREVCSLREYFLETDVGMHRDVVAADKGLTPLSLAKENWRKPVVLDTNDRLEVWKSKELHGRFFRALHGPDVDFQASVAWLLFGDLFGETEGFVFAIMDEVMMTNNYRRFIVKDGTVDICRACHRPGESIRHIISGCSRLANGEYLHRHNLVARIIHQQLALKYKLVESEVPYYRYMPDPVLENGHITLYWDRSIITDRTIVANKPDIVLVDRSERRAMIVDITIPHDENLVKAEKDKQIKYLDLAHEVVDMWEVDSAIIVPIVVTANGLIAKSLDQHLRRLSLGSWIKGLIQIAVLLDTARIVRKFLSLEP

SEQ ID NO: 10037 - protein, 1197 aa, Sesamia nonagrioides
MLTRSAARRARPPSPDSLLGSASPPPVSSPTVSAVTTPAAAVALSSSDEYFSPPTTPPPVRRRGGRRPPDRLGPRGPSASDRVPAPGGSVQRMRWTQSINENVMRSYYEATEGGNNLTAYRVRMLSLFQVLEPAVNVSAQRLSEKVRVIQRNHKLDDSVLDRLRNEMQSSRVIAHQSQTAEIPPQSTNYADEGSNDRATNVSTQCNEELINALEAAIREYRSTSAELRPRLPRLPMHNRNRALMAALDAQLSNYFDTCEDLTDTHSILYCAAVAACRVAHVKFPSDSRATRPKPVVPAWQHRIERRIGGARALIGKLICFREGNTRPRVMRFVRRAFAGTNISPQNYMTRVTERIDFLKQKVYAWANRIRRYKRRVERYTQNRTFQNNERWVYRDWERPEQGVTDTCLPDDDVMCSFWRSIWSVPVSHTEGDWARDVERACDLIPEMGAITICPQDVACAVRPLPNWKSPGPDGLHNFWIKWFPRSHARLASQFQTALVSGSLPQFLTTGITHLLHKSGSTAEPKNYRPITCLPTVYKVLTSILKTKINKHIDSNSIMSASQNGCKSGSRGTKELLLIDMAISQQVRRSRKDLSTCWIDYRKAYDSVPHTWLMRVLELYKVDATLRTFLMSCMRTWRTVLRYPGCRNIQRNSEPIRIERGIFQGDSLSPLWFCLALNPLSTLLEDSGLGYRLRRGGQVISHLLYMDDLKLFAPNNSQLRELLKITETFSSSIRMEFGVDKCAVMHVKRGEIMESVGTQLTGSINLRALSASETYKYLGMSEALGIKVTDMKQSLKERFFGRLKKVLNSLLSGGNKVRAFNGWVMPVLMYSFGILKWTQTELDALDQRVRTLLTANRLHHPRSSVMRLYIPRKCGGRGFLNAKTLHNREVCSLREYFLETDVGMHRDVVAADKGLTPLSLAKENWRKPVVLDTNDRMEVWKSKELHGRFFRALHGPDVDFKASVAWLRFGDLFGETEGFVFAIMDEVMMTNNYRRFIVKDGTVDICRACHRPGESIRHIISGCSRLANGEYLHRHNLVARIIHQQLALKYNLVESEVPYYRYTPDPVLENGYITLYWDRSIITDRTIVANKPDIVMVDRSERRAMIVDITIPHDENLVKAEKDKQIKYLDLAHEVVDMWEVDSAIIVPIVVTANGLIAKSLDQHLRRLSLGSWIKGLIQKAVLLDTARIVRKFLSLEP

SEQ ID NO: 10038 - protein, 1197 aa, Sesamia nonagrioides
MLTRSAARRARPPSPDSLLGSASPPPVSSPTVSAVTTPAAAVALSSSDEYFSPPTTPPPVRRRGGRRPPDRLGPRGPSASDRVPAPGGSVQRMRWTQSINENVMRSYYGATEGGNNLTAYRVRMLSLFQVLEPAVNVSAQRLSDQVRVIQRNHMLDDTVLDRLRNEMQSSRVIAHQSQTAEIPPQSTNYADEGSNDRATNVSTQCNEELINALEAAIREYRSTSAELRPRLPRLPMHNRNRALMAALDAQLSNYFDTCEDLTDTHSILYCAAVAACRVAHVKFPSDSRATRPKPVVPAWQHRIERRIGGARALIGKLICFREGNTRPRVMRFVRRAFAGTNISPQNYMARVTERIDFLKQKVYAWANRIRRYKRRVERYTQNRTFQNNERWVYRDWERPEQGVTDTCLPDDDVMCSFWRSIWSVPVSHTEGDWARDVERACDLIPEMGAITICPQDVACAVRPLPNWKSPGPDGLHNFWIKWFPRSHARLASQFQTALVSGSLPQFLTTGITHLLHKSGSTAEPKNYRPITCLPTVYKVLTSILKTKINKHIDSNSIMSASQNGCKSGSRGTKELLLIDMAISQQVRRSRKDLSTCWIDYRKAYDSVPHTWLMRVLELYKVDATLRTFLMSCMRTWRTVLRYPGCRNIQRNSEPIRIERGIFQGDSLSPLWFCLALNPLSTLLEDSGLGYRLRRGGQVISHLLYMDDLKLFAPNNSQLRELLKITETFSSSIRMEFGVDKCAVMHVKRGEIMESVGTQLTGSINLRALSASETYKYLGMSEALGINVTDMKQSLKERFFGRLKKVLNSLLSGGNKVRAFNGWVMPVLLYSFGILKWTQTELDALDQRVRTLLTANRLHHPRSSVMRLYIPRKCGGRGFLNAKTLHNREVCSLREYFLETDVGMHRDVVAADKGLTPLSLAKENWRKPVVLDTNDRLEVWKSKELHGRFFRALHGPDVDFQASVAWLRFGDLFGETEGFVFAIMDEVMMTNNYRRFIVKDGTVDICRACHRPGESIRHIISGCSRLANGEYLHRHNLVARIIHQQLALKYKLVESEVPYYRYMPDPVLENGHITLYWDRSIITDRTIVANKPDIVLVDRSERRAMIVDITIPHDENLVKAEKDKQIKYLDLAHEVVDMWEVDSAIIVPIVVTANGLIAKSLDQHLRRLSLGSWIKGLIQKAVLLDTARIVRKFLSLEP

SEQ ID NO: 10039 - protein, 1200 aa, Sesamia nonagrioides
MLTRSAARRARSPPSDSSPSSASPPPVSSPTVNAVMTPAAAVALSSSDEYFSPPTTPPPVRRRGGRRPPDCLGPRGPPASDRAPATGGNVQRMKWTQTINENVMRAYFGATEGGSNLTAYRGRMLSLFQVLEPAVNVSAQRLSDQVRVIQRNHMLDDVVLDRLRLESRNSHVTPASSLVAVQFNSVPSRPNLVDEEDDDEAISVTPQCNEKVRSALEDAFREYRSTPPELRPRLPRLPMHKKNKALVCALDSQLSNYLKDSKDLADTHSILYCGAVAICRVAHVKFPDSDRATRPKPAVPAWQCRIERRIGETRALIGKLISFREGNTRPRVMRFVRRAFSGTDVSTRDYLLRVTERIDFLKQKIYAWANRIRRYRRRVERYSQNRNFQSDERWVYRAWERSDQGVTDTCLPDDDATRSFWRNIWSVPVSHTEGGWTRDVQRACDPVPEMGAITICPQDVARAVRPLPNWKSPGPDGLHNFWIKWFSGSHACLASQFQTALESGSLPQFLTTGITHLLHKSGSTAEPKNYRPITCLPTVYKVLTSILKAKINTHIDSNSIMSASQNGCRNGSRGTKELLLIDMAISQQVRRSRKDLSTCWIDYKKAYDSVPHTWLMRVLELYKVDATLRTFLMTCMSQWRTVLRYPGCRNIQRNSEPIRIERGIFQGDSLSPLWFCLALNPLSTLLEDSGLGYRLRRGGQVISHLLYMDDLKLFAHTNSQLKELLKITETFSSAIRMEFGVDKCAVMHVQRGEIVESVGTQLTGSINLRSLSASETYKYLGMSEALGINVTDMKQSLKERFFGRLKKVLNSLLSGGNKVRAFNGWVMPVLMYSFGILKWTQTELDALDQRVRTLLTANRLHHPRSSVMRLYIPRKCGGRGFLNAKTLHNREVCSLREYFLKTDVGMHRDVVAVDKGLTPLSLAKENWRKPVVLETNDRMEVWQSKELHGRFFRALRGPDVDFQASVAWLRYGDLFGETEGFVCAIMDEVMMTNNYRKFIVKDGTVDICRACHRPGESIRHIISGCSRLANGEYLHRHNLVARIIHQQLALKYNLVESEVPYYRYMPDPVLENGHITLYWDRSIITDRTIVANKPDIVMVDRSERRAMIVDITIPHDENLVKAEKDKQIKYLDLAHEVVDMWEVDSAIIVPIVVTANGLIAKSLDQHLRRLSLGGWIKGLIQKAVLLDTARIVRKFLSLEP

SEQ ID NO: 10040 - protein, 1197 aa, Sesamia nonagrioides
MLTRSAALRARPPPPDSLLSSASPPPVFSATVSAVTSPAAAVASSSSDEYFSPPTTPPPARRRGGRRPPDRLGPRGPSASDRVPAPGGSVQRMRWTQSINENVMRSYYGATEGGNNLTAYRVRMLSLFQVLEPAVNVSAQRLSDQVRVIQRNHMLDDTVLDRLRNEMQSSRVIAHQSQTAEIPPQSTNYADEGSNDRATNVSTQCNEELINALEAAIREYRYTSAELRPRLPRLPMHNRNRALMAALDAQLSNYFDTCEDLTDTHSILYCAAVAACRVAHVKFPSDSRATRPKPVVPAWQHRIERRIGGARALIGKLICIREGNTRPRVMRFVRRAFAGTNISPQNYMARVTERIDFLKQKVYAWANCIRRYKRRVERYTQNRTFQSNERWVYRDWERPEQGVTDTCLPDDDAMCSFWRSIWSVPVSHTEGDWARDVERACDPIPEMGAITICPQDVACAVRPLPNWKSPGPDGLHNFWIKWFPRSHVRLASQFQTALVSGSLPQFLTTGITHLLHKSGSTAEPKNYRPITCLPTVYKVLTSILKTKINKHIDSNSIMSASQNGCKSGSRGTKELLLIDMAISQQVRRSRKDLSTCWIDYRKAYDSVPHTWLMRVLELYKVDATLRTFLMSCMRTWRTVLRYPGCRNIQRNSEPIRIERGIFQGDSLSPLWFCLALNPLSTLLEDSGLGYRLRRGGQVISHLLYMDDLKLFAPNNSQLRELLKITETFSSSIRMEFGVDKCAVMHVKRGEIMESVGTQPTDSVNLRALSASETYKYLGMSEALGINVTDMKQSLKERFFGRLKKVLNSLLSGGNKVRAFNGWVMPVLMYSFGILKWTQTELDALDQRVRTLLTANRLHHPRSSVMRLYIPRKCGGRGFLNAKTLHNREVCSLREYFLETDVGMHRDVVAADKGLTPLSLAKENWRKPVVLDTNDRLEVWKSKELHGRFFRALHGPDVDFQASVAWLRFGDLFGETEGFVFAIMDEVMMTNNYRRFIVKDGTVDICRACHRPGESIRHIISGCSRLANGEYLHRHNLVARIIHQQLALKYNLVESEVPYYRYMPDPVLENGHITLYWDRSIITDRTIVANKPDIVLVDRSERRAMIVDITIPHDENLVKAEKDKQIKYLDLAHEVVDMWEVDSAIIVPIVVTANGLIAKSLDQHLRRLSLGSWIKSLIQKAVLLDTARIVRKFLSLEP

SEQ ID NO: 10041 - protein, 975 aa, Apamea monoglypha
MSPELRPRLPRLPMHNKNRALVAVLDAQLSSYFDVCEDLIDTHSILYCAAVAACRVAHVKFASDSRATRPKPAIPPWQCRIERRIGGARALIGKLICFREGNTRPRVMRFVRRAFSGTDISSQDYLSHVTERIDFLKQKVYAWANRIRRYKRRVDRYTQNRTFQSDERWVYRGWERPDQGVADTCLPDDDAMYSFWRSIWSVPVSHTEGDWAREVERACDPIPEMEAITICAQDVARAVRPLPNWKSPGPDGLHNFWIKWFTRSHARLASQFQIALESGSLPQFLTTGVTHLLHKSASTAEPKNYRPITCLPTVYKVLTSILRAKINKHIDTNSIMSASQNGCKNGSRGTKELLLIDMAISQQVRRSRKDLSTCWIDYKKAYDSVPHTWLMRVLELYKVDTTLRTFLMTCMGQWRTVLRYPGCRNIQRNSEPIRIERGIFQGDSLSPLWFCLALNPLSTLLEDSGLGYRLRRGGQVISHLLYMDDLKLFAPNNLQLMELLKITETFSSAIRMEFGVDKCAVMHVKRGEIVESVGTQLSDSTNLRALSASETYKYLGMSEALGINVTDMKQSLKERFFGRLKKVLNSLLSGGNKVRAFNSWVMPVLMYSFGILKWTQTELDALDRRVRTLLTANRMHHPRSSVMRLYIPRKCGGRGFLNAKTLHNREICSLREYFLETDVGMHRDVVAVDKGLTPLSLAKENWRKPVVLDTNDRLEVWQSKELHGRFYRALHGPDVDLLASVAWLRFGDLFGETEGFVCAIMDEVMMTNNYRRFIVKDGTVDICRACHRPGESIRHIISGCSRLANGEYLHRHNLVARIIHQQLALKYSLVESEVPYYRYVPDPVLENGHITLYWDRSIITDRTIVANKPDIVVVDRSERRAMIVDITVPHDENLVKAEKDKQIKYLDLAREVVDMWDVDSAIIVPIVVTANGLIAKSLDQHLRRLSLGSWIKGLIQKAVLLDTARIVRRFLSLEP

SEQ ID NO: 10042 - protein, 1045 aa, Apamea monoglypha
MLDDTVLDRLRNEMQSSHVIAPQSQTAAVLPQSNTSHADEGSNDRATNVSIQCNEELRNALEGAIREYRFMSPELRPRLPRLPMHNKNRALVAVLDAQLSSYFDVCEDLTDTHSILYCAAVAACRVAHVKFASDSRATRPKPAIPPWQCRIERRIGGARALIGKLICFREGNTRPRVMRFVRRAFSGTDISSQDYLSHVTERIDFLKQKVYAWANRIRRYKRRVDRYTQNRTFQSDERWVYRGWERPDQGVADTCLPDDDAMYSFWRSIWSVPVSHTEGDWAREVERACDPIPEMEAITICAQDVARAVRPLPNWKSPGPDGLHNFWIKWFTRSHARLASQFQIALESGSLPQFLTTGVTHLLHKSASTAEPKNYRPITCLPTVYKVLTSILRAKINKHIDTNSIMSASQNGCKNGSRGTKELLLIDMAISQQVRRSRKDLSTCWIDYKKAYDSVPHTWLMRVLELYKVDTTLRTFLMTCMGQWRTVLRYPGCRNIQRNSEPIRIERGIFQGDSLSPLWFCLALNPLSTLLEDSGLGYRLRRGGQVISHLLYMDDLKLFAPNNLQLMELLKITETFSSAIRMEFGVDKCAVMHVKRGEIVESVGTQLSDSTNLRALSASEIYKYLGMSEALGINVTDMKQSLKERFFGRLKKVLNSLLSGGNKVRAFNSWVMPVLMYSFGILKWTQTELDALDRRVRTLLTANRMHHPRSSVMRLYIPRKCGGRGFLNAKTLHNREICSLREYFLETDVGMHRDVVAVDKGLTPLSLAKENWRKPVVLDTNDRLEVWQSKELHGRFYRALHGPDVDLLASVAWLRFGDLFGETEGFVCAIMDEVMMTNNYRRFIVKDGTVDICRACHRPGESIRHIISGCSRLANGEYLHRHNLVARIIHQQLALKYSLVESEVPYYRYVPDPVLENGHITLYWDRSIITDRTIVANKPDIVVVDRSERRAMIVDITVPHDENLVKAEKDKQIKYLDLAREVVDMWDVDSAIIVPIVVTANGLIAKSLDQHLRRLSLGSWIKGLIQKAVLLDTARIVRRFLSLEP

SEQ ID NO: 10043 - protein, 1200 aa, Apamea monoglypha
MMMLTRSAARRARPPPPDSSLSSASPPPVPSLTVSAVTTPAAVVASSSSDEYFSPPTTPPPARRRGGRRPPDGLGPRGPPASDRVPALGGSVQRMRWTQSINENVMRSYYGATEGGNNLTAYRVRMLSLFQVLEPAVNVTAQRLSDQVRVIQRNHMLDDTVLDRLRNEIQSSHVIAPQSQTAAVLPQSNTSHADEGSNDRATNVSIQCNEELRNALEGAIREYRFMSPELRPRLPRLPMHNKNRALVAVLDAQLSSYFDVCEDLTDTHSILYCAAVAACRVAHVKFVSDSRATRPKPAIPPWQCRIERRIGGARALIGKLICFREGNTRPRVMRFVRRAFSGTDISSQDYLSRVTERIDFLKQKVYAWANRIRRYKRRVDRYTQNRTFQSDERWVYRGWERPDQGVADTCLPDDDAMYSFWRSIWSVPVSHTEGDWAREVERACDPIPEMEAITICAQDVARAVRPLPNWKSPGPDGLHNFWVKWLTRSHARLASQFQIALESGSLPQFLTTGVTHLLHKSASTAEPKNYRPITCLPTVYKVLTSILRAKINKHIDTNSIMSASQNGCKNGSRGTKELLLIDMAISQQVRRSRKDLSTCWIDYKKAYDSVPHTWLMRVLELYKVDTTLRTFLMTCMGQWRTVLRYPGCRNIQRNSEPIRIERGIFQGDSLSPLWFCLALNPLSTLLEDSGLGYRLRRGGQVISHLLYMDDLKLFAPNNLQLMELLKITETFSSAIRMEFGVDKCAVMHVKRGEIVESVGTQLSDSTNLRALSASETYKYLGMSEALGINVTDMKQSLKERFFGRLKKVLNSLLSGGNKVRAFNSWVMPVLMYSFGILKWTQTELDALDRRVRTLLTANRLHHPRSSVMRLYIPRKCGGRGFLNAKTLHNREICSLREYFLETDVGMHRDVVAVDKGLTPLSLAKENWRKPVVLDTNDRMEVWQSKELHGRFYRALHGPDVDLLASVAWLRFGDLFGETEGFVCAIMDEVMMTNNYRRFIVKDGTVDICRACHRPGESIRHIISGCSRLANGEYLHRHNLVARIIHQQLALKYNLVESEVPYYRYVPDPVLENGNITLYWDRSIITDRTIVANKPDIVVVDRSERRAMIVDITVPHDENLVKAEKDKQIKYLDLAREVVDMWDVDSAIIVPIVVTANGLIAKSLDQHLRRLSLGSWIKGLIQKAVLLDTARIVRRFLSLEP

SEQ ID NO: 10044 - protein, 868 aa, Apamea monoglypha
MRFVRRAFSGTDISSQDYLSRVTERIDFLKQKVYAWANRIRRYKRRVDRYTQNRTFQSDERWVYRGWERPDQGVADTCLPDDDAMYSFWRSIWSVPVSHTEGDWAREVERACDPIPEMEAITICAQDVARAVRPLPNWKSPGPDGLHNFWVKWLTRSHARLASQFQIALESGSLPQFLTTGVTHLLHKSASTAEPKNYRPITCLPTVYKVLTSILRAKINKHIDTNSIMSASQNGCKNGSRGTKELLLIDMAISQQVRRSRKDLSTCWIDYKKAYDSVPHTWLMRVLELYKVDTTLRTFLMTCMGQWRTVLRYPGCRNIQRNSEPIRIERGIFQGDSLSPLWFCLALNPLSTLLEDSGLGYRLRRGGQVISHLLYMDDLKLFAPNNLQLMELLKITETFSSAIRMEFGVDKCAVMHVKRGEIVESVGTQLSDSTNLRALSASETYKYLGMSEALGINVTDMKQSLKERFFGRLKKVLNSLLSGGNKVRAFNSWVMPVLMYSFGILKWTQTELDALDRRVRTLLTANRLHHPRSSVMRLYIPRKCGGRGFLNAKTLHNREICSLREYFLETDVGMHRDVVAVDKGLTPLSLAKENWRKPVVLDTNDRMEVWQSKELHGRFYRALHGPDVDLLASVAWLRFGDLFGETEGFVCAIMDEVMMTNNYRRFIVKDGTVDICRACHRPGESIRHIISGCSRLANGEYLHRHNLVARIIHQQLALKYNLVESEVPYYRYVPDPVLENGNITLYWDRSIITDRTIVANKPDIVVVDRSERRAMIVDITVPHDENLVKAEKDKQIKYLDLAREVVDMWHVDSAIIVPIVVTANGLIAKSLDQHLRRLSLGSWIKGLIQKAVLLDTARIVRRFLSLEP

SEQ ID NO: 10045 - protein, 1142 aa, Furcula furcula
MLTRHKARLRPPDSSPRSASQPPAPSTGGPPAAVASSESDEYFSPPSSPPPVCRRRGRPPRDLGLLGQPAPNRVLVPGGVVRRMKWTLSINENVMRAYYEATEGGTNLTAYRDRMLSLFQTLEPAVNVSAQRLSDQVRAIQRGHMLDDAVLDRLRSEVQGSRVVPCIPSSQAVAPAVNTAPAPRLAATSGDDRDDMSTNISTNVSTQLRSTLEDVVREYRTMPQGLRPRLPRLPMHKRNRALVCALDSLLSSYFDSSEDLADAHSLLYCAAMTACRVARVKFPNSDAATRPRPAVPAWQCRIERRIGEARVLIGKLTCFREGNTRPRVMRFVRRAFSGTGIDPREYFSCVTERIDFLKQKVCAWANRIRRYRARVDRYSQNNMFQRDQRWVYRSWERPSQIGGEVQRPDDDAMIRFWRNIWSVPVTHSEGDWIRDVEQVCEPIPEMGAITIRPQDVADAVRPLPNWKAPGPDGLHNFWLKWLRSSHACLASLFQSAVESGSLPEFLTTGITHLLHKTNSTADPKNYRPITCLPTVYKTLTSILRAKIYRHVEGNSIMSASQNGCRSGARGTKELLLIDMAICQQARRNRRDLSTCWIDYKKAYDSVPHTWLVRVLELYKVNTTLRTFLASCMRQWRTVLLYPGSRQTLGDGEPIRIERGIFQGDSLSPLWFCLALNPLSTLLKSSGLGYRLRRGGQVISHLLYMDDLKLFAPTEVQLMGLLKVTETFSNSIRMEFGVDKCAVMHVKRGRLVESRSIQLSDSTDLRTLSATETYKYLGMSQALGINETDMKQSLRERFLGRLRKVLKSLLSGGNRVRAYNGWVMLVLMYSFGILKWTQTELDTLDRTVRTLLTAYRMHHPRSSVMRLYIPRKCGGRGFLNAKTLHNREIYNLREYFLHCGGEMHTDVVAVDSGLTPLSLAKGNWRRPVVLTTGDREAVWQSKELHGRFYRALHGPDVDFSASVAWLRFGDLFGETEGSVCAIMDEVVMTNNYRKYILRDGTIDICRACHRPGESLRHIISGCSRLANGEYLHRHNQVARIIHQQLALKYRLVTSEVPYYRYVPEPVLEDGHITLYWDRSIITDRTIVANRPAMQFIKVTNRDYARQQARCRISLHFDVEHKSAFSITFRLDDELEAVPFAAVI

SEQ ID NO: 10046 - protein, 1196 aa, Furcula furcula
MLTRHKARLRPPDSSPRSASQPPAPSTGGAPAAVASSESDEYFSPPSSPPPVCRQRGRPPRNLGLLGQPAPNRVPVPGGVVRRMKWTPSINENVMRAYYKATEGGTNLTAYRDRMLSLFQTLEPAVNVSAQRLSDQVRAIQRGHMLDDAVLDRLRSEVQGGRVVPCIPSSQAVAPAVNTAPAPRLAANSGDDRDDMSTNISTNVSTQLRSTLEDVVREYRTMPQGLRPRLPRLPMHKRNRALVCALDSLLSSYFDSSEDLADAHSLLYCAAMTACRVARVKFPNSDAATRPRPAVPAWQCRIERRIGEARVLIGKLTCFREGNTRPRVMRFVRCEFSGTGIDPREYLSRVTERIDFLKQKVCAWANRIRRYRARVDRYSQNNMFQRDQRWVYRSWERPSQIGGEVLRPDDDAMIRFWRNIWSVPVTHSEGDWIGDVRQVCEPIPEMGVITIRPQDVADAVRPLPNWKAPGPDGLHNFWLKWLRSSHACLASLFQSAVESGSLPEFLTTGITHLLHKTNSTADPKNYRPITCLPTVYKTLTSILRAKIYRHVESNSIMSASQNGCRSGARGTKELLLIDMAICQQARRNRKDLSTCWIDYKKAYDSVPHTWLMRVLELYKVNTTLRTFLASCMRQWRTVLLYPGSRQTLGDGEPIRIERGIFQGDSLSPLWFCLALNPLSTLLRSSGLGYRLRRGGQVISHLLYMDDLKLFAPTEVQLMGLLKVTETFSSSIRMEFGVDKCAVMHVKRGRLVESRSVQLSDSTDLRTLSATETYKYLGMSQALGINETDMKQSLRERFLGRLRKVLKSLLSGGNRVRAYNGWVMPVLMYSFGILKWTQTELDTLDRTVRTLLTAYRMHHPRSSVMRLYIPRKCGGRGFLNAKTLHNREIYNLREYFLHCGGEMHTDVVAVDSGLTPLSLAKGNWRKPVVHTTGDREAVWQSKELHGRFYRALHGPDVDFSASVAWLRFGDLFGETEGSVCAIMDEVVMTNNYRKYILRDGTIDICRACHRPGESLRHIISGCSRLANGEYLHRHNQVARIIHQQLALKYRLVMSEVPYYRYVPEPVLEDGHITLYWDRSIITDRTIVANRPDIVLIDRTERRAMIVDVTVPHDENLVKAEKDKECKYLDLAHEVVDLWDIDKAIIVPIVVSAHGLMAKSLDKHLKRLTLDGWIKGQMQKAVLLETARIVRKFLSLEP

SEQ ID NO: 10047 - protein, 1062 aa, Spodoptera exigua
MSDQVRVIQRNRMLDDTVLDRLQTEMGSRASASSSRTVVPATLPLTSQGIVSAVADEESTDTVAHVSTQCIDELRSALEYAIREYRYISPELRPRLPRLPMHNKNKALVAALDSQLSNYLDDCEDLGDTHSIMYCAAVAACRVAHVKFPTNDVTTRPKPAVPAWQRRIECRIAGARALIGKLICFREGNTRPRVMRSVRRAFSGTDISPRDYMSRVTERIDFLKQKVYAWANRIRRYRRRVERYTQNRTFRSNERWVYRTWERPDHGVTDRRLPDDDAMCSFWRSIWSVPVSHTEGDWIRDVERACDPIPQMGTINISPQDVARAVRPLPNWKSPGPDGLHNFWIKWFTRAHARLASQFQSAVESGSLPKFLTTGVTHLLHKSGSTAEPKNYRPITCLPTVYKVLTSILRSKINSHIDKNKIMSTAQNGCKNGSRGTKELLLIDMAISQQVRRTRKDLSTCWIDYKKAYDSIPHTWLMRVLELYKIDTILRTFLMSCMRQWSTVLRYPGCRHTQRNSEPVRIERGIFQGDSLSPLWFCLALNPLSTLLENSGLGYRLKRGGQVISHLLYMDDLKLFAPNKLQLMELLKLTETFSSAIRMEFGVDKCAIMHVKRGEVVESVGTQLTDSINLRSLSPTETYKYLGMSEALGINVTDMKQSLKERFFGRLKKVFNSFLSGGNKVRAFNGWVMPVLMYSFGVLKWSQTELDALDRQVRTMLTAYRMHHPRSSVMRLYIPRKCGGRGFLNAKTLHNREVCSLREYFLAADVDMHRDVVAVDKGLTPLSLAIENWRKPVVLDTNARREVWQSKELHGRFFRALHGPDVDQVASVAWLRFGDLFGETEGFVCAIMDEVIMTNNYRRFIVKDGTVDICRACHRPGESIRHIISGCSRLANGEYLHRHNLVARIIHQQLALKYSLVESEVPYYRYEPDPVLDNGHITLYWDRSIITDRTIVANKPDIVVVDRKERRAMIVDIAVPHDENLVKAEKDKLIKYIDLAREVVDMWEVDSAIIVPIVVSANGLIAKSLDQHLRRLSLGGWIKGLIQKVVLLDTARIVRRFLSLEP

SEQ ID NO: 10048 - protein, 868 aa, Arctia plantaginis
MRFVKQAFLGTTIGPQQYMSCVTERIDFLKQKIYAWANRIRRYKKRIDRYNQNRMFQRNEKWVYRKWEEPDPCMSHGHLPDENVTHTFWRNIWSVPVTHIEGDWLRDVRRSCESITPMEPVIIDKDDVRCAVRSLPNWKSPGLDGLHNFWLKWFRSSHACLASQFQAALNSGSLPQFLTTGITHLLYKSGSVMDPKNFRPITCLPTMYKLLTSILRLKITLHINNNSIMSVSQNGCRSGSRGTKDLLIIDRAISQQVRRNRKSLATCWIDYKKAYDSVPHTWLLRVLELYKIDTTLCTFLKSCMGQWRTALRYPGCLQTTVIDAPIKIERGIFQGDSLSPLWFCLALNPLSTLLESSGLGYRLQKDDQVISHLLYMDDLKLLAPTKLQLSALLKVTENFSNSIKMEFGVDKCAVMYVKKGEIVESEGIELSDSTKLRSLSATETYKYLGISQSLGIPESDMKQTLQERFFGRLKKVLKSLLSGGNKVRACNGWVMPILMYSFGILKWTQTELDALDRRVRTLLTAFRMHHPRSSVMRLYIPRKLGGRGLLNIKTLHNREICNLREYFLHTDVGMHRNVVAVDIGFTPLALAKENWRKPVVFGTNDRREVWKGKELHGRFYRALNGSDIDFKASTTWLRYGDLFGETEGFVCAIMDEVIMTNNYRKYILKDGTVDICRACHRPGESIRHIISGCSRLANGEYLHRHNQVARIVHQQLALKYHLVNLEVPYYRYVPDPVLENGRATLYWDRSIITDRTIVANKPDIVVIDRLERRAIIVDIAVPHDENLVKVEKEKQIKYLDLSHEIVDMWNVDSVIIVPIVVSAHGLIAKSLDQHLKRLTLDGWIKGLIQKAVLLDTARIVRRFLSLQS

SEQ ID NO: 10049 - protein, 1198 aa, Mamestra configurata
MLTRAAAQRARLPPLASSLSSASPPPEPSPTVSAVIPAVAVASSSSDEYFSPPTSPLPARRRRGRRPPDGLGPRGPTASDRVPAPGGSVQRMRWTQTINENVMRSYYGATEGGTNLTAYRGRMLSLFQVLEPAVNVSAQRLSDQVRVIQRNRMLDDAVLDRLRLESRNSRVSAASPPAAVQIQSSVSPRPNNVGEDDDDGAISVSTQCNERLRSALEDAFREYRSTPPELRPRLPRLPMHNKNRALVCALDSQLANCFDSSEDLADTHSILYCAAAAACRVAHVKFPNSDRATRPAVPAWQCRIERRIGEARALIGKLICFREGNTRRRVMRFVRRAFSGTDTSPRDYLTRVTERIDFLKQKIYAWANRIRRYKRRVERYTQNRTFQSNERWVYRAWERPDQGVTDTRLPDDDVMCSFWRNIWSVPVSHTEGDWTREVERACDPIPEMGAITISPQDVARAVRPLPNWKSPGPDGLHNFWIKWFKRSHARLASQFQSALESGSLPQFLTTGITHLLHKSGSTAEPKNYRPITCLPTVYKVLTSILRAKINQHIETNSIMSASQNGCRNRSRGTKELLLIDVAISQQVRRSRRDLSTCWIDYKKAYDSVPHTWLMRVLELYKVDAVLRTFLMSCMGQWRTVLRYPGCRQIQANSDPIRIERGIFQGDSLSPLWFCLALNPLSTLLEGSGQGYRLRRGGQVISHLLYMDDLKLFAPNNLQLMKLLKVTETFSSAISMEFGVDKCAVMHVKRGEIMESVGTQLSDSIHLRSLSSTETYKYLGMSEALGINANDVKQSLKERFFGRLNKVLNSLLSGGNKVRAFNGWVMPVLMYSFGILKWTQTELDALDRRVRSLLTANRMHHPRSSVMRLYIPRKCGGRGFLNAKTLHNREICSLREFFLEADVGMHRDVVAVDKGLTALSLANENWRKPVVLDTNDRREVWQSKELHGRFYRVLHGPDVDFLASVAWLRFGDLFGETEGFVCAIMDEVMMTNNYRKYIVKDGTVDICRACHRPGESIRHIISGCSSLANGDYLHRHNLVARIIHQQLALKYNLVESEVPYYRYVPDPVLENGNCTLYWDRSIITDRTIIANKPDIVVIDRLERRAMIVDIAVPHDVNLVKTEKDKQTKYLDLAREVVDMWDVNTAVIVPIVVTANGIIAKSLDQHLKRLSLGSWIKGLIQKAVLLDTARIVRRFLSQGP

SEQ ID NO: 10050 - protein, 1200 aa, Mamestra configurata
MLTRSRARAQTAQPTSSGSSLSSASQPPGPAPAVSPEIPVAAVASSSSDEYFSPPTTPPPARRRGRGRPPTSLGPRGPPASDRVPAIGGSVQRMRWTQTINENVMRSYYGATEGGTNLTAYRGRMLSLFQVLEPAVNVSAQRLSDQVRVILRNRMLDDAVLDRLRLESRSGRVSPASPPAAVQIQSSVSPRPNNVGEDDDDGAISVSTQCNERLRSALEDAFREYRSTPPELRPRLPRLPMHNKNRALVCALDSQLTNCFDSSEDLADTHSILYCAAAAACRVAHVKFPNSDRATRPAVPAWQCRIERRIGEARALIGKLICFREGNTRRRVMRFVRRAFSGTDTSPRDYLTRVTERIDFLKQKIYAWANRIRRYKRRVERYTQNRTFQSNERWVYRAWERPDQGVTDTRLPDDDVMCSFWRNIWSVPVSHTEGDWTREVERACDPIPEMGAITISPQDVARAVRPLPNWKSPGPDGLHNFWIKWFKRSHARLASQFQSALESGSLPQFLTTGITHLLHKSGSTAEPKNYRPITCLPTVYKVLTSILRAKINHHIETNSIMSASQNGCRNGSRGTKELLLIDVAISQQVRRSRRDLSTCWIDYKKAYDSVPHTWLMRVLELYKVDAVLRTFLMSCMGQWRTVLRYPGCRQIQANSDPIRIERGIFQGDSLSPLWFCLALNPLSTLLEGSGQGYRLKRGGQVISHLLYMDDLKLFAPNNLQLMKLLKVTETFSSAISMEFGVDKCAVMHVKRGEIMESVGTQLSDSINLRSLSSTETYKYLGMSEALGINAADVKQSLKERFFGRLNKVLNSLLSGGNKVRAFNGWVMPVLMYSFGILKWTQTELDALDRRVRSLLTANRMHHPRSSVMRLYIPRKCGGRGFLNAKTLHNREICSLREFFLEADVGMHRDVVAVDKGLTALSLANENWRKPVVLDTNDRREVWQSKELHGRFYRVLHGPDVDFLASVAWLRFGDLFGETEGFVCAIMDEVMMTNNYRKYIVKDGTVDICRACHRPGESIRHIISGCSSLANGDYLHRHNLVARIIHQQLALKYNLVESEVPYYRYVPDPVLENGNCTLYWDRSIITDRTIVANKPDIVVIDRLERRAMIVDIAVPHDENLVKTEKDKQTKYLDLAREVVDMWDVNTAVIVPIVVTANGIIAKSLDQHLKRLSLGSWIKGLIQKAVLLDTACIVRRFLSQGP

SEQ ID NO: 10051 - protein, 1208 aa, Amphipyra berbera
MLTRSRTKTQDTRTRPRPSASSLSSASQPPDSSIVSDVTPAAAVASSSSDEFYSPPTSPPPPPRRGRRGRGRPPACMGPRGPPASDRVPAPGGSVQRMRWTLTMNENCMRAYFGATEGGTNLTAYRGRMLSLFQVLEPTVNVSAQRLSDQVRVIQRDHRLTDAALDRLRSEVQSNRIISLQSQTAAQPQTPTVVPPLPIHADEESDDRVTNVSTQCNEQLRSALELAIREYRFTPPNIRPRIPRLPMHRKNRALMCALDSLLSSYFDNSENLEDTHSILYCAAVAACRVAHAKFDNNDRATRPKPAVPAWQCRIERRINEARALIGKLICFREGNTRPRVMRFVRRAFSGTDINPRDYLSRVTERIDFLKQKVYAWANRIRRYKRRVERYTQNRMFHSDERWVYRTWERPDHDVSDTHLPDNDVMNTFWRNIWSMPVTHAEGDWMQEVQRACEPIEEMGDITIVPQDVTSAVRPMANWKSPGPDGLHNFWLKWLRSSHARLASQFQSSLESGSLPEFLTTGVTHLLHKSGSTAEPKNYRPITCLPTVYKLLTSILRAKINSHIINNSIMSVSQNGCKNGSRGTKELLLIDMAISQQVRRSRKDLSTCWIDYKKAYDSVPHTWLMRVLELYKVNTTLCAFLTSCMGQWRTVLHYPGCRQIQGRGEPIRIERGIFQGDSLSPLWFCLALNPLSTLLEGSGLGYRLRRGGQVISHLLYMDDLKLFAPNNLQLVKLLKVTETFSNSIRMEFGVDKCAVMHVKRGGIMESVGTQLSDSIHLRSLSSTETYKYLGMSEALGINETDMKQSLRERFYGRLKKVLKSLLSGGNKVRAFNGWVMPVLMYSFGILKWTQTELDALDRRVRTLLTAYRMHHPRSSVMRLYIPRKCGGRGFLNAKTLHNREVCSLREYFLHADVGMHRDVVAVDKGFTPLSLAKENWRKPVVLDTNGRREVWQSKELHGRFYRALHGPDVDFLASVAWLRFGDLFGETEGFVCAIMDEVILTNNYRKYIVKDGTVDICRACHCPGESIRHIISGCSRLANGEYLHRHNLVARIIHQQLALKYNLVDAEVPYYKYVPDPVLENGHITLYWDRSIITDRTIVANKPDIVVIDRSERLAMIVDITVPHDENLVKAEKDKEIKYQDLAHEVVDMWEVDSAVIVPIVVTANGLIAKSLDQHLTRLALGSWIKGLIQKAVLLDTARIVRKFLSLRP

SEQ ID NO: 10052 - protein, 1203 aa, Amphipyra berbera
MLTRARARKQTAHPRSPDSSLSSASQPPESSPPVSAVTPAAAVASSSSDEYYSPPSSPPPVRRRGGARPPACLGPRGQPATNRVPAAGGNVSRMRWTQSINENVMRAYYGATEGGINLTAYRERMLFLFQVLEPAINVSAQRLSDQVRVVQRNRRLDDTVLERLRSEARNSQTVTFPVQAAVQMQPIAVPPRPIHVDGEGDGEAINVSNQCSEELRSALDDAILEFRTTPPEMRPRLPRLPMHGKNRALMCALDSLLSNYFDGSEDLADTHSILYCAAIAACRVAHVKFTENERATRPKPAVPAWQSRIERRIGGARVLIGKLICFREGNNRPRVMRFVRRAFSGTDISPRDYMSRVTERIDFLKQKVHAWANRIRRYKRRVERYTQNRIFQSDQRRVYRAWERPDPGGGDVRLPDDDALSSFWRSIWSVPIAHTEDGWMRDIEQVCEPIAEMEPITITPQDVADAARPLPNWKSPGPDGLHNFWLKWLRSSHARLASQFQSSLESGSLPQFLTTGVTHLLYKSGSTAEPKNYRPITCLPTVYKLLTSILRVKITTHIDNNCIMSASQNGCRKGSRGTKELLLIDMAISQQVRRSQKDLSTCWIDYKKAYDSVPHSWLMRVLELYKINTTLRTFLMSCMRHWRTVLRYPGCRRIRGSGEQIRIERGIFQGDSLSPLWFCLALNPLSTLLEGTGLGYQLRRGGQVISHLLYMDDLKLFAPTDLQLMELLKVTENFSNSIRMEFGVDKCAVMHVKRGRIAESEGIQLPNSVQLRSLSPTETYKYLGMSEALGISETDMRQSLRERFFGRLNKLLKSLLSGGNKVRAFNGWVMPVLMYSFGTLKWTQADLDALDRRVRALLTAHRMHHPRSSVMRLYIPRKCGGRGFLNAKTLHNREVYSLREYFLQAEGVMHRDVVAVDKGFTPLALARENWRKPAVLSTNDREVVWQSKELHGRYYRALHGPDVDFSASVSWLRSGNLFGETEGFVCAIMDEVMMTNNYRKYIVKDGTVDICRACHRPGESIRHIVSGCSRLANGEYLHRHNLVARIIHQQLALKYNLVESEVPYYRYVPDPVLENGHATLYWDRSIITDRTIVANKPDIVVIDRSERRTMIVDITVPHDENLVKAEKDKQIKYLDLAHEVVGMWDVDSAVIVPIVVTANGIIAKSLDIHLMRLSLGGWIKGLIQRAVLLDTACIVRRFLSLEP

SEQ ID NO: 10053 - protein, 1207 aa, Amphipyra berbera
MLTRSRAKATAQNTRPRPSASSLSSASQPPDSSIVSNVTPAAAVASSSSDEYFSPPSTPPPPPPRRRGRGRPPASLGPRGPPASDRVPAPGGSVQRMRWTPTMNENCMRAYFGATEGGTNLTAYRGRMLSLFQVLEPAVNVSAQRLSDQVRVIQRDHRLTDDALDRLRSEVQSNCIISLQSQTAAQPQVPPMVPPQPIRADEESDDRVTIVSAQCNEQLRSALELAIREYRFTPPNLRPRIPRLPMNRQNRALMCALDSLLSNYFDNSEGLEDTHSILYCAAVAACRVAHVKFDNNDRATRPKPAVPAWQCRIERRINEARALIGKLICFREGNTRPRVMRFVRRAFSGTDINPREYMSRVTERIDFLKQKVYAWANRIRRYKRRVERYTQNRMFHSDERWVYRTWERPEHDVSDTHLPDNDVMNTFWRNIWSMPVTHTEGDWMQEVQRACEPIEEMGDIIIVPQDVTSAVRPMANWKSPSPDGLHNFWLKWLRSSHARLASQFQSSLESGSLPPFLTTGITHLLHKSGSTAEPKNYRPITCLPTIYKLLTSILRAKINTHIINNSIMSASQNGCKNGSRGTKELLLIDMAISQQVRRSRKDLSTCWIDYKKAYDSVPHTWLMRVLELYKVNTTLCAFLTSCMGQWRTVLHYPGCRQIQGRGEPIRIERGIFQGDSLSPLWFCLALNPLSTLLEVSGLGYRLRRGGQVISHLLYMDDLKLFAPNNLQLMKLLKVTETFSNSIRMEFGVDKCAVMHVKRGGIMESVGIQLSDSIHLRSLSSTETYKYLGMSEALGINETDMKQSLRERFYGRLKKVLKSLLSGGNKVRAFNGWVMPVLMYSFGILKWTQTELDALDRRVRTLLTAYRMHHPRSSVMRLYIPRKCGGRGFLNAKTLHNREVCSLREYFLQADVGMHRDVVAVDKGFTPLSLAKENWRKPVVLDTNGRREVWQSKELHGRFYRALHGPDVDFLASVAWLRFGDLFGETEGFVCAIMDEVMMTNNYRKYIVKDGTVDICRACHCPGESIRHIISGCSRLANGEYLHRHNLVARIIHQQLALKYNLVNAEVPYYKYVPDPVLENGHITLYWDRSIITDRTIVANKPDIVVIDRTERLTMIVDITVPHDENLVKAEKDKEIKYQDLAHEVVDMWEVDSAVIVPIVVTANGLIAKSLDHHLTRLSLGGWVKGLIQKAVLLDTARIVRKFLSLRP

SEQ ID NO: 10054 - protein, 1212 aa, Amphipyra berbera
MLTRSRTKTQDTRTRPRPSASSLSSASQPPDSSIVSDVTPAAAVASSSSDEFYSPPTSPPPPPPPPPRRGRRGRGRPPACMGPRGPPASDRVPAPGGSVQRMRWTLTMNENCMRAYFGATEGGTNLTAYRGRMLSLFQVLEPTVNVSAQRLSDQVRVIQRDHRLTDAALDRLRSEVQSNRIISLQSQTAAQPQTPTVVPPLPIHADEESDDRVTNVSTQCNEQLRSALELAIREYRFTPPNIRPRIPRLPMHRKNRALMCALDSLLSSYFDNSENLEDTHSILYCAAVAACRVAHAKFDNNDRATRPKPAVPAWQCRIERRISEARALIGKLICFREGNIRPRVMRFVRRAFSGTDINPRDYLSRVTERIDFLKQKVYAWANRIRRYKRRVERYTQNRMFHSDERWVYRTWERPDHDVSDTHLPDNDVMNTFWRNIWSMPVTHTEGDWMQEVQRACEPIEEMGDITIVPQDVTSAVRPMANWKSPGPDGLHNFWLKWLRSSHARLASQFQSSLESGSLPEFLTTGVTHLLHKSGSTAEPKNYRPITCLPTVYKLLTSILRAKINSHIINNSIMSVSQNGCKNGSRGTKELLLIDMAISQQVRRSRKDLSTCWIDYKKAYDSVPHTWLMRVLELYKVNTTLCAFLTSCMGQWRTVLHYPGCRQIQGRGEPIRIERGIFQGDSLSPLWFCLALNPLSTLLEGSGLGYRLRRAGQVISHLLYMDDLKLFAPNNLKLMKLLKVTETFSNSIRMEFGVDKCAVMHVKRGGIMESVGTQLSDSIHLRPLSSTETYKYLGMSEALGINETDMKQSLRERFYGRLKKVLKSLLSGGNKVRAFNGWVMPVLMYSFGILKWTQTELDALDRRVRTLLTAYRMHHPRSSVMRLYIPRKCGGRGFLNAKTLHNREVCSLREYFLQADVGMHRDVVAVDKGFTPLSLAKENWRKPVVLDTNGRREVWQSKELHGRFYRALYGPDVDFLASVAWLRFGDLFGETEGFVCAIMDEVMMTNNYRKYIVKDGTVDICRACHCPGESIRHIISGCSRLANGEYLHRHNLVARIIHQQLALKYNLVDAEVPYYKYVPDPVLENGHITLYWDRSIITDRTIVANKPDIVVIDRSERLTMIVDITVPHDENLVKAEKDKEIKYQDLAHEVVDMWEVDSAVIVPIVVTANGLIAKSLDQHLTRLALGSWVKGLIQKAVLLDTARIVRKFLSLRP

SEQ ID NO: 10055 - protein, 1111 aa, Amphipyra berbera
MRWTPTMNENCMRAYFGATEGGTNLTAYRGRMLSLFQVLEPTVNVSAQRLSDQVRVIQRDHRLTDAALDRLRSEVQSNAIISLQLQTAAQPRTPTVVPPLPTHGNEESDDRVTNVSTQCNEQLRSALELAIQEYRFTPPNIRPRIPRLPMHRKNRALMCALDSLLSSYFDNSENLEDTHSILYCAAIAACRVAHAKFDNNDRATRPKPTVPAWQCRIERRINEARALIGKLICFREGNTRPRVMRFVRRAFSGTDINPRDYMSRVTERIDFLKQKVYAWANRIRRYKRRVERYTQNRMFHSDERRVYRTWERPDHDVSDTHLPDNDIMNTFWRNIWSMPVAHTEGDWMQEVQRACEPIEEMGDITIVPQDVTSAVRPMANWKSPGPDGLHNFWLKWLRSSHARLASQFQSSLESGSLPQFLTTGVTHLLHKSGSTAESKNYRPITCLPTVYKLLTSILRSKISKHIANNSIMSVSQNGCKNGSRGTKELLLIDMAISQQVRRSRKDLSTCWIDYKKAYDSVPHTWLMRVLELYKVNTTLCAFLTSCMGQWRTVLHYPGCRQIQGRGEPIRIERGIFQGDSLSPLWFCLALNPLSTLLEGSGLGYRLRRGGQVISHLLYMDDLKLFAPNNLQLMKLLKVTETFSNSIRMEFGVDKCAVMHVKRGGIMESVGTQLSDSIHLRSLSSTETYKYLGMSEALGINETDMKQSLRERFYGRLKKVLKSLLSGGNKVRAFNGWVMPVLMYSFGILKWTQTELDALDRRVRTLLTAYRMHHPRSSVMRLYIPRKCGGRGFLNAKTLHNREMCSLREYFLQADVGMHRDVVAVDKGFTPLSLAKENWRKPVVLDTNGRREVWQSKELHGRFYRALYGPDVDFLASVAWLRFGDLFGETEGFVCAIMDEVMMTNNYRKYIVKDGTVDICRACHCPGESIRHIISGCSRLANGEYLHRHNLVARIIHQQLALKYNLVDAEVPYYKYVPDPVLENGHITLYWDRSIITDRTIVANKPDIVVIDRSERLAMIVDITVPHDENLVKAEKDKEIKYQDLAHEVVDMWEVDSAVIVPIVVTANGLIAKSLDQHLTRLALGSWVKGLIQKAVLLDTARIVRKFLSLRP

SEQ ID NO: 10056 - protein, 1208 aa, Amphipyra berbera
MQTRSRAKATVTQNTRPTTSASSLSSASQPPDSSIVSDVTPAAAVASSSSDEFFSPPTSPPPPPARRRGRGRPPASIGPRGPPASDRVPAPGGSVQRMRWTQSMNENCMRAYFGATEGGTNLTAYRGRMLSLFQVLEPAVNVSAQRLSDQVRVIQRDHRLTDVALDRLRSEVQSNRIISPQSQTAAQPRAPTVVPPPPIHADEESNDRVTNVSTQCNEQLRSALELAIREYRFTPPNLRPRIPRLPMHRKNRALMCALDSLLSSYFDNSENLEDTHSILYCAAVAACRVAHAKFDNNDRATRPKPTVPAWQCRIERRINEARALIGKLICFREGNTRPRVMRFVRRVFSGTDINPRDYMSRVTERIDFLKQKVYAWANRIRRYKRRVERYTQNRMFHSDERRVYRTWERPDHDVSDTHLPDNDVMNTFWRNIWSMPVTHTEGDWMQEVQRACEPIEEMGDITIVPQDVTSAVRPMANWKSPGPDGLHNFWLKWLRSSHARLASQFQSSLESGSLPQFLTTGVTHLLHKSGSTAEPKNYRPITCLPTVYKLLTSILRSKISKHIANNSIMSVSQNGCKNGSRGTKELLLIDMAISQQVRRSRKNLSTCWIDYKKAYDSVPHTWLMRVLELYKVNTTLCAFLTSCMGQWRTVLHYPGCRQIQGRGEPIRIERGIFQGDSLSPLWFCLALNPLSTLLEGSGLGYRLRRGGQVISHLLYMDDLKLFAPNNLQLMKLLKVTETFSNSIRMEFGVDKCAVMHVKRGGIMESVGTQLSDSIHLRSLSSTETYKYLGMSEALGINETDMKQSLRERFYGRLKKVLKSLLSGGNKVRAFNGWVMPVLMYSFGILKWTQTELDALDRRVRTLLTAYRMHHPRSSVMRLYIPRKCGGRGFLNAKTLHNREVCSLREYFLQADVGMHRDVVAVDKGFTPLSLAKENWRKPVVLDTNGRREVWQSKELHGRFYRALYGPDVDFLASVAWLRFGDLFGETEGFVCAIMDEVMMTNNYRKYIVKDGTVDICRACHCPGESIRHIISGCSRLANGEYLHRHNLVARIIHQQLALKYNLVDAEVPYYKYVPDPVLEKGHITLYWDRSIITDRTIVANKPDIVVIDRSERLTMIVDITVPHDDNLVKAEKDKEIKYQDLAHEVVDMWEVDSAVIVPIVVTANGLIAKSLDQHLMRLSLGSWVKGLIQKAVLLDTARIVRKFLSLRS

SEQ ID NO: 10057 - protein, 962 aa, Amphipyra berbera
MHRKNRALMCALDSLLSSYFDNSENLEDTHSILYCAAVAACRVAYAKFDNNDKATRPKPAVPAWQCRIERRINEARALIGKLICFREGNTRPRVMRFVRRAFSGTDINPRDYMSRVTERIDFLKQKVYAWANRIRRYKRRVERYTQNRMFHSDERWLYRTWERPDHDVNDAHPPDNDVMNTFWRNIWSMPVTHTEGDWMQEVQRACEPIKEMGDITIVPQDVTSAVRPMANWKSPGPDGLHNFWIKWLRSSHARLASQFQSSLESGSLPEFLTTGVTHLLHKSGSTAEPKNYRPITCLPTVYKLLTSILRAKINSHILYNSIMSVSQNGCKNGSRGTKELLLIDMAISQQVRRSRKDLSTCWIDYKKAYDSVPHTWLMRVLELYKVNTTLCAFLTSCMGQWRTVLHYPGCRQIQGRGEPIRIERGIFQGDSLSPLWFCLALNPLSTLLEGSGLGYRLRRGGQVISHLLYMDDLKLFAPNNLQLMKLLKVTETFSNSIRMEFGVDKCAVMHVKRGGIMESVGTQLSDSIHLRSLSSTETYKYLGMSEALGINETDMKQSLRERFYGRLKKVLKSLLSGGNKVRAFNGWVMPVLMYSFGILKWTQTELDALDRRVRTLLTAYRMHHPRSSVMRLYIPRKCGGRGFLNAKTLHNREVCSLREYFLQADVGMHRDVVAVDKGFTPLSLAKENWRKPVVLDTNGRREVWQSKELHGRFYRALHGPDVDFLASVAWLRFGDLFGETEGFVCAIMDEVMMTNNYRKYIVKDGTVDICRACHCPGESIRHIISGCSRLANGEYLHRHNLVARIIHQQLALKYNLVDAEVPYYKYVPDPVLENGHITLYWDRSIITDRTIVANKPDIVVIDRTERLTMIVDITVPHDENLVKAEKDKEIKYQDLAHEVVDMWEVDSAVIVPIVVTANGLIAKSLDHHLTRLSLGSWVKGLIQKAVLLDTARIVRKFLSLRP

SEQ ID NO: 10058 - protein, 1203 aa, Amphipyra berbera
MLTRARARKQTAHPRSPDSSLSSASQPPESSPPVSAVTPAAAVASSSSDEYYSPPSSPPPVRRRGGARPPACLGPRGQPATNRVPAAGGNVSRMRWTQSINENVMRAYYGATEGGINLTAYRERMLFLFQVLEPAINVSAQRLSDQVRVVQRNRRLDDTVLERLRSEARNSQTVTFPVQAAVQMQPLAVPPRPIHVDREGDGEAINVSNQCSEELRSALDDAILEFRTTPPEIRPRLPRLPMHGKNRALMCALDSLLSNYFDGSEDLADTHSILYCAAIAACRVAHVKFTENERATRPKPAVPAWQSRIERRIGGARVLIGKLICFREGNNRPRVMRFVRRAFSGTDISPRDYMSRVTERIDFLKQKVYAWANRIRRYKRRVERYTQNRIFQSDQRRVYRAWERPDPGGGDVRLPDDDALSSFWRSIWSVPIAHTEDGWMRDIEQACEPIAEMEPITITPQDVADAARPLPNWKSPGPDGLHNFWLKWLRSSHARLASQFQSSLESGSLPQFLTTGVTHLLYKSGSTAEPKNYRPITCLPTVYKLLTSILRVKITTHIDNNCIMSASQNGCRKGSRGTKELLLIDMAISQQVRRSQKDLSTCWIDYKKAYDSVPHSWLMRVLELYKINTTLRTFLMSCMRHWRTVLRYPGCRRIRGSGEQIRIERGIFQGDSLSPLWFCLALNPLSTLLEGTGLGYQLRRGGQVISHLLYMDDLKLFAPTDLQLMELLKVTENFSNSIRMEFGVDKCAVMHVKRGRIAESEGIQLPNSVQLRSLSPTETYKYLGMSEALGISETDMRQSLRERFFGRLNKLLKSLLSGGNKVRAFNGWVMLVLMYSFGTLKWTQADLDALDRRVRALLTAHRMHHPRSSVMRLYIPRKCGGRGFLNAKTLHNREVYSLREYFLQAEGVMHRDVVAVDKGFTPLALARENWRKPAVLSTNDREVVWQSKELHGRYYRALHGPDVDFSASVSWLRSGNLFGETEGFVCAIMDEVMMTNNYRKYIVKDGTVDICRACHRPGESIRHIVSGCSRLANGEYLHRHNLVARIIHQQLALKYNLVESEVPYYRYVPDPVLENGHATLYWDRSIITDRTIVANKPDIVVIDRSERRTMIVDITVPHDENLVKAEKDKQIKYLDLAHEVVGMWDVDSAVIVPIVVTANGIIAKSLDIHLMRLSLGGWIKGLIQRAVLLDTARIVRRFLSLEP

SEQ ID NO: 10059 - protein, 1010 aa, Noctua janthe
MTHDNNVSNDMVTNVSTKCNEEMRCALEGAIREYRFMQPDLRPRVPRLPMHNKNRVLVAVLDSQLSNYFDNCEDLTDAHSILYCAAVAACRVAHVKFSDDRATRPKPAVPSWQYRIERRIGEARALIGKLICFREGNTRPRVMRFVRRAFSGTDISARDYMSRVTERIDFQKQKVYAWANSIRRYKRRVDRYTQNRTFQRDERWVYTAWERPDQGVADTRLPDDDAMCSFWRSIWSVPVSHTEGEWTREVERACDLVPEMGAITISPQDVVRAVRPLPNWKSPGPDGLHNFWIKWFTRSHARLAILFQSALESGSLPELLTTGITHLLHKSGSTAEPKNYRPITCLPTVYKVLTSILRAKINKHIDDNSVMSASQNGCRNGSRGTKELLLIDMAISQQVRRSRRDLSTCWIDYKKAYDSVPHTWLMRVLELYKVDSTLRIFLMSCMGQWRTVLRYPGCRQIQRNSELIRIERGIFQGDSLSPLWFCLALNPLSTLLEDSGLGYRLRRGGQVISHLLYMDDLKLFAPNDLQLMELLKVTETFSSAIRMELGVDKCAVMHVKRGEIVESVGTQLSDSINFRSLSATETYKYLGMSEAVGINVADMKQSLKERFFGRLKKVFNSLLSGSNKVRAFNGWVMPVLMYSFGILKWTQTELDALDRRVRTLLTAYRMHHPRSSVMRLYIPRRCGGRGFLNAKTLHNREICSLREYFLETDVGMHRDVVAVDKGLTPLSLAKENWRKPVVSDTNDRMEVWQSKELHGRFFRALHGPDVDLPASVAWLRSGDLFGETEGFVCAIMDEVMMTNNYRRFIVKDGTVDICRACHRPGESIRHIISGCSRLANGEYLHRHNLVARIIHQQLALKYNLVESEVPYYKYVPDPVLENGSITLYWDRSIVTDRTIVANKPDIVVVDRSERRAMIVDITVPHDGNLVKAEKDKQIKYLDLAHEVVDMWDVDSAIIVPIVVSAHGLIAKSLDQYLRRLSLGSWIKGLIQKAVLLDTVRIVRRFLSLEP

SEQ ID NO: 10060 - protein, 1197 aa, Noctua janthe
MLTRSAARRARLSPPDPSLSSASPPPESSPVVSAVTPAVAVASSSSDEYFSPPTTPPPVRRRGGRRPPDGLGPRGPPASDRVPAPGGSVPRMRWTQSINANVMRAYYGATEGGNNLTAYRVRMLSLFQVLEPAVNVSAQRLSDQVRVIQRNGMLDDTVLDRLRTEMQSSHVIATPPQTVVPPQSTIIPTHDNNVSNDMVTNVSTQCNEEMRCALEGAIREYRFMQPDLRPRVPRLPMHNKNRVLVAVLDSQLSNYFDNCEDLTDAHSVLYCAAVAACRVAHVKFSDDRATRPKPAVPSWQYRIERRIGEARALIGKLICFREGNTRPRVMRFVRRAFSGTDISARDYMSRVTERIDFLKQKVYAWANRIRRYKRRVDRYTQNRTFQRDERWVYRAWERPDQGVADTRLPDDDAMCSFWRSIWSVPVSHTEGEWTREVERACDLVPEMGAITISPQDVVRAVRPLPNWKSPGPDGLHNFWIKWFTRSHARLAILFQSALESGSLPEFLTTGITHLLHKSGSTAEPKNYRPITCLPTVYKVLTSILRAKINKHIDDNSVMSTSQNGCRNGSRGTKELLLIDMAISQQVRRSRKDLSTCWIDYKKAYDSVPHTWLMRVLELYKIDATLRTFLMSCMGQWRTVLRYPGCRQIQRNSEPIRIERGIFQGDSLSPLWFCLALNPLSTLLEDSGLGYRLRRGGQVISHLLYMDDLKLFAPNDLQLMELLKVTETFSSAIRMEFGVDKCAVMHVKRGEIVESVGTQLSDSINLRSLSATETYKYLGMSEALGINVADMKQSLKERFFGRLKKVFNSLLSGGNKVRAFNGWVMPVLMYSFGILKWTQTELDALDRRVRTLLTAYRMHHPRSSVMRLYIPRRCGGRGFLNAKTLHNREICSLREYFLETDVGMHRDVVAVDKGLTPLSLAKENWRKPVVLDTNDRMEVWQSKELHGRFFRALHGPDVDLSASVAWLRSGNLFGETEGFVCAIMDEVMMTNNYRRFIVKDGTVDICRACHRPGESIRHIISGCSRLANGEYLHRHNLVARIIHQQLALKYNLVESEVPYYKYVPDPVLENGSITLYWDRSIITDRTIVANKPDIVVVDRSERRAMILDITVPHDENLVKAEKDKQIKYLDLAREVVDMWDVDSAIIVPIVVSAHGLIAKSLDQYLRRLSLGSWIKGLIQKAVLLDTARIVRRFLSLEP

SEQ ID NO: 10061 - protein, 1105 aa, Noctua janthe
MMTQSINANVMRAYYGATEGGNNLTAYRVRMLSLFQVLEPAVNVSAQRLSDQMRVIQRNGMLDDTVLDRLRTEMQSSHVIATPPQTVVPPQSTIIPTHDNNVSNDMVTNVSTQCNEEMRCALEGAIREYRFMQPDLRPRVPRLPMHNKNRVLVAVLDSQLSNYFDNCEDLTDAHSVLYCAAVAACRVAHVKFSDDRATRPKPAVPSWQYRIERRIGEARALIGKLICFREGNTRPRVMRFVRRAFSGTDISARDYMSRVTERIDFLKQKVYAWANRIRRYKRRVDRYTQNRTFQRDERWVYRAWERPDQGVADTRLLDDDVMCSFWRSIWSVPVSHTEGEWTREVERACDLVPEMGAITISPQDVVRAVRPLPNWKSPGPDGLHNFWIKWFTRSHARLAILFQSALESGSLPEFLTTGITHLLHKSGSTAEPKNYRPITCLPTVYKVLTSILRAKINKHIDDNSVMSASQNGCRNGSRGTKELLLIDMAISQQVRRSRKDLSTCWIDYKKAYDSVPHTWLMRVLELYKIDATLRTFLMSCMGQWRTVLRYPGCRQIQRNSEPIRIERGIFQGDSLSPLWFCLALNPLSTLLEDSGLGYRLRRGGQVISHLLYMDDLKLFAPNDLQLMELLKVTETFSSAIRMEFGVDKCAVMHVKRGEIVESVGTQLSDSINLRSLSATETYKYLGMSEALGINVADMKQSLKERFFGRLKKVFNSLLSGGNKVRAFNGWVMPVLMYSFGILKWTQTELDALDRRVRTLLTAYRMHHPRSSVMRLYIPRRCGGRGFLNAKTLHNREICSLREYFLETDVGMHRDVVAVDKGLTPLSLAKENWRKPVVLDTNDRMEVWQSKELHGRFFRALHGPDVDLSASVAWLRSGDLFGETEGFVCAIMDEVMMTNNYRRFIVKDGTVDICRACHRPGESICHIISGCSRLANGEYLHRHNLVARIIHQQLALKYNLVESEVPYYKYVPDPVLENGSITLYWDRSIITDRTIVANKPDIVVVDRSERRAMIVDITVPHDENLVKAEKDKQIKYLDLAREVVDMWDVDSAIIVPIVVSAHGLIAKSLDQYLRRLSLGSWIKGLIQKAVLLDTARIVRRFLSLEP

SEQ ID NO: 10062 - protein, 1000 aa, Noctua janthe
MVTNVSTQCNEEMRCALEGAIREYRFMQPDLRPRVPRLPMHNKNKVLVAVLDSQLSNYFDNCENLTDAHSVLYCAAVAACRVAHVKFSDDRATRPKPAVPSWQYRIERRIGEARALIGKLICFREGNTRPRVMRFVRRAFSGTDISARDYMSRVTERIDFLKQKVYAWANRIRRYKRRVDRYTQNRTFQRDERWVYRAWERPDQGVADTHLPDDDAMCSFWRSIWSVPVSHTEGEWTREVERACDLVPEMGAITISPQDVVRAVRPLPNWKSPGPYGLHNFWIKWFTRSHARLAILFQSALESGSLPEFLTTGITHLLHKSGSTAEPKNYRPIACLPTVYKVLTSILRAKINKHIDDNSVMSASQNGCRNGSRGTKELLLIDMAISQQVRRSRRDLSTCWIDYKKAYDSVPHTWLMRVLELYKVDSTLRIFLMSCMGQWRTVLRYPGCRQIQRNSEPIRIERGIFQGDSLSPLWFCLALNPLSTLLEDSGLGYRLRRGGQVISHLLYMDDLKLFAPNDLQLMELLKVTETFSSAIRMEFGVDKCAVMHVKRGEIVESVGTQLSDSINLRSLSATETYKYLGMSEALGINVADMKQSLKERFFGRLKKVFNSLLSGGNKVRAFNGWVMPVLMYSFGILKWTQTELDALDRRVRTLLTTYRMHHPRSSVMRLYIPRRCGGRGFLNAKTLHNREICSLREYFFETDVGMHRDVVAVDKGLTPLSLAKENWRKPVVLDTNDRMEVWQSKELHGRFFRALHGPDVDLPASVAWLRSGDLFGETEGFVCAIMDEVMMTNNYRRFIVKDGTVDICRACHRPGESIRHIISGCSRLANGEYLHRHNLVARIIHQQLALKYNLVESEVPYYKYVPDPVLENGNITLYWDRSIVTDRTIVANKPDIVVVDRSERRAMIVDITVPHDGNLVKAEKDKQIKYLDLAHEVVDMWDVDSAIIVPIVVSAHGLIAKSLDQYLRRLSLGSWIKGLIQKAVLLDTARIVRRFLSLEP

SEQ ID NO: 10063 - protein, 1195 aa, Noctua janthe
MNKVIIIIILSPPDPSLSSASPPPESSPIVSAVTPAVAVASSSSDEYFSPPTTPPPVRRRGGRRPPDGLGPRGPPASDRVPAPGGSVPRMRWTQSINANVMRAYYGATEGGNNLTAYRVRMLSLFQVLEPAVNVSAQRLSDQVRVIQRNRMLDDTVLDRLRTEMQSSHVIATPPQTVVPPQSTIIPTHDNNVSNDMVTNVSTQCNEEMRCALEGAIREYRFMQPDLRPRVPRLPMHNKNKVLVAVLDSQLSNYFDNCENLTDAHSVLYCAAVAACRVAHVKFSDDRATRPKPAVPSWQYRIERRIGEARALIGKLICFREGNTRPRVMRFVRRAFSGTDISARDYMSRVTERIDFLKQKVYAWAYRIRRYKRRVDRYTQNRTFQRDERWVYRAWERPDQGVADTHLPDDDAMCSFWRSIWSVPVSHTEGEWTREVERACDLVPEMGAITISPQDVVRAVRPLPNWKSPGPDGLHNFWIKWFTRSHARLAILFQSALESGSLPEFLTTGITHLLHKSGSTAEPKNYRPIACLPTVYKVLTSILRAKINKHIDDNSVMSASQNGCRNGSRGTKELLLIDMAISQQVRRSRRDLSTCWIDYKKAYDSVPHTWLMRVLELYKVDSTLRIFLMSCMGQWRTVLRYPGCRQIQRNSEPIRIERGIFQGDSLSPLWFCLALNPLSTLLEDSGLGYRLRRGGQVISHLLYMDDLKLFAPNDLQLMELLKVTETFSSAIRMEFGVDKCAVMHVKRGEIVESVGTQLSDSINLRSLSATETYKYLGMSEVLGINVADMKQSLKERFFGRLKKVFNSLLSGGNKVRAFNGWVMPVLMYSFGILKWTQTELDALDRRVRTLLTTYRMHHPRSSVMRLYIPRRCGGRGFLNAKTLHNREICSLREYFLETDVGMHRDVVAVDKGLTPLSLAKENWRKPVVLDTNDRMEVWQSKELHGRFFRALHGPDVDLPASVAWLRSGDLFGETEGFVCAIMDEVMMTNNYRRFIVKDGTVDICRACHRPGESIRHIISGCSRLANGEYLHRHNLVARIIHQQLALKYNLVESEVPYYKYVPDPVLENGNITLYWDRSIVTDRTIVANKPDIVVVDRSERRAMIVDITVPHDGNLVKAEKDKQIKYLDLAHEVVDMWDVDSAIIVPIVVSAHGLIAKSLDQYLRRLSLGSWIKGLIQKAVLLDTARIVRRFLSLEP

SEQ ID NO: 10064 - protein, 870 aa, Mythimna ferrago
MRFVRRAFSGTDISPRDYLPRITERIDFLRQKVYAWANRIRRYKRRVERYTQNHTFQGNERWVYRAWERPDQSVIDTRLPDGDAMYSFWRSIWSVPVNHTEGDWTREIERVCELIPEMGAINISPQDVARAVRPLPNWKSPGPDGLHNFWLKWFQSSHARLASQFQSALESGSLPQFLTTGITHLLHKSGSTAEPKNYRPITCLPTVYKVLTSILRAKINNHIETNSIMSASQNGCRNGSRGTKELLLIDVAISQQVRRSRRDLSTCWIDYKKAYDSVPHTWLMRVLELYKDDATLRAFLMSCMGQWRTVLHYPGCRRVSQNSEPLRIERDIFQGDSLSPLWFCLALNPLSTLLEGSGLGYRLRREGQVISHLLYMDDLKLFASNNLQLMELLKVTETFSSAIRMEFGLDKCAVMHVKRGEIMESVGTQLSDSIHLRSLCSTETYKYLGMSEALGINAADVKQSLRERFFGRLNKVLNSLLSGGNKVRAFNGWVMPVLMYSFGILKWTQTELDALDRRVRTLLTANRMHHPRSSVMRLYIPRKCGGRGFLNAKTLHNREVCSLREYFLETDVGMHRDVVAVDKGLTPLSLANENWRKPIVMDTNERKEVWKGKELHGRFYRALHGPDVDLLASVSWLRFGDLFGETEGFVFAIMDEVMMTNNYRKYIVKDGTVDICRACHRPGESIRHIISGCSHLANGDYLHRHNLVARIIHQQLALKYNLVESEVPYYRYVPDPVLENGSVTLYWDRSIITDRTIVANKPDIVVIDRLERRTMIVDIIIAVPHDENLVKAEKDKQTKYLDLAREVVDMWEVDRAIIVPIVVTANGLIAKSLDQHLQRLSLGSWIKGLIQKAVLLDTARIVRRFLSQEP

SEQ ID NO: 10065 - protein, 1194 aa, Mythimna ferrago
MLTRAAARRARPSPPASPPPEPSLTVSAVTPAVAAASSSSDEYYSPPTTPPPARRRGGRRPPDRLGHRGPPASDRVPASSGSVQRMRWTQSINENVMSSYYGATEGGNSLTAYRVRMLSLFQVLEPAVNVSAQRLSDQVRVILRNHMLDDTVLDRLQTEMSDRVIAPPSQPVVPVVVPPSSYISFDTNEVNSDTVTNVSNQCNSELRSALECAIREYRNIPSELRPRIPRLPMCNKNRALVAALDSQLSSYFDDCEDLTDTHSIMYCAAVAACRVAHVKFPNSDVATRPKPAVPAWQCRIERRIGGARALIGKLICFREGNTRPRVMRFVRRAFSGTDISPRDYMSRVTERIDFLKQKVYAWANRIRRYKRRVERYTQNRTFRSNERWVYRAWERPDQCVTDARLPDDDAMSSFWRSIWSVPVSHTEGDWIRGVERACDPIPQMGAIDISPQDVARAVRPLPNWKSPGPDGLHNFWVKWFTRSHARLAYQFQSALESGSLPQFLTTGITHLLHKSGSTAEPKNYRPITCLPTVYKVLTSILRSKINSHIDENSIMSPSQNGCRNGSRGTKELLLVDMTIGQQVRRSRKDLSTCWIDYKKAYDSVPHTWLMRVLELYKIDTTLRTFLMSCMRQWSTVLLYPRCRNIQRNSEPVRIERGIFQGDSLSPLWFCLALNPLSTLLENSGLGYRLKRGGQVISHLLYMDDLKLFAPNNLQLMELLKVTETFSSAIRMEFGVDKCAVMHVKRGEVVESVSTRLTDSINLRSLSPTETYKYLGMSEALGISITDMKQSLKERFFGRLKKVFNSLLSGGNKVRAFNGWVMPVLMYSFGVLKWTQTELDALDRRVRTLLTAYRMHHARSSVMRLYIPRKCGGRGFLNAKTLHNREVYSIREYFLAADVGMHRDVVAVDKGLTPLSLANENWRKPIVPDTNDRREVWQSKELHGRFFRALHGPDVDQLASVAWLRFGDLFGETEGFVCAIMDGVIMTNNYRRFIVKDGTVDICRACHRPGESLRHIISGCSRLANGEYLHRHNLVARIIHQQLALKYSLVESEVPYYRYEPDPVLDNGHITLYWDRPIITDRTIVANKPDIVVVDRSERRAMIVDISVPHDENLVKAEKDKQIKYIDLAREVVDMWEVDSAIIVPIIVSANGLIAKSLDQHLRRLSLGDWIKGLIQKAVLLDTARIVRRFLSLEP

SEQ ID NO: 10066 - protein, 1200 aa, Mythimna ferrago
MLTRAAARRARPPPPASSLSSASPPPEPSPIVSAVTPAVAAASSSSDEYYSPPTTPPPTRRRGGRRPPDCLGPRGPPASDRVPAPGGSVQRMRWTQSINKNVMRSYYGATEGGNNLTAYRVRMLSLFQVLEPAVNVSAQRLSDQVRVILRNHMLDDTVLDRLRTEMSDRVITPPSQPMVSAMVPPSSCISFHTDEVSYDTVTNVSNQCNSELRSALECAIREYRNIPPELRPRIPRLPMCNKNRALVAALDSQLSNYFDDCEDLTDTHSIMYCAAVAACRVAHVKFPNSDVATRPKPAVPAWQCRIERRIGGARALIGKLICFREGNTRPRVMRFVRRAFSGTDISPRDYMSRVTERIDFLKQKVYAWANRIRRYKRRVERYTQNRTFRSNERWVYRAWERPDQGVTDVRLPDDDAMSSFWRSIWSVPVSHTEGDWTREVERACDPIPQMGAIDISPQNVVRAVRPLPNWKSPGPDGLHNFWIKWFTRSHARLAYQFQSALESGSLPQFLTTGITHLLHKSGSTAEPKNYRPITCLPTVYKVLTSILRSKINSHIDENSIMSPSQNGCRNGSCGTKELLLIDMTISQQVRRSRKDLSTCWIDYRKAYDSVPHTWLMRVLELYKIDTTLRTFLMSCMRQWSTVLRYPGCRNIQRNSEPVRIERGIFQGDSLSPLWFCLALNPLSTLLENSGLGYRLKRGGQVISHLLYMDDLKLFAPNNLQLMELLKVTETFSSAIRMEFGVDKCAVMHVKRGEVVESVSTQLTDSINLRSLSPTETYKYLGMSEALGISITDMKQSLRERFFGRLKKVFNSLLLGGNKVRAFNGWVMPVLMYSFGVLKWTQTELDALDRRVRTLLTAYRMHHPQSSVMRLYIPRKCGGRGFLNAKTLHNREVCSLREYFLAAAVGMHRDVVAVDKGLTPLSLANENWRKPIVLDTNDRREVWQSKELHGRFFRALHGPDVDQLASVAWLRFGDLFGETEGFVCAIMDEVIMTNNYRRFIVKDGTVDICRACHRPGESIRHIISGCSRLANGEYLHRHNLVARIIHQQLALKYSLVESEVPYYRYEPDPVLDNGHITLYWDRPIITDRTIVANKPDIVVVDRSERRAMIVDISVPHDENLVKAEKDKQIKYIDLAREVVDMWEVDSAVIVPIVVSANGLIAKSLDQHLRRLSLGDWIKGLIQKAVLLDTARIVRRFLSLEP

SEQ ID NO: 10067 - protein, 1200 aa, Mythimna ferrago
MLTRVAARRARPPPLASSLSSASLPPEPSLTVSAVTPAAAAASSSSDEYYSPPTTPPPARRRGGRRPPACLGPRGPPVSDRVPAAGGSVPRMRWTQSTNENVMRAYYGATEGGNNLTAYRVRMLSLFQVLEPAVNVSAQRLSDQVRVIQRNNMLDDTVLDRLRTEMSNRVITPPSQPVVPVVVPQSSHISLHTDEVSTDTVTNVSTQCNNELRSALECAIREYRNMPLELRPRLPRLPMHNKNKALVAALDSQLSNYFDDCEDLTDTHSIMYCVAVAACRVAHVKFPNSDVATRPKPAVPAWQYRIERRIGGARALIGKLICFREGNTRPRVMRFVRRAFSGTDISPRDYMSRVTERIDFLKQKVYAWANRIRRYKRRVERYIQNSTFRSNERWVYRAWERPDQGVTDTRPPDDDAMCSFWRNIWSVPVSHTEGGWTREVERACESVTEMGAITISPQDVARAVRPLPNWKSPGPDGLHNFWIKWLQRSHARLASQYQAALESGSLPEFLTTGVTHLLHKSGSTAEPKNYRPITCLPTVYKVLTSILRAKINHHVDNNAIMSASQNGCRNGSRGTKELLLIDMAISQQVRRSRKDLSTCWIDYKKAYDSVPHTWLMRVLELYKVDATLCTFLMSCMRQWRTVLRYPGCRNIQRNSEPVRIERGIFQGDSLSPLWFCLVLNPLSTLLENSDLGYRLKRGGQVISHLLYMDDLKLFAPNNLQLMELLKVTETFSSAIRMEFGVDKCAVMHIKRGEIVESVGIQLSDSIHLRSLSPTETYKYLGMSEALGINATDMKQSLRERFFGRLKKVLNSLLSGGNKVRAFNGWVMPVLMYAFGVLKWTQTELDALDRRVRTLLTAYRMHHPRSSVMRLYIPRKCGGRGFLNAKSLHNREVCSLREYFLAADGGMHRDIVAVDKGLTPLSLANENWRKPVVLDTNVRREVWQSKELHGRFFRALHGPDVDQLASVAWLRVGDLFGETEGFVCAIMDEVIMTNNYRRFIVKDGTVDICRACHRPGESIRHIISGCSRLANGEYLHRHNLVARIIHQQLALKYSLVESEVPYYRYVPDPVLDSGDITLYWDRSIITDRTIVANKPDIVVVDRSERRAMIVDISVPHDENLAKAEKDKQIKYIDLAREVVDMWEVDSAIIVPIVVSANGLIAKSLDQHLRGLSLGDWIKGLIQKAVLLDTARIVRRFLSLEP

SEQ ID NO: 10068 - protein, 1035 aa, Mythimna ferrago
MSNRVITPPSQPVVPVVVPQSSHISLHTDEVSTDTVTNVSTQCNNELRSALECAIREYRNMPLELRPRLPRMPMHNKNKALVAALDSQLSNYFDDCEDLTDTHSIMYCAAVAACRVAHVKFPNSDVATRPKPAVPAWQYRIERRIGGARALIGKLICFREGNTHPRVMRFVRRAFSGTDISPRDYMSRVTERIDFLKQKVYAWANRIRRYKRRVERYIQNSTFRSNERWVYRAWERPDQGVTDTRPPDDDAMCSFWRNIWSVPVSHTEGGWTREVERACESVTEMGAITISPQDVARAVRPLPNWKSPGPDGLHNFWIKWLQRSHARLASQYQAALESGSLPEFLTTGVTHLLHKSGSTAEPKNYRPITCLPTVYKVLTSILRAKINHHVDNNAIMSASQNGCRNGSRGTKELLLIDMAISQQVPRSRKDLSTCWIDYKKAYDSVPHTWLMRVLELYKVDATLRTFLMSCMRQWRTVLRYPGCRNIQRNSEPVRIERGIFQGDSLSPLWFCLALNPLSTLLENSGLGYRLKRGGQVISHLLYMDDLKLFAPNNLQLMELLKVTETFSSAIRMEFGVDKCAVMHIKRGEIVESVGIQLSDSIHLRSLSPTETYKYLGMSEALGINATDMKQSLRERFFGRLKKVLNSLLSGGNKVRAFNGWVMPVLMYAFGVLKWTQTELDALDRRVRTLLTAYRMHHPRSSVMRLYIPRKCGGRGFLNAKSLHNREVCSLREYFLAADGGMHRDVVAVDKGLTPLSLANENWRKPVVLDTNVRREVWQSKELHGRFFRALHGPDVDQLASEAWLRVGDLFGETEGFVCAIMDEVIMTNNYRRFIVKDGTVDICRACHRPGESIRHIISGCSRLANGEYLHRHNLVARIIHQQLALKYSLVESEVPYYRYVPDPVLDSGDITLYWDRSIITDRTIVANKPDIVVVDRSERRAMIVDISVPHDENLAKAEKDKQIKYIDLAREVVDMWEVDSAIIVPIVVSANGLIAKSLDQHLRRLSLGDWIKGLIQKAVLLDTARIVRRFLSLEP

SEQ ID NO: 10069 - protein, 975 aa, Eilema sororculum
MPVHVRPRLPRLPIHRRNIALVSALDSLLPRYLENSENLGDTHSILYCTAVAACRMAGAKFPIKDPAIRPKFTIPAWQCRIERRVAEARVLIGKLICFRSGNTRPRVMRYVTRAFAGTDISPQDYTSRVTERIDFLKQKVCAWANRIRRYKKRVDRYTVNRMFQRDQRWVYRSWERTDESVDDVRRPDAEATNAFWRSIWSVPVSHTEGDWMREVERACETIPEMEEIYIDATDVDCAVRSLSNWKSPGPDGLHNFWLKWLRSSHVVLASQFQSAIESGTLPAFMTTGVTHLLHKTGSTLEPNNYRPITCLPTVYKLLTSILRAKINNHINNNSIMCTSQNGCRNGARGTKELLLIDMTISQQARRNRKDLTACWIDYKKAFDSVPHTWLLRVLELYKVNTTLCTFLRSCMRQWRTVLFYPGCRRALGGGVPITIERGIFQGDSLSPLWFCLALNPLSALLLNSGLGYRLRREGQVVSHLFYMDDLKLFAHTNPQLIALLKVTETFSNSIKMAFGVDKCAVIHVKRGRVVESEGIQLSDSTNLRSLLVTETYKYLGMSQALCINEVDMKQLLQERFIGRLKKVLNSLLSGGNKVRACNSWVMPLLMYSFGILKWTQTELDTIDRKVRTQLTAFRMHHPRSSVMRLYIPRKCGGRGFLNAKTLHNREVCNLRDYFLKSNVDMHRDVVNVDTGLTPLGLAKENWRRPTIVSTDSRREVWQSKELHGRFYRALHRPEVDLLASVAWLRFIDLFGETEGFVCAIADEVIKTNNYRKYIMRDGTIDICRACHQPGESLRHITSGCSRLANGEYLHRHNQVARIIHQRLALKYNLVEVEVPYYRYVPEPVLENSHITLYWDRSIITDRTVIANKPDIVVIDRSERRALIVDVTIPHDENLVKAEKDKQVKYLDLAHEVVDMWNVDSAIIVPIVVSVNGLIAKSLDQHLKRLGLDGWVKGQMQKAVLLDTARIVRKFLSLEP

SEQ ID NO: 10070 - protein, 1192 aa, Eilema sororculum
MLTRAQAKRHRNAPTTSPDSSLSSAAQPPAVEPAASSSSSSDEFFSPPTSPTPVRRPGRGRPPTCLGPRRPPASSGAPATGGDVHRMRWTTSINENVMRAYFAATEGGTNLSAYRTRMLPLFQALEPSINTSAQRLSDQVRVIQRNRMLNETVLETLRLECLRNICVTPAPAPAPASTAERNDDTCVAPDDTPIPVSIQYNEEIKEALECALREYRSMPVHVRPRLPRLPIHRRNIALVSALDSLLPRYLENSENLGDTHSILYCTAVAACRMAGAKSPIKDPAIRPKFTIPAWQCRIERRVAEARVLIGKLICFRSGNTRPRVMRYVTRAFVGTDISPQDYTSRVTERIDFLKQKVCAWANRIRRYKKRVDRYTVNRMFQRDQRWVYRSWERTDESVDDVRRPDAEATNAFWRSIWSVPVSHTEGDWMREVERACETIPEMEEIYIDATDVDCAVHSLSNWKSPGPDGLHNFWLKWLRSSHVVLASQFQSAIESGTLPAFMTTGVTHLLHKTGSTLEPNNYRPITCLPTVYKLLTSILRAKINNHINNNSIMCASQNGCRNGARGTKELLLIDMAISQQARRNRKDLTACWIDYKKAFDSVPHTWLLRVLELYKVNTTLCTFLRSCMRQWRTVLFYPGCRQALGGGVPITIERGIFQGDSLSPLWFCLALNPLSALLVNSGLGYRLRREGQMVSHLFYMDDLKLFAHTNPQLMALLKVTETFSNSIKMAFGVDKCAVIHVKRGRVVESEGIQLSDSTNLRSLLVTETYKYLGMSQALCINEVDMKQMLQERFFGRLKKVLNSLLSGGNKVRACNSWVMPLLMYSFGILKWTQTELDTIDRKVRTQLTAFRMHHPRSSVMRLYIPRKCGGRGFLNAKTLHNREVCNLRDYFLKSNVDMHRDVVNVDTGLTPLGLAKENWRRPTIVSTDSRRDVWQSKELHGRFYRALHRPEVDLLASVSWLRFSDLFGETEGFVCAIADEVIKTNNYRKYIMRDGTIDICRACHQPGESLRHITSGCSRLANGEYLHRHNQVARIIHQRLALKYNLVEVEVPYYRYVPEPVLENSHITLYWDRSIITDRTVIANKPDIVVIDRSERRALIVDVTIPHDENLVKAEKDKQVKYLDLAHEVVDMWNVDSAIIVPIVVSVNGLIAKSLDQHLKRLGLDGWVKGQMQKAVLLDTARIVRKFLSLEP

SEQ ID NO: 10071 - protein, 1192 aa, Eilema sororculum
MLTRAQASRNRSAPTTSPDSSLSSAAQPPAVEPAASSSSSSDEFFSPPTSPTPVRRPGRGRPPTCLGPRRPPASNRAPATGGDVHRMRWTITINENVMRAYFAATEGGTNLSAYRTRMLPLFQALEPSINVSAQRLSDQVRVIQRNRMLNETVLETLRLECLRNICVTPAPAPAPASTVEINDDTCVAPDDTPIPVSIQYNEEIKEALECALREYRSMPVHVRPRLPRLPIHRRNIALVSALDSLLPRYLENSENLGDTHSILYCTAVAACRMAGAKFPNKDPAIRLKSAIPAWQCRIERRVAEARVLIGKLICFRSGNTRPRVMRYVTRAFAGTDISPQDYTSRVTERIDFLKQKVYAWANRIRRYKKRVDRYTVNRMFQRDQRWVYRSWERTEESVDDVRRPDAETTNAFWRSIWSVPVNHTEGDWMREVERACETIPEMEKINIDAIDVDCAVRSLSNWKSPGPDGLHNFWLKWLRSSHVVLASQFQSAVESGTLPAFMTTGVTHLLHKTGSTLEPNNYRPITCLPTVYKLLTSILRAKINNHINNNSIMCASQNGCRNGARGTKELLLIDMAISQQARRNRKDLTACWIDYKKAFDSVPHTWLLRVLELYKVNTTLCTFLRSCMGQWRTVLFYPGCRQALGSGEPITIERGIFQGDSLSPLWFCLALNPLSTLLVNSGLGYRLRREGQLVSHLFYMDDLKLFAHTNPQLIALLKVTETFSNSIKMAFGVDKCAVIHVKRGRVVESEGIQLSDSTNLRSLLVTETYKYLGMSQALCINEVDMKQMLQERFFGRLKKVLNSLLSGGNKVRACNSWVMPLLMYSFGILKWTQTELDTIDRKVRTQLTAFRMHHPRSSVMRLYIPRKCGGRGFLNAKTLHNREVCNLRDYFLKSNVDMHRDVVNVDTGLTPLGLAKENWRRPTIVGTDSRREVWQSKELHGRFYRALHRPEVDLLASVSWLRFSDLFGETEGFVCAIADEVIKTNNYRKYIMRDGTIDICRACHQPGESLRHITSGCSRLANGEYLHRHNQVARIIHQRLALKYNLVEVEVPYYRYVPEPVLENSHITLYWDRSIITDRTVVANKPDIVVIDRSERRALIVDVTIPHDENLVKAEKDKQVKYLDLAHEVVDMWNVDSAIIVPIVVSVNGLIAKSLDQHLKRLGLDGWVKGQMQKAVLLDTARIVRKFLSLEP

SEQ ID NO: 10072 - protein, 1192 aa, Eilema sororculum
MLTRAQASRNRSAPITSPDSSLSSAAQPPAVEPAASSSSSSDEFFSPPTSPTPVRRPGRGRPPTCLGPRRPPASNRAPAAGGNVHRMRWTNSINENVMRAYFAATEGGTNLSAYRTRMLPLFQALEPSINVSAQRLSDQVRVIQRNRLLNETVLETLRLECLRNICVTPAPAPAPASTVEINDDTCVAPDDTPIPVSIQYNEEIKEALECALREYRSMPVHVRPRLPRLPIHRRNIALVSALDSLLPRYLENSENLGDTHSILYCTAVAACRMAGANFPKKDPAIRLKSAIPAWQCRIERRVAEARVLIGKLICFRSGNTRPRVMRYVTRAFAGTDISPQDYTSRVTERIDFLKQKVYAWANRIRRYKKRVDRYTVNRMFQRDQRWVYRSWERTEESVDDVRRPDAETTNAFWRSIWSVPVNHTEGDWMREVERACETIPEMEKINIDAIDVDCAVRSLSNWKSPGPDGLHNFWLKWLRSSHVVLASQFQSAVESGTLPAFMTTGVTHLLHKTGSTLEPNNYRPITCLPTVYKLLTSILRAKINNHINNNSIMCASQNGCRNGARGTKELLLIDMAISQQARRNRKDLTACWIDYKKAFDSVPHTWLLRVLELYKVNTTLCTFLRSCMGQWRTVLFYPGCRQALGSGEPITIERGIFQGDSLSPLWFCLALNPLSTLLVNSGLGYRLRREGQMVSHLFYMDDLKLFAHTNPQLIALLKVTETFSNSIKMAFGVDKCAVIHVKRGRVVESEGIQLSDSTNLRSLLVTETYKYLGMSQALCINEVDMKQMLQERFFGRLKKVLNSLLSGGNKVRACNSWVMPLLMYSFGILKWTQIELDTIDRKVRTQLTAFRMHHPRSSVMRLYIPRKCGGRGFLNAKTLHNREVCNLRDYFLKSNVDMHRDVVNVDTGLTPLGLAKENWRRPTIVGTDSRREVWQSKELHGRFYRALHRPEVDLLASVSWLRFSDLFGETEGFVCAIADEVIKTNNYRKYIMRDGTIDICRACHQPGESLRHITSGCSRLANGEYLHRHNQVARIIHQRLALKYNLVEVEVPYYRYVPEPVLENSHITLYWDRSIITDRTVVANKPDIVVIDRSERRALIVDVTIPHDENLVKAEKDKQVKYLDLAHEVVDMWNVDSAIIVPIVVSVNGLIAKSLDQHLKRLGLGGWVKGQMQKAVLLDTARIVRKFLSLEP

SEQ ID NO: 10073 - protein, 925 aa, Eilema sororculum
MIRNNTSIHLILIIIIIRRLKSAIPAWQCRIERRVAEARVLIGKLICFRSGNTRPRVMRYVTRAFAGTDISPQDYTSRVTERIDFLKQKVYAWANLIRRYKKRVDRYTVNRMFQRDQRWVYRSWERTEESVDDVRRPDAETTNAFWRSIWSVPVNHTEGDWMREVERACETIPEMEKINIDAIDVDCAVRSLSNWKSPGPDGLHNFWLKWLRSSHVVLASQFQSAVESGTLPAFMTIGVTHLLHKTGSTLEPNNYRPITCLPTVYKLLTSILRAKINNHINNNSIMCASQNGCRNGARGTKELLLIDMAISQQARRNRKDLTACWIDYKKAFDSVPHTWLLRVLELYKVNTTLCTFLRSCMGQWRTVLFYPGCRQALGSGEPITIERGIFQGDSLSPLWFCLALNPLSTLLVNSGLGYRLRREGQLVSHLFYMDDLKLFAHTNPQLIALLKVTETFSNSIKMAFGVDKCAVIHVKRGRVVESEGIQLSDSTNLRSLLVTETYKYLGMSQALCINEVDMKQMLQERFFGRLKKVLNSLLSGGNKVRACNSWVMPLLMYSFGILKWTQTELDTIDRKVRTQLTAFRMHHPRSSVMRLYIPRKCGGRGFLNAKTLHNREVCNLRDYFLKSNVDMHRDVVNVDTGLTPLGLAKENWRRPTIVGTDSRREVWQSKELHGRFYRALHRPEVDLLASVSWLRSSDLFGETEGFVCAIADEVIKTNNYRKYIMRDGTIDICRACHQPGESLRHITSGCSRLANGEYLHRHNQVARIIHQRLALKYNLVEVEVPYYRYVPEPVLENSHITLYWDRSIITDRTVVANKPDIVVIDRSERRALIVDVTIPHDENLVKAEKDKQVKYLDLAHEVVDMWNVDSAIIVPIVVSVNGLIAKSLDQHLKRLGLDGWIKGQMQKAVLLDTARIVRKFLSLEP

SEQ ID NO: 10074 - protein, 1212 aa, Ptilodon capucinus
MTDAPRRNPRRLCRQRTVNEPNAQSTPPDPSPRSASPSPASIIRTSVTAVASSESDEYFSPPTSPPPVRQQRGRPPGHLGLLGQPAPNRVLVPSGVVRRMRWTSSINENVMRAYYEATEGGTNLTAYRNRMLPLFQSLEPAVNVSAQRLSDQVRVIQRGNMLADTVLDRLRSEMQSRRVVPVASSQPAAQPVASATVTSRLAADSDVDRDNAPINVSNQYNELLRSTLEDVVRVYRSMPNHLRPRIPRLPMHKGNRALVGALDSLLSIYFDSSDNLADTHSILYCAAITVCRVARVKVFNTDTATRPKPAVLAWQCRIERRISEARALIGKLSCFREGNTRPRVMRFVKRAFAGTDVSPREYISHVTERIDFLKQKIYAWANRIRRYKVRVDRYSQNSMFQRDQRWVYRSWERPSKPVSELQRPDDNATTTFWRDIWSVPVTHYEGDWIGDVERMCEPIKEMEAISIGPLDVANAVRSLPNWKAPGPDGLHNFWLKWLRSSHVRLAYQFQLALQSGSLPEFITTGVTHLLHKTGSTTDPKNYRPITCLPTIYKTLTSILRAKIARHVEDNSIMSASQNGCRSGSRGTKELLLIDMTICQQARRNRKDLSTCWIDYKKAYDSVPHTWLVRVLELYKIDTTLRTFLESCMRQWKTVLLCPGSRQILGNGEPIRIERGIFQGDSLSPLWFCLALNPLSTLLEESGFGFRLRRGGQVISHLLYMDDLKLFAPTALQLTGLLKATETFSYSIRMEFGVDKCAVMHAKQGRLVESEGIQLSDSIQLRTLAATETYKYLGMSQGLGISETDMKQLLRDRFLGRLKKVLKSLLSGGNKVRVYNGWVMPVLMYSFGILKWTQTELDTLDRTVRTTLTSYRMHHPRSSVMRLYIPRKCGGRGFLNVKTLHNREICSLREYFLRADGEMHVDVVAVDNGLTPLSLAKENWRKPVVLTTDDRRLVWQGKELHGRYYRALHGPDVDLAASVAWLRFGDLFGETEGFVCAIMDEVVMTNNYRKYILRDGTIDICRACHRPGESLRHIISGCSRLANGQYLHRHNQVARIIHQQLALKYRLVTSEVPYYRYEPQPVLEDGHISLYWDRSIITDRTIVANKPDIVLIDRQERRAIIVDITVPHDENLVKAEKDKESKYLDLAHEVVDMWDIDAAIIVPIVVSAHGLLAKSLDKHLKRLALGGWIKGQIQKAVLLETARIVRKFLSLEP

SEQ ID NO: 10075 - protein, 1212 aa, Ptilodon capucinus
MTDAPRRNPRRQCRQRSAVRHYAQSTPPDQSPRSASPSPASIIRTSVTAVASSESDEYFSPPTSPPPVRRQRGRPPGHLGLLGQPAPNRVLVPSGVVRRMRWTSSMNENVMRAYYEATEGGTNLTAYRDRMLPLFQSLEPAVNVSAQRLSDQVRVIQRGNMLADTVLDRLRSEVQSRRVVPVASSQPAAQPVASATVTSRLAADSDVDRDNAPIDVSTQYNDLLRSTLEDVLREYRSMPNHLRPRIPRLPMHKGNRALVGALDSLLSIYFDSSDDLVDTHSILYCAAITVCRVARVKVFNTDTATRPKPAVPAWQCRIERRISEARALIGKLSCFREGNTRPRVMRFVKRAFAGTDVSPREYISRVTERIDFLKQKIYAWANRIRRYKARVDRYSLNSMFQRDQRWVYRSWERPNEPVSELQRPDDNAMTTFWRDIWSVPVTHYEGNWIGDVERMCEPIKEMEAISIGPLDVANAVRSLPNWKAPGPDGLHNFWLKWLRSSHVRLASQFQSALQSGSLPEFITTGVTHLLHKTGSTTDPKNYRPITCLPTIYKTLTSILRAKIARHVEDNSIMSASQNGCRSGSRGTKELLLIDMTICQQARRNRKDLSTCWIDYKKAYDSVPHTWLVRVLELYKIDTTLRTFLESCMRQWKTVLLCPGSRQILGNGEPIRIERGIFQGDSLSPLWFCLALNPLSALLEESGFGFRLRRGGQVISHLLYMDDLKLFAPTALQLSGLLKVTETFSNSIRMEFGVDKCAVMHAKQGRMVESEGIQLSDSIQLRSLAATDTYKYLGMSQGLGISETDMKQLLRDRFLGRLKKVLRSLLSGGNKVRAYNGWVMPVLMYSFGILKWTQTELDTLDRTVRTTLTAYRMHHPRSSVMRLYIPRKCGGRGFLNVKTLHNREICSLREYFLRADGEMHVDVVAVDNGLTPLSLAKENWRKPVVLTTDDRRVVWQGKELHGRYYRALHGPDVDLAASVAWLRFGDLFGETEGFVCAIMDEVVMTNNYRRYILRDGTIDICRACHRPGESLRHIISGCSRLANGQYLHRHNQVARIVHQQLALKYRLVTSEVPYYRYEPQPVLEEGHITLYWDRSIITDRTIVANKPDIVLIDRQERRAMIIDITVPHDENLVKAEKDKESKYLDLAHEVVDMWDIDAAIIVPIVVSAHGLLAKSLDKHLKRLALGSWIKGQIQKAVLLETARIVRKFLSLEP

SEQ ID NO: 10076 - protein, 975 aa, Ptilodon capucinus
MPNHLRPRIPRLPMHKGNRALVGALDSLLSIYFDSSDDLVDTHSILYCAAITVCRVARVKVFNTDTTTRPKPAVPAWQCRIERRISEARALIGKLSCFREGNTRPRVMRFVKRAFAGTDVSPREYISRVTERIDFLKQKIYAWANRIRRYKARVDRYSQNSMFQRDQRWVYRSWERPNEPVSELQRPDDNAMTTFWRDIWSVPVTHYEGNWIGDVERMCEPIKEMEAISIGPLDVANAVRSLPNWKAPGPDGLHNFWLKWLRSSHVRLASQFQSALQSGSLPEFITTGVTHLLHKTGSTTDPKNYRPITCLPTIYKTLTSILRAKIARHVENNSIISASQNGCRSGSRGTKELLLIDMTICQQARRNRKDLSTCWIDYKKAYDSVPHTWLVKVLELYKIDTTLRTFLESCMRQWKTVLLCPGSRQILGNGEPIRIERGIFQGDSLSPLWFCLALNPLSTLLEESGFGFRLRRGGQVISHLLYMDDLKLFAPTALQLSGLLKVTEAFSNSIRMEFGVDKCAVMHAKQGRMVESEGIQLSDSIQLRSLAATETYKYLGMSQGLGISETDMKQLLRDRFLGRLKKVLKSLLSGGNKVRAYNGWVMPVLMYSFGILKWTQTELDALDRTVRTTLTAYRMHHPRSSVMRLYIPRKCGGRGFLNVKTLHNREICSLREYFLRADGEMHVDVVAVDNGLTPLSLAKENWRKPVVLTTDDRRVVWQGKELHGRYYRALHGPDVDLAASVAWLRFGDLFGETEGFVCAIMDEVVMTNNYRRYILRDGTIDICRACHRPGESLRHIISGCSRLANGQYLHRHNQVARIVHQQLALKYRLVTSEVPYYRYEPQPVLEEGHITLYWDRSIITDRTIVANKPDIVLIDRQERRAMIIDITVPHDENLVKAEKDKESKYLDLAHEVVDMWDIDAAIIVPIVVSAHGLLAKSLDKHLKRLALGSWIKGQIQKAVLLEAARIVRKFLSLEP

SEQ ID NO: 10077 - protein, 1198 aa, Agrochola circellaris
MLTRSATRRARLLPPDSSLSSASPPPVPSPTVSAGTTPAAAVASSSSDEYFSPPTTPPPARRRGGHRPPVGLGPRGPPASDRVPAPGGSVQRMRWTQSINENVMRSYYGATEGGNNLTAYRVRMLSLFQVLEPAVNVSAQRLSDQVRVILRNHMLDDTVLDRLRSEMRNSHATAPPSQTVMVAPQFTINQVDEGIDDMATNVSTQYNEELRSALERAIREYRSMSPELRPRLPRLPMHNKNKALVAALDSQLSNYFDDCEDLTDTHSILYCAAVATCRVAHVKFANDSRATRPKPAVPAWQCRIERRIGGARALIGKLICFREGNTRPRVMRFVRRAFSGTDISPEDYVSRATERIDFLKQKVYAWANRIRRYKRRVERYTQNRTFQSDERRVYRAWEQPDQGVADARLPDDDAMCSFWRSIWSAPVSHTEGDWTREVERACDPIPEMGAITICPQDVARAVRPLPNWKSPGPDGLHNFWIKWFKRSHARLAAQYQTALESGSLPELLTTGVTHLLHKSGSTADPKNYRPITCLPTVYKVLTSILRAKINKHIDTNSIMSASQNGCRNGSRGTKELLLIDMAISQQVRRSRKDLSTCWIDYMKAYDSVPHTWLMRVLELYKVDATLRTFLLSCMGQWRTVLRYPGCRNIQRNSEPIRIERGIFQGDSLSPLWFCLALNPLSTLLEGSDLGYRLRRGGQVISHLLYMDDLKLFAPNNFQLMELLKVTETFSRAIRMEFGVDKCAVMHVKRGEIVESVGTQLTDSINFRALSASETYKYLGMSETLGINVTDMKQSLKERFFGRLKKVFNSFLSGGNKVRAFNGWVMPVLMYSFGVLKWTQTELDALDRRVRTLLTGYRMHHPRSSVMRLYIPRKCGGRGFLNAKTLHNREICSLREYFLEADVGMHRDVVAVDKGLTPLSLAKENWRKPAVLDTNDRKEVWQNKELHGRYFRALHGPDVDLLASVAWLRFGDLFGETEGFVCAIMDEVMMTNNYRRFIVKDGTVDICRACHRPGESIRHIISGCSRLANEEYLHRHNLVARIIHQQLALKYSLVESEVPYYRYVPDPVLESGHITLYWDRSIITDRSIVANKPDIVVVDRAERRTMIIDITVPHDGNLVKAEKDKQIKYLDLAREVVDMWDVDSAIIVPIVVSANGLIAKSLDQHLRRLSLGGWIKGLIQKAVLLDTARIVRRFLSLEP

SEQ ID NO: 10078 - protein, 1203 aa, Agrochola circellaris
MLTRSATRRARPPPPDSSLSSALPPPVSSPIISAVTTPVAGVASSSSDEYFSPPTSPTPVRRQGRGRPPRSLGLRGQPAPNRVPAAGGCVRRMRWTQNVNENVMRAYFGATEGGSNLTAYRGRMLSLFQVLEPAVNVSAQRLSDQVRVIQRNHMLDDAVLDRLRLESRNNRVTPASPLVAVQLQNSPSATPRADHVGEEDDDGVISVSSQCNARLRNALEDAFRDYRSTPPGFRPRLPRLPMHKKNKALVCTLDSLLSNYFDGSKDLADTHSILYCAAVAACRVAHVKFPSSDRAPRPKPAVPAWQCRIERRIGEARVLIGKLICFREGNTRPRVMRFVRRAFSGTDTSSRDYLTRVTERIDFLKQKICAWANRIRRYRRRVERYTQNRTFQSDERWVYRAWERLDQGVIDTRLPDDDAMCSFWRSIWSAPVNHTEGDWTGKIERACERIPEMGAITISPQDVACAVRPLPNWKSPGPDGLHNFWIKWFQRSHARLASQFQSALESGSLPQFLTTGITHLLHKSGSTAEPKNYRPITCLPTVYKVFTSILRTKINKHIDTNSIMSASQNGCKNGSRGTKELLLIDMAISQQVRRSRRDLSTCWIDYKKAYDSVPHTWLMRVLELYKVDATLRTFLISCMGQWRTVLRYPGCRQIQRNSEPIRIERGIFQGDSLSPLWFCLALNPLSTLLEDSGLGYRLRRGGQVISHLLYMDDLKLFAPNNLQLVELLKVTETFSSAIRMEFGVDKCAVMHVKRGGIVESGGTQLSDSIHLRSLSSIETYKYLGMSEALGINTADMKQSLRERFFNRLNKVLNSLLSGGNKVRAFNGWVMPVLMYSFGILKWTQTELDALDRRVRTLLTVNRMHHPRSSVMRLYIPRKCGGRGFLNAKTLHNREVCSLREYFLEADVGMHRDVVSVDKGLTPLSLANENWRKPIVLDTKDRREVWQSKELHGRFYRALHGPDVDLLASVSWLRFGDLFGETEGFVFAIMDEVMMTNNYRKYIVKDGTVDICRACHRPGESIRHIISGCSRLANGDYLHRHNLVARIIHQQLALKYSLVESEVPYYRYMPDPVLENGNITLYWDRSIITDRTIVANKPDIVVIDRLERRTMIIDIAVPHDENLVKAEKDKQIKYLDLAREVVDMWDVDTAVIVPIVVTANGIIAKSLDQHLRRLSLGSWIKGLIQKAVLLDTARIVRRFLSQEP

SEQ ID NO: 10079 - protein, 1198 aa, Agrochola circellaris
MLTRSATRRARLLPPDSSLSSASPPPVPSPTVSAGTTPAAAVASSSSDEYFSPPTTPPPARRRGGHRPPVGLGPRGPPASDRVPAPGGSVQRMRWTQSINENVMRSYYGATEGGNNLTAYRVRMLSLFQVLEPAVNVSAQRLSDQVRVILRNHMLDDTVLDRLRSEMRNSHATAPPSQTVMVAPQFTINQVDEGIDDMATNVSTQYNEELRSALERAIREYRSMSPELRPRLPRLPMHNKNRALVAALDSQLSNYFDDCEDLTDTHSILYCAAVAACRVAHVKFANDSRATRPKTAVPAWQCRIERRIGGARALIGKLICFREGNTRPRVMRFVRRAFSGTDISPEDYVSRATERIDFLKQKVYAWANRIRRYKRRVERYTQNRTFQSDERRVYRAWEQPDQGVADARLPDDDAMCSFWRSIWSAPVSHTEGDWTREVERACDPIPEMGAITICPQDVARAVRPLPNWKSPGPDGLHNFWIKWFKRSHARLAAQYQTALESGSLPEFLTTGVTHLLHKSGSTADPKNYRPITCLPTVYKVLTSILRAKINKHIDTNSIMSASQNGCRNGSRGTKELLLIDMTISQQVRRSRKDLSTCWIDYKKAYDSVPHTWLMRVLELYKVDATLRTFLLSCMGQWRTVLRYPGCRNIQRNSEPIRIERGIFQGDSLSPLWFCLALNPLSTLLEGSDLGYRLRRGGQVISHLLYMDDLKLFAPNNFQLMELLKVTETFSRAIRMEFGVDKCAVMHVKRGEIVESVGTQLTDSINFRALSASETYKYLGMSETLGINVTDMKQSLKERFFGRLKKVFNSFLSGGNKVRAFNGWVMPVLMYSFGVLKWTQTELDALDRRVRTLLTGYRMHHPRSSVMRLYIPRKCGGRGFLNAKTLHNREICSLREYFLEADVGMHRDVVAVDKGLTPLSLAKENWRKPAVLDTNDRKEVWQNKELHGRYFRALHGPDVDLLASVAWLRFGDLFGETEGFVCAIMDEVMMTNNYRRFIVKDGTVDICRACHRPGESIRHIISGCSRLANEEYLHRHNLVARIIHQQLALKYSLVESEVPYYRYVPDPVLESGHITLYWDRSIITDRSIVANKPDIVVVDRAERRTMIIDITVPHDGNLVKAEKDKQIKYLDLAREVVDMWDVDSAIIVPIVVSANGLIAKSLDQHLRRLSLGGWIKGLIQKAVLLDTARIVRRFLSLEP

SEQ ID NO: 10080 - protein, 1106 aa, Hydraecia micacea
MRWTRSINENVMRSYYGATEGGSNLTAYRVRMLSLFQVLEPAVNVSAQRLSDQVRVIQRNHMLDDTVLDRLRNEIQSSHAIAPQSQTAVILPQSNTSHADEGSNDRATNVSTQCNEELRSALEDAIQEYRSMSPELRPRLPRLPMHNKNRALVAVLNSQLSKYFDDCEDLTDAHSILYCAAVAACRVAHVKFTNDSRATRPKPAVPAWQCRIERRIGGARALIGKLICFREGNTRPRVMRFVRRAFLGTDISPQAYTSCVTERIDFLKQKVYAWANRIRRYKRRVERYAQNRTFQSDERWVYRDWERPDQSVADTCLPDDDAMCSFWRSIWSVPVSHTEGDWARDVERVCDPIPEMEAITICPQDVARAVRPLPNWKSPGPDGLHNFWIKWFSRSHARLASQFQTALESGSLPQFLTTGITHLLHKSGSTAEPKNYRPITCLPTVYKVLTSILRAKINKHIDTNFIMSASQNGCRNGSRGTKELLLIDMTISQQVRRFRKDLSTCWIDYKKAYDSVPHTWLMRVLELYKVDTTLRTFLMSCMGQWRTVLRYPGCRNIQRNSEPIRIERGIFQGDSLSPLWFCLALNPLSTLLEDSGLGYRLRRGGQVISHLLYMDDLKLFAPNNLQLMELLKVTQTFSNAIRMEFGVDKCAVMHVKRGEIVESVGNQLSDSTNLRALSASETYKYLGMSEALGINVTDMKQSLKERFFGRLKKVLNSLLSGGNKVRAFNGWVMPVLMYSFGILKWTQTELDALDRRVRTLLTANRMHHPRSSVMRLYIPRKCGGRGFLNSKTLHNREICSLREYFLETDVGMHRDVVMVDKGLTPLSLAKENWRKPVVLDTNDRMEVWQSKELHGRFFRALHGPDVDLLASVAWLRFGDLFGETEGFVCAIMDEVMMTNNYRRFIVKDGTVDICRACHRPGESIRHIISGCSRLANGEYLHRHNLVARIIHQQLALKYSLVESEVPYYRYVPDPVLENGNITLYWDRSIITDRTIIANKPDIVVVDRSERRAMIVDITVPHDENLVKAEKDKQIKYLDLAREVVDMWDVDSAIIVPIVVTANGLIAKSLDQHLRRLSLGSWIKGLIQKAVLLDTARIVRRFLSLEP

SEQ ID NO: 10081 - protein, 975 aa, Hydraecia micacea
MSPELRPRLPRLPMHNKNRALVAVLNSQLSKYFDDCEDLTDTHSILYCAAVAACRVAHVKFTNDSRATRPKPAVPAWQCRIERRIGGARALIGKLICFREGNTRPRVMRFVRRAFLGTDISPQDYTSCVTERIDFLKQKVYAWANRIRRYKRRVERYTQNRTFQSDERWVYRDWERPDQSVADTCLPDDDAMCSFWRSIWSVPVSHTEGDWARDVERACDPIPEMEAITICPQDVARAVRPLPNWKSPGPDGLHNFWIKWFSRSHARLASQFQTALESGSLPQFLTTGITHLLHKSGSTAEPKNYRPITCLPTVYKVLTSILRAKINKHIDTNFIMSASQNGCRNGSRGTKELLLIDMTISQQVRRFRKDLSTCWIDYKKAYDSVPHTWLMRVLELYKVDTTLRTFLMSCMGQWRTVLRYPGCRNIQRNSEPIRIERGIFQGDSLSPLWFCLALNPLSTLLEDSGLGYRLRRGGQVISHLLYMDDLKLFAPNNLQLMELLKVTQTFSNAIRMEFGVDKCAVMHVKRGEIVESVGNQLSDSTNLRALSASETYKYLGMSEALGINVTDMKQSLKERFFGRLKKVLNSLLSGGNKVRAFNGWVMPVLMYSFGILKWTQTELDALDRRVRTLLTANRMHHPRSSVMRLYIPRKCGGRGFLNSKTLHNREICSLREYFLETDVGMHRDVVMVDKGLTPLSLAKENWRKPVVLDTNDRMEVWQSKELHGRFFRALHGPDVDLLASVAWLRFGDLFGETEGFVCAIMDEVMMTNNYRRFIVKDGTVDISRACHRPGESIRHIISGCSRLANGEYLHRHNLVARIIHQQLALKYSLVESEVPYYRYVPDPVLENGNITLYWDRSIITDRTIVANKPDIVVVDRSERRAMIVDITVPHDENLVKAEKDKQIKYLDLAREVVDMWDVDSAIIVPIVVTANGLIAKSLDQHLRRLSLASWIKGLIQKAVLLDTARIVRRFLSLEP

SEQ ID NO: 10082 - protein, 1203 aa, Hydraecia micacea
MLTRSRARRLPTTHPTSSGSSLSSASQLPEPAPDVSPISPAAAVASSSSDEYFSPPTTPPPVCRRGRGRPPASLGLRGPPASERVPAPGGSVQRMRWTQTVNENVMRAYFGATEGGSNLTAYRGRMLSLFQVLEPAVNVSAQRLSDQVRVIQRNHMLDNVVLDRLRLESRNSHVTPASSLVAVQLQPSVPLRPDCVDVEDDDEAISVSSQCNARLRSALEDAFREYRSIPPGLRPRLPRLPMHKKNKALVCALDSQLSNCFNDSKDLADTHSILYCAAVAACRVAHVKFPNSDRAPRPKPAVPAWQCRIECRIGEARALIGKLICFREGNTRPRVMRFVRRAFSGTNISSRDYLSRVTERIDFLKQKICAWANRIRRYRRRVERYTQNRRFQSDERWVYRAWERPDQGVTDTRLPDDDAMCSFWRNIWSVPVSHTEGDWTGKIERACDLIPEMEALIISPQDVARAVRPLPNWKSPGPDGLHNFWIKWFKRSHDRLASQFQSALESGSLPQFLTTGITHLLYKSGSTADPKNYRPITCLPTVYKVLTSILRTKINKHIDTNSIMSVSQNGCKNGSRGTKELLLIDMTINQQVRRSRKDLSTCWIDYKKAYDSVPHTWLMRVLELYKVDTTLCTFLMSCMGQWRTVLRYPGCRNIQRNSEPIRIERGIFQGDSLSPLWFCLALNPLSTLLEDSGLGYRLRRGGQVISHLLYMDDLKLFAPNNLQLMELLKITETFSSAIRMEFGVDKCAVMHVKRGEIVESVGNQLSDSTNLRALSASDTYKYLGMSEALGINVTDMKQSLKERFFGRLKKVFNSLLSGGNKVRAFNDWVMPVLMYSFGILKWTQTELDALDRKVRTLLTANRMHHPRSSVMRLYIPRKCGGRGFLNAKTLHNREICSLREYFLETDVGMHRDVVVVDNGLTPLSLGKENWRKPVVLDTNDRMEVWQSKELHGRFFRALHGPDVDLLASVAWLRFGDLFGETEGFVCAIMDEVMMTNNYRRFIVKDGTVDICRACHRPGESIRHIISGCSRLANGEYLHRHNLVARIIHQQLALKYSLVESEVPYYRYVPDPVLENGNITLYWDRSIITDRTIVANKPDIVVMDRLERRAMIVDITIPHDENLVKAEKDKQIKYLDLAREVVDMWDVDSAIIVPIVVTANGLIAKSLDQHLRRLSLASWIKGLIQKAVLLDTARIVRRFLSLEP

SEQ ID NO: 10083 - protein, 1203 aa, Hydraecia micacea
MLTRSRARRLPTTHPTSSGSSLSSASQLPEPAPDVSPVSPAAAVASSSSDEYFSPPTTPPPVCRRGRGRPPASLGLRGPPASERVPAPGGSVQRMRWTQTVNENVMRAYFGATEGGSNLTAYRGRMLSLFQVLEPAVNVSAQRLSDQVRVIQRNHMLDNVVLDRLRLESRNSHVTPASSLVAVQLQPSVPLRPDCVDVEDDDEAISVSSQCNARLRSALEDAFREYRSIPPGLRPRLPRLPMHKKNKALVCALDSQLSNCFNDSKDLADTHSILYCAAVAACRVAHVKFPNSDRAPRPKPAVPAWQCRIECRIGEARALIGKLICFREGNTRPRVMRFVRRAFSGTDISSRDYLSRVTERIDFLKQKICAWANRIRRYRRRVERYTQNRRFQSDERWVYRAWERPDQGVTDTRLPDDDAMCSFWRNIWSVPVSHTEGDWTGKIERACDLIPEMEALIISPQDVARAVRPLPNWKSPGPDGLHNFWIKWFKRSHDRLASQFQSALESGSLPQFLTTGITHLLYKSGSTADPKNYRPITCLPTVYKVLTSILRTKINKHIDTNSIMSVSQNGCKNGSRGTKELLLIDMTINQQVRRSRKDLSTCWIDYKKAYDSVPHTWLMRVLELYKVDTTLCTFLMSCMGQWRTVLRYPGCRNIQRNSEPIRIERGIFQGDSLSPLWFCLALNPLSTLLEDSGLGYRLRRGGQVISHLLYMDDLKLFAPNNLQLMELLKITETFSSAIRMEFGVDKCAVMHVKRGEIVESVGNQLSDSTNLRALSASDTYKYLGMSEALGINVTDMKQSLKERFFGRLKKVFNSLLSGGNKVRAFNDWVMPVLMYSFGILKWTQTELDALDRKVRTLLTANRMHHPRSSVMRLYIPRKCGGRGFLNAKTLHNREICSLREYFLETDVGMHRDVVVVDNGLTPLSLGKENWRKPVVLDTNDRMEVWQSKELHGRFFRALHGPDVDLLASVAWLRFGDLFGETEGFVCAIMDEVMMTNNYRRFIVKDGTVDICRACHRPGESIRHIISGCSRLANGEYLHRHNLVARIIHQQLALKYSLVESEVPYYRYVPDPVLENGNITLYWDRSIITDRTIVANKPDIVVMDRLERRAMIVDITIPHDENLVKAEKDKQIKYLDLAREVVDMWDVDSAIIVPIVVTANGLIAKSLDQHLRRLSLASWIKGLIQKAVLLDTARIVRRFLSLEP

SEQ ID NO: 10084 - protein, 1037 aa, Amphipyra tragopoginis
MQNSHAAPLLSQIRTQTLVPPAVPLESNYADEEGEDRAISAGTQYSEIMRSALEDALREFRSTPPELRPRLPRLPMHNKNRALVCALDSLLPNVFESSEDLGDTQSILYCAAVAACRVAHVKFPNDNRATRPKSAVPAWQCRIERRIDEARVLIGKLTCFREGNRRPRVMRFVRRAFSGTDIGPGEYASRVTERIDFLKQKVYAWANRIRRYRRRVDRYTQNRIFQSDQRWVYRTWERPDQGVSDTHLPDNDVMNAFWRNIWSVPVTHTEGDWMQEVQRACEPIQEMGAVTIGPQDVTSAVRPMPNWKSPGPDGLHNFWIKWLRSSHARLASQFQSSLESGSLPAFLTTGITHLLFKSGSTAEPKNYRPITCLPTVYKLLTSILRAKLNHHIDSNAIMCATQNGCKNGSRGTKELLLIDMAISQQVRRSRKDLSTCWIDYKKAYDSVPHTWLMRVMELYKVNATLRTFLMSCMGQWRTVLHYPGCRQIQGNGELIRIERGIFQGDSLSPLWFCLALNPLSTLLEGSGLGYRLRRGGQVISHLLYMDDLKLFAPNNLQLVELLKVTETFSNSIRMEFGVDKCAVMHVKRGRIMESVGTQLSDSIHLRSLSSTETYKYLGMSEALGINEADMKQSLRERFFGRLIKVLKSLLSGGNKVRAFNGWVMPVLMYSFGILRWTQTELDALDRRVRTLLTAYRMHHPRSSVMRLYIPRKCGGRGFLNAKTLHNREVCSLREYFSQADVGMHRDVVAVDKGLTPLSLAKENWRKPVVLDAKGRMEVWRSKELHGRFYRALHGPDVDFLASVAWLRFGDLFGETEGFVCAIMDEVMMTNNYRKYIVKDGTFDICRACHCPGESIRHIVSGCSRLANGEYLHRHNLVARIIHQQLALKYNLVDTEVPYYKYVPDPVLENGHVTLYWDRSIITDRTIVANKPDIVVIDRLERRTMIVDITVPHDENLVKAENDKKIKYLDLAHEVVDMWDVDSAVIVPIVVTANGLIAKSLDQHLMRLSLGSWIKGLIQKAVLLDTARIVRKFLSLEP

SEQ ID NO: 10085 - protein, 1207 aa, Amphipyra tragopoginis
MLTRSRAKTLQRTHPTPSASSLSSASQPPEPASIVSDVTPAAAVASSSSDEYFSPATSPSPPPARRRGRGRPPTCLGPRGPPASDRVPAPGGSVQRMRWTQSMNENCMRAYFGATEGGTNLTAYRGRMLSLFRTLEPAVNVSAQRLSDQVRVIQRDHRLDDAALGRLRDEMQNSHATPPPSQIRTQPLVPPAVPLQPNHADEEEQDRAISAGTQYSEIMRSALEDALREFRSTPPELRPRLPRLPMHNKNRALVCALDSLLSNVLESSKDIGDTHSILYCAAVAACRVAHVKFPNDNRATRPKSTVPAWQCRIERRIDEARVLIGKLTCFREGNIRPRVMRFVRRAFSGTDVSPGEYVSRVTERIDFLKQKVYAWANRIRRYRRRVDRYTQNRIFQSDQRWVYRTWERPDQGVSDTHLPDNDVMNAFWRNIWSVPVTHTEGDWMQEVQRACEPIQEMGAVTIGPQDVTSAVRPMPNWKSPGPDGLHNFWIKWLRSSHARLASQFQSSLESGSLPSFLTTGVTHLLFKSGSTAEPKNYRPITCLPTVYKLLTSILRAKINNHIDNNAIMSDSQNGCGNGSRGTKELLLIDMAISQQVRRSRKDLSTCWIDYKKAYDSVPHTWLMRVLELYKINATLRTFLMSCMGQWRTVLHYPGCRQIQGNGELIRIERGIFQGDSLSPLWFCLALNPLSTLLEGSGLGYRLRRGGQVISHLLYMDDLKLFAPNNLQLVELLKVTETFSNSIRMEFGVDKCAVMHVKRGRIMESVGTQLSDAIHLRSLSSTETYKYLGMSEALGINEADMKQSLKERFFGRLIKVLKSLLSGGNKVRAFNGWVMPVLMYSFGILRWTQTELDALDRRVRTLLTAYRMHHPRSSVMRLYIPRKCGGRGFLNAKTLHNREVCSLREYFSQADVGMHRDVVAVDKGLTPLSLAKENWRKPVVLDTNGRREVWRSKELHGRFYRALHGPDVDFLASVAWLRFGDLFGETEGFVCAIMDEVMMTNNYRKYIVKDGTVDICRACHCPGESIRHIVSGCSRLANGEYLHRHNLVARIIHQQLALKYNLVDTEVPYYKYVPDPVLENGHVTLYWDRSIITDRTIVANKPDIVVIDRLERRTVIVDIAVPHDENLVKAENDKKIKYLDLAHEVVDMWDVDSAVIVPIVVTANGLIAKSLDQHLMRLSLGSWIKGLIQKAVLLDTARIVRKFLSLEP

SEQ ID NO: 10086 - protein, 1201 aa, Amphipyra tragopoginis
MLTRSRSRIARPPPPDSPLSSASQPLESSPTVSAVTPAAAVASSSSDEYFSPPTSPTPVRRQGRRRPPNSLGPRGPPAPSRVLATGGCVQRMKWTQKINENVMRAYYGSTEGGTNLTAYRVRMLTLFQELEPAINVSAQRLSDQVRVIQRNHRLDDAALDRLRSEVQNSRVTPIPSQTAVHQVNISVVPPRSDSVDGDMDGRAVTVCSQYNDRLRSALEDAIREYRANPELRPRLPRLPMHNKNRALVCALDSLLSSYFESSEDLGDTHSILYCAAVAACRVANVKFNNSERATRPKPAVPAWQCRIGRRIDGARALIGKLICFREGNTRPRVMRFVRRAFSGTGISPREYMSRVTERIDFLKQKVCAWASRIRRYKCRVERYAQNRMFQCDQRWVYRAWERPDQGVSDGRLPDDEAMSSFWRSIWSVPVTHTEGDWMRDIERACEPIEEMGEILISPQDVASAARPLPNWKSPGPDGLHNFWIKWLRSSHARLASQFQSSLESGSLPQFLTTGVTHLLHKSGSTAEPKNYRPITCLPTVYKLLTSILRSKINTHIENNSVMSSSQNGCGNGSRGTKELLLIDMAISQQVRRSRKNLSTCWIDYKKAYDSVPHTWLTRVLELYKINATLRTFLTSCMGQWRTVLRYPGCRQIRGSGEPIRIERGIFQGDSLSPLWFCLALNPLSTLLEGSGLGYPLRRGGQVVSHLLYMDDLKLFAPTKLQLVELLKVTETFSNSIRMEFGVDKCAVMHVRRGGIMESEGLQLSDSIHLRSLSANDTYKYLGMSEGLGISEADMKQSLKERFFGRLKKVLKSLLSGGNKVRAFNGWVMPVLMYSFGILKWTQTELDALDRRVRTLLTANRMHHPRSSVMRLYIPRKCGGRGLLNAKTLHNREVCSLREYFLHADAGMHRDVVAVDKGLTPLSLAKENWRKPVVLSTNDRREVWQSKELHGRFYRALHGPDVDFLASVSWLRFGDLFGETEGFVCAIMDEVIMTNNYRKYIVKDGTVDICRACHCPGESLRHIISGCSRLANGEYLHRHNQVARIIHQQLALKYNLVESEVPYYKYVPDPVLEKGHITLYWDRSIITDRTIVANKPDIVVIDRSERRTMIVDVTIPHDENLVKAEKDKQIKYLDLAHEVVSMWDVESATIVPIVVTANGLMAKSLDQHLKRLSLGGWIKGLIQKAVLLDTARIVRRFLSLEP

SEQ ID NO: 10087 - protein, 1197 aa, Noctua pronuba
MLTRAAARRARLSPPDPSLSSASPLPESSPIVSAVTPAVAVASSSSDEYFSPPTTPPPVRRRRGRRPPDGLGPRGPPASDRVPALGGSVQRMRWTQSINENVMRSYYGATEGGNNRTAYRVRMLSLFQVLEPAVNVSAQRLSDQVRVIQRNRMLDDTVLDRLRTEMQSSHVITPSAQAVVLPQSNTIPNRANDESNDMVTNVSTQCNEEIRSALEGAIREYRSMQPDLRPRIPRLPMHNKNRALVAVLDSQLSNYFDNCEDLTDAHSILYCAAVAACRIAHVKFSDDRATRPKPAVPAWQYRIERRIGGARALIGKLICFREGNTRPRVMRFVRRAFSGTDISPRDYMSRVTERIDFLKQKVYAWANRIRRYKRRVDRYTQNRTFQRDERWVYRAWERPDQGVADTRLPDDDAMCSFWRSIWSVPVSHTEDEWTREVERACDPVQEMGAITISPQDVVCAVRPLPNWKSPGPDGLHNFWIKWFTRSHARLATLFQSALESGSLPEFLTTGITHLLHKSGSTAEPKNYRPITCLPTVYKVLTSILRTKISKHINDNSIMSPSQNGCRNGSRGTKELLLIDMAISQQVRRFRRDLSTCWIDYKKAYDSVPHTWLMRVLELYKVDTTLRTFLMSCMGQWRTVLRYPGCRQIQRDSEPIRIERGIFQGDSLSPLWFCLALNPLSTLLEDSGLGYRLRRGGQVISHLLYMDDLKLFAPNDLQLMELLKVTETFSSAIRMEFGVDKCAVMHVKRGEIVESVRTQLSDSINLRSLSATETYKYLGMSEALGINVADMKQSLKERFFGRLKKVFNSLLSGGNKVRAFNGWVMPVLMYSFGILKWTQTELDALDRRVRTLLTAYRMHHPRSSVMRLYIPRRCGGRGFLNAKTLHNREICSLREYFLEADVGMHRDVVAVDKGLTPLSLAKENWRKPVVLDTNDRREVWQSKELHGRFFRALHGPDVDLSASVAWLRSGDLFGETEGFVCAIMDEVMMTNNYRRFIVKDGTVDICRACHRPGESIRHIISGCSRLANGEYLHRHNLVARIIHQQLALKYNLVESEVPYYKYVPDPVLENGCVTLYWDRSIITDRTIVANKPDIVVVDRSERRAMIVDITVPHDENLVKAEKDKQIKYLDLAHEVVDLWDVDSAIIVPIVVSAHGLIAKSFDQHLRRLSLGSWIKGLIQKAVLLDTARIVRRFLSLEP

SEQ ID NO: 10088 - protein, 1207 aa, Noctua pronuba
MSPMLTRRRAKLLETHPPSPGSSLSSASQPPGRATSVSAASPVAAVASSSSDEFFSPPSTPPSPRRRGRRPPAGLGPRGQQAPNRVPATGGNVSRIRWTQSMNENVMRAYYGATEGGINLTAYRCRMLSLFQALEPAVNVSAQRLSDQVRVIQNNHRLDDATLDRLRSELRISPASNPLPSQNVTHVPAALPLRANQHAEEEDDRAVSADNLCNEELRSALEDAIREYRFTSPDLRPRLPRLPMNKKNRALVCALDALLPNFIASSANLCDTHSILYCTAVAACRVANVKFPNTDSATRPKSAVPVWQCRIERRINEARALIGKLICFREGNTRPRVMRFVRRAFSGTDISPREYMSRVTERIDFLKQKVYAWANRIRRYRRRVDRYTQNRMFQSDERWVYRIWERPVTIQGVTDTHLPDNDAMSAFWRSIWSVPVSHTEGDWMRVVEQACDSIPEMEAISISPLDVARAVRPLPNWKSPGPDGLHNFWIKWLQRSHACLASQFQSSLETGSLPSFFTTGVTHLLHKSGSTAEPKNYRPITCLPTVYKVLTSILRAKIVRHIDNNSIMSVSQNGCRNGSRGTKELLLIDMAISQQVRRSRRDLSTCWIDYKKAYDSVPHTWLRRVLELYKIDATLRTFLVSCMGQWSTVLLYPGCRQVLGNDEPIRIERGIFQGDSLSPLWFCLALNPLSTLLEDSGLGYRLKRGGQVISHLLYMDDLKIFAPSNLQLMELLKVTETFSSAIRMEFGVDKCAVMHVKRGEIMESVGTQLSDSIYLRSLSSTETYKYLGMSEALGINATDMKQSLKERFFGRLNKVLKSLLSGGNKVRAFNGWVMPVLMYSYGILKWTQTELDALDRKVRTLLTANRMHHPRSSVMRLYIPRKCGGRGFLNAKTLHNREVCSLREYFLETDVGMHRDVVSVDKGLTPLSLANENWRKPVVLDTNDRKEVWQSKELHGRFFRALHGPDVDLLASVSWLRFGDLFGETEGFVCAIMDEVIMTNNYRKYIVKDGTVDICRACHRPGESIRHIVSGCSRLANGEYLHRHNLVARIIHQQLALQYNLVGTEVPYYKYVPDPVLENGHATLYWDRSIITDRTILANKPDIVVIDRRERRAMIVDITVPHDENLVKAENDKKIKYLDLAHEVVDMWDVDSAIIVPIVVTVNGLIAKSLDQHLRRLSLRGWVKGLIQKAVLLDTARIVRRFLSLEP

SEQ ID NO: 10089 - protein, 1187 aa, Tinea trinotella
MLFIIIIMIIIIIIIIIIIIIINIISVAAVASSSSDECFSPPMTPPSASRRGGGRPPASLEPRGPSASGGVPATSGRVQRMRWTQSINENVMRSYFGATEGGSSLTAYRGRMLTLFQVLEPAVNVSAQRLSDQVRVIQRNRMLDDVVLDRLRLESRSSHVSPVSPPVAVQLQPSALPRPNNIEENDDDVTISVSNQYNEQLRSALEDAFREYRSTPPGLRPRIPRLPMHKKNRALVCALDSQLVNHFKSSKDLADTHSILYCAAVAVCRVAHVQFPNNDRAARLAVPAWQCRIERRIGEARALIGKLISFREGNTRPRVMRFVRRAFSGTDISSRDYQTRVTERIDFLKQKIYAWANRIRRYKRRVERYTQNRTFQSNERWVYRAWERPDQDVSDMCLPDDDAMSLFWRNIWSVPVGHTEGEWTREVERACDLIPEMGAIIISPQDVACAVRPLSNWKSPGLDGLHNFWIKYFQRSHARLAAQFQSALELGSLPQFLTTGITHLLHKSGSTAEPKNYRPITCLPTVYKVLTSILRAKIDKHIDTNCIMSASQNGCRSGSRGTKELLLIDVAISQQVRRSRRDLSTCWIDYKKAYDSVPHTWLMRVLELYKVDAALRTFLVSCMGQWRTVLHYPGCRRILGNGEPIKIERGIFQGDSLSPLWFCLALNPLSTLLDGSGQGYRLRRDGQVISHLLYMDDLKLFAPNNLQLMKLLKVTETFSSAISMEFGVDKCAIMHVKRGEIMESVGTQLSDSIHLRSLCSTETYKYLGMSEALGINAVDVKQSLRDRFFGRLNKVLNSLLSGGNKVRAFNGWVMPVLMYSFGILKWTQTELDALDRRVRTLLTANRMHHPRSSVMRLYIPRKCGGRGFLNAKTLHNREVCSLREYFLKTDVGMHRDVVAVDKGLTSLSLANENWRKPVVLDANDRREVWQSKELHGRFYRALHGPDVDFLASVSWLRFGDLFGETEGFVCAIMDEVMMTNNYRKYIVKDGTVDICRVCHRPGESIRHIISGCSRLANGDYLHRHNLVARIIHQQLALKYNLVESEVPYYRYVPDPVLENGNITLYWDRSIITDRTIVANKPDIVVIDRLERRTIIVDVAVPHDENLVKAEKDKQIKYLDLAREVVDMWEVDTAIIVPIVVTANGLIAKSLDEHLKRLSLGSWIKRLIQKAVLLDTARIVRRFLSQEP

SEQ ID NO: 10090 - protein, 1221 aa, Tinea trinotella
MLHQTQTVYKLHKQYDLGRKKMLTRSRARHQSAQLTSSGSSLSSASQPPGYTPTVSSVISVAAVASSSSDECFSPPTTPPSARRRGRGRPPASLEPRGPSASGGVPATSGRVQRMRWTQSINENVMRSYFGATEGGSSLTAYRGRMLTLFQVLEPAVNVSAQRLSDQVRVIQRNRMLDDVVLDRLSLESRSNHVSPVSPPVAVQLQPSALPRPNNIEENDDDVTISVSNQYNEQLRNALEDAFREYRSTPPGLRPRIPRLPMHKKNRALVCALDSQLANHFESSKDLADTHSILYCAAVAVCRVAHVKFPNDDRAARLAVPAWQCRIERRIGEARALIGKLISFREGNTRPRVMRFVRRAFSGTDISSQDYQTRVTERIDFLKQKIYAWASRIRRYKRRVERYTQNRTFQSNERWVYRAWERPDQDVSDTCLPDDDAMSLFWRNIWSVPVGHTEGEWTREVERACDLIPEMGAINISPQDVACAVRPLPNWKSPGHDGLHNFWIKCFQRSHARLAAQFQSALELGSLPQFLTTGITHLLHKSGSTAEPKNYRPITCLPTVYKVLTSILRAKINKHIDTNCIMSASQNGCRSGSRGTKELLLIDVAISQQVRRSRRDLSTCWIDYKKAYDSVPHTWLTRVLELYKVDAALRTFLVSCMGQWRTVLYYPGCRRILGNGEPIKIERGIFQGDSLSPLWFCLALNPLSTLLDGSGQGYRLRRDGQVISHLLYMDDLKLFAPNNLQLMKLLKVTETFSSAISMEFGVDKCAIMHVKRGEIMESVGTQLSDSIHLRSLCSTETYKYLGMSEALGINAVDVKQSLKDRFFGRLNKVLNSLLSGGNKVRAFNGWVMPVLMYSFGILKWTQTELDALDRRVRTLLTANRMHHPRSSVMRLYIPRKCGGRGFLNAKTLHNREVCSLREYFLKTDVGMHRDVVAVDKGLTSLSLANENWRKPVVLDTNDRREVWQSKELHGRFFRALHGPDVDFLASVSWLRFGDLFGETEGFVCAIMDEVMMTNNYRKYIVKDGTVDICRACHRPGESIRHIISGCSRLANGDYLHRHNLVARIIHQQLALKYNLVESEVPYYRYVPDPVLENGNITLYWDRSIITDRTIVANKPDIWVIDRLERRTIIVDVAVPHDENLVKAEKDKQIKYLDLAREVVDMWEVDTAIIVPIVVTANGLIAKSLDEYLKRLSLGSWIKRLIQKAVLLDTARIVRRFLSQEP

SEQ ID NO: 10091 - protein, 1200 aa, Tinea trinotella
MLTRSRARNQSAQLTSSGSSLSSASQPPGSTPTVSQVISVAAVASSSSDECFSPPTTPPSAHRRGGGRPPASLEPRGPSASGGVPATSGRVQRMRWTQSINENVMRSYFGATEGGSSLTAYRGRMLTLFQVLEPAVNVSAQRLSDQVRVIQRNRMLDDVVLDRLRLESRSSHVSPVSPPVAVQLQPSALPRPNNIEENDDDVTISVSNQYNEQLRSALEDAFREYRSTPPGLRPRIPRLPMHKKNRALVCALDSQLVNHFKSSKDLADTLSILYCAAVAVCRVAHVKFPNNDRAARLAVPAWQCRIERRIGEARALIGKLISFREGNTRPRVMRFVRRAFSGTDISSRDYQTRVTERIDFLKQKIYAWANRIRRYKRRVERYTQNRTFQSNERWVYRAWERPDQDVSDMCLPDDDAMSLFWRNIWSVPVGHTEGEWTREVERACDFIPEMGAIIISPQDVACAVRPLSNWKSPGLDGLHNFWIKCFQRSHARLAAQFQSALELGSLPQFLTTGITHLLHKSGSTAEPKNYRPITCLPTVYKVLTSILRAKIDKHIDTNCIMSASQNGCRSGSRGTKELLLIDVAISQQVRRSRRDLSTCWIDYKKAYDSVPHTWLMRVLELYKVDAALRTFLVSCMGQWRTVLHYPGCRRILGNGEPIKIERGIFQGDSLSPLWFCLALNPLSTLLDGSGQGYRLRRDGQVISHLLYMDDLKLFAPNNLQLMKLLKVTETFSSAISMEFGVDKCAIMHVKRGEIMESVGTQLSDSIHLRSLCSTETYKYLGMSETLGINAVDVKQSLRDRFFGRLNKVLNSLLSGGNKVRAFNGWVMPVLMYSFGILKWTQTELDALDRRVRTLLTANRMHHPRSSVMRLYIPRKCGGRGFLNAKTLHNREVCSLREYFLKTDVGMHRDVVAVDKGLTSLSLANENWRKPVVLDANDRREVWQSKELHGRFYRALHGPDVDFLASVSWLRFGDLFGETEGFVCAIMDEVMMTNNYRKYIVKDGTVDICRACHRPGESIRHIISGCSRLANGDYLHRHNLAARIIHQQLALKYNLVESEVPYYRYVPDPVLENGNITLYWDRSIITDRTIVANKPDIVVIDRLERRTIIVDVAVPHDENLVKAEKDKQIKYLDLAREVVDMWEVDTAIIVPIVVTANGLIAKSLDEHLKRLSLGSWIKRLIQKAVLLDTARIVRRFLSQEP

SEQ ID NO: 10092 - protein, 1199 aa, Spilosoma lubricipeda
MLTRARSRAQLLTPDSSLRSALPSSDARTEVPTVAEASSSSSSDEFFSPPTSPTPVRRQERYRPPDSLGPRGPLTSNRAPAAGGNVRRMKWTHSINENVMRAYFRATELGTNLTAYRVRLVSLFQELEPAVNVSAQRLSDQVRAIQRCHLLDDAVLERIRSDIRNSLAVPSSSHVVDTIVNTTSQLPRSEYIDELVDSEIISVSTQCNDTIRSTLEDAIREYRYVDSNNRPRLSRLPIHKRNLALVSALDSLLPDYFNNSEDLSDTHSILYCAAIAVCRVAGVNFVECKTATRPKNTVPAWQCRIERRIAGTRTLIGKLISFRSGNTRPKVMRFVKQAFLGTTVSPQQYMSCVTERIDFLKQKVYAWANRIRRYRKRTDRYNQNRTFQRNEKWVYQKWEKLSPCMSDEHLPDKNATNYFWRNIWSTPVAHTEGHWCRDVERSCESITPMEPVRIDKEDVSCAVRSLANWKAPGPDGLHNFWLKWFRSSHAYLASQFQTALDSGSLPQFLTTGITHLLHKSGSTMDPKNFRPITCLPTLYKLLTSILRLKITTHINNNSIISVSQNGCRSGTRGTKELLIIDMTISQQVRRNRKSLATCWIDYKKAYDSVPHTWLLRVLELYKIDTTLCTFLKSCMGQWRTVLRYPGCRQSTMNDVLIKIERGIFQGDSLSPLWFCLALNPLSTLLEGSGIGYRLQKDDRVISHLLYMDDLKLLAPTKLQLTALLKVTENFSNSIKMEFGVDKCAVMYVKKGLIVESGGVELSDSTKLRSLSATETYKYLGFSHSCGMPESDVKQMLRERFFGRLKKVLKSLLSGGNKVRAYNSWVMPVLMYSFGILRWTQTELDAFDRRVRTLLTAFRMHHPRSSVMRLYIPRKFGGRGLLNIKTLHNREIYNLREYFLHTDVEMHRNVVAVDTGLTPLALAKENWRKPVVLSTNDRREVWKGKELHGRFYRALNGPDIDFKASTSWLRYGDLFGETEGFVCAIMDEVIMTNNYRKYILKDGTVDICRACHRPGESIRHIISGCSRLANGEYLHRHNQVARIVHQQLALKYHLVNSEVPYYRYVPDPVLENGRATLYWDQSIITDRTIVANKPDIVVIDRLERRAMIVDIAVPHDENLVKAEKEKQIKYLDLSHEIVDMWNVDSAIIVPIVVSAHGLIARSLDQHLKRLTLDGWIKGLMQKAVLLDTARIVRRFLSLEP

SEQ ID NO: 10093 - protein, 1200 aa, Ochropleura plecta
MKMITRSAARRDARLPPPGPSLSSASPPPEPSLVVSAVTPAVAVASSSSDEYFSPPTTPPPARRRGGRRLPDGLGLRGPPASDRVPAPGGNVQRMRWTSSINENVMRSYYGATEGGNNLTAYRVRMLSLFQVLEPAVNVSAQRLSDQVRVIQRNRMLDDTVLDRLLTEMQSSQVITSSSQAVVPPQSHQLVSRADEVSNDMATNVSTQCSEEMRSALEGAIREYRYISPELRPRLPRLPMHNKNRMLVAVLDSQLSNYFDNCENLTDAHSLLYCAAVAACRVAHVKFPDDRATRSKPAVPVWQYRIERRIGVARALIGKLICFREGNTRPRVMRFVRRAFAETDISPSDYMSRITERIDFLKQKVYAWANRIRRYKRRVERYTLNRTFQSDERWVYRAWERPDQDVSDMRLPDDDAMCSFWRSIWSVPVSHTEGERTREVERACDPIPEMGAITISPQDVACAVRPLPNWKSPGPDGLHNFWLKWIQRSHARLATLFQTALESGSLPKFLTTGITHLLHKSGSTVEPKNYRPITCLPTIYKVLTSILRAKITKHIDDNSIMSASQNGCRNGSRGTKELLLIDMAISQQVRRSRRHLSTCWIDYKKAYDSVPHTWLMRVLELYKIDATLRTFLISCMRQWSTVLRYPGCRQIQRNSEPIRIERGIFQGDSLSPLWFCLALNPLSTLLENSGLGYRLRRGGQVISHLLYMDDLKLFAPNDLQLMELLKVTETFSSSIRMEFGVDKCAVMHVKRGEIVESVGTQLSDSINLRSLSATETYKYLGMSEALGINVADMKQSLKERFFGRLRKVFNSLLSGGNKVRAFNGWVMPVLMYSFGILKWTQTELDALDRKVRTLLTAFRMHHPRSSVMRLYIPRSCGGRGFLNAKTLHNREICSLREYFLETDVGMHRDVVAVDKGLTPLSLAKENWRKPVVLDTNDRREVWQSKELHGRFFRALHGPDVDQPASVAWLRAGDLFGETEGFVCAIMDEVMMTNNYRRFIVKDGTVDICRACHRPGESIRHIISGCSRLANGEYLHRHNLVARIIHQQLALKYSLVESEVPYYRYEPDPVLEHGNITLYWDRSIITDRTIVANKPDIVVVDRSERRAMIVDITVPHDENLMKAEKDKQIKYIDLAREVVDMWDVDLAIIVPIVVSANGLIAKSLDQHLRRLSLGSWIKGLIQKAVLLDTARIVRRFLSLEP

SEQ ID NO: 10094 - protein, 1198 aa, Ochropleura plecta
MLTRAAQARNARHPPPGSSLSSASPPPEPSLVVSAVTPAVAVASSSSDEYFSPPTTPPPVRRRGRHRPPDGLGPRGPPASDRVPAPGGSVQRMRWTQSINENVMRSYYGATEGGNNLTAYRVRMLSLFQVLEPAVNVSAQRLSDQVRVIQRNRMLDDTVLDRLRTEMQSSQVITSSSQAVVPPQPHQLINRVNEVSNDVATNVSTQCSEEMRSTLEGAIREYRYISPELRPRLPRLPMHNKNRALVAALDSQLSSYFDNCENLTDAHSILYCAAVTVCRVAHVKFPDDRATRPKPAIPFWQCRIERRIGAARALIGKLTCFREGNTRPRVMRFVRRAFAGTDISPPDYISRIAERIDFLKQKVYAWANRIRRYKRRVERYTQNRTFQSDERWVYRAWERPDQGVSDTRLPDDDAMSLFWRSIWSVPVSHTEGEWTREVERACDPIPEMGALTISPQDVACAVRPLPNWKSPGPDGLHNFWIKWIQRSHVRLAALFQSALESGSLPKFLTTGITHLLHKSGSTAEPKNYRPITCLPTLYKVLTSILRAKITKHIDDNSIMSASQNGCRNGSRGTKELLLIDMAISQQVRRSRRHLSTCWIDYKKAYDSVPHTWLMRVLDLYKIDATLRTFLISCMRQWSTVLRYPGCRQIQRNSEPIRIERGIFQGDSLSPLWFCLALNPLSTLLENSGLGYRLKRGGQVISHLLYMDDLKLFAPNDLQLMELLKVTETFSSAIRMEFGVDKCAVMHVKRGEIVESVGTQLSDSINLRSLSATETYKYLGMSEALGINVADMKQLLKERFFGRLRKVFNSLLSGGNKVRAFNGWVMPVLMYSFGILKWTQTELDALDRKVRTLLTAFRMHHPRSSVMRLYIPRSCGGRGFLNAKTLHNREICSLREYFLETDVGMHRDVVAVDKGLTPLSLAKENWRKPVVLDTNDRREVWQSKELHGRFFRALHGPDVDQSASVAWLRSGDLFGETEGFVCAIMDEVMMTNNYRRFIVKDGTVDICRACHRPGESIRHIISGCSRLANGEYLHRHNLVARIIHQQLALKYNLVESEVPYYRYEPDPVLEHGYITLYWDRSIITDRTVVANKPDIVVVDRSERRAMIVDITVPHDENLVKAEKDKQIKYIDLAREVVDMWDVDSAIIVPIVVSANGLIAKSLDQYLRRLSLGSWIKGLIQKAVLLDTARIVRRFLSLEP

SEQ ID NO: 10095 - protein, 1198 aa, Ochropleura plecta
MITRLAARQHARLPPPDSPLSSASPPPEPSLIVSAVTPAVAVASSSSDEYFSPPTTPPPACRRGGRRPPDGLGLRGPPASDRVPAPGGSVQRMRWTSSINENVMRSYYGATEGGNNLTAYRVRMLSLFQVLEPAVNVSAQRLSDQVRVIQRNRMLDDTVLDRLRTEMQSSQVITSSSQAVVPPQSHQLVSHADEVSNDMATNVSTQCNEEMRIALEGAIREYRYISPELRPRLPRLPMHNKNRALVAVLDSQLSNYFDNCENLTDAHSILYCAAVAACRVAHVKFPDDGATRPKPAVPFWQCRIERRIGVARALIGKLICFREGNTRPRVMRFVRRAFAGTDISPPDYMSHIIERIDFLKQKVYAWANRIRRYKRRVERYTLNRTFQSDERWVYRAWERPDQGVSDTHLPDDDAMCLFWRNIWSVPVSHTEGEWTREVERACDPIPEMGALTISPQDVACAVRPLPNWKSPGPDGLHNFWLKWIQRSHARLATLFQTALESGSLPKFLTTGITHLLHKSGSTTEPKNYRPITCLPTIYKVLTSILRAKITKHIDDNSIMSASQNGCRNGSRGTKELLLIDMAISQQVRRSRRHLSTCWIDYKKAYDSVPHTWLMRVLELYKVDATLRTFLSSCMRQWNTVLRYPGCRQIQRNSEPIRIERGIFQGDSLSPLWFCLALNPLSTLLEDSGLGYRLRRGGRVISHLLYMDDLKLFAPNDSQLMELLKVTETFSSAISMEFGVDKCAVMHVKRGEIVESVGTQLSDSIHLRSLSANETYKYLGMSEALGINVADMKQSLKERFFGRLRKVFNSLLSGGNKVRAFNGWVMPVLMYSFGILKWTQTELDALDRKVRTLLTAYRMHHPRSSVMRLYIPRSCGGRGFLNAKTLHNREICSLREYFLEADVGMHRDVVTVDKGFTPLSLAKENWRKPVVLDTNDRREVWQSKELHGRFFRALHGPDVDQPASVAWLRSGDLFGETEGFVCAIMDEVMMTNNYRRFIVKDGTVDICRACHRPGESIRHIISGCSRLANGEYLHRHNLVARIIHQQLALKYSLVESEVPYYRYEPDPVLEHGNITLYWDRSIITDRTIVANKPDIVVVDRSERRAMIVDITVPHDENLVKAEKDKQIKYIDLAREVVDMWDVDSAIIVPIVVSANGLIAKSLDQHLRRLSLGSWIKGLIQKAVLLDTARIVRRFLSLEP

SEQ ID NO: 10096 - protein, 1200 aa, Hecatera dysodea
MLTRSRTRCQNTRLTPSDSSLSSASQPPGPTPPVSPEIPVAAVASSSSDEYFSPPTTPPPARRRGRGRPPNSLGPRGPPASDRVPAIGGSVQRMRWTHSINENVMRSYFGATEGGTNLTAYRGRMLSLFQVLEPAVNVSAQRLSDQVRVIQRNRMLDDAVLDRLRLESRSSRVSPASPPAAVQIQPSISPRPDHVSEDVDDGTISVSTQCNERLRSALEDAFREYRSTPPELRPRLPRLPMHNKNRALVCALDSQLSIYFDSSENLTDTHSILYCGAAAACRVAHVKLPNSDRVARPAVPAWQCRIERRIAEARALIGKLICFREGNTRRRVMRFVRRAFSGTDISPRDYLTRVTERIDFLKQKVYAWANRIRRYKRRVERYTQNRIFQNNERWVYRAWERPDQGVTDTRLPDDEAMLSFWRNIWSVPISHTEGDWTREVERACDSIPEMGAINISPQDVARAVRPLPNWKSPGPDGLHNFWIKWLTRSHARLASQFQSALESRSLPQFFTTGITHLLHKSGSTADPKNYRPITCLPTVYKVLTSILRAKINDHIESNSIMSTSQNGCRSGARGTKELLLIDVAISQQVRRSRKDLSTCWIDYKKAYDSVPHTWLMRVLELYKVDAVLRAFLMSCMGQWRTVLHYPGCRQTQANSEPIRIERGIFQGDSLSPLWFCLALNPLSTLLEGSGQGYRLRRGGQVISHLLYMDDLKLFAPNNLQLMKLLKVTETFSSDISMEFGVDKCAVMHVKRGEIMESVGTQLSDSIHLRSLCSTETYKYLGMSEALGINATSVKQSLKERFFGRLNKVLNSLLSGGNKVRAFNGWVMPVLMYSFGILKWTQTELDALDRRVRSLLTANRMHHPRSSVMRLYIPRKCGGRGFLNAKTLHNREVCSLREYFLEADVGMHRDVVAVDKGFTPLSLANENWRKPVVLDTNDRREVWQSKELHGRFYRVLHGPDVDFLASVAWLRFGDLFGETEGFICAITDEVMMTNNYRKYIVKDGTVDICRACHRPGESIRHIISGCSSLANGDYLHRHNLVARIIHQQLALKYNLVESEVPYYRYAPDPVLENGNCTLYWDRSIITDRTIVANKPDIVVIDRLERRAMIVDIAVPHDENLVKAEKDKQSKYLDLAREVVDMWDVNTAVIVPIVVTANGIIAKSLDQHLKRLSLGSWIKGLIQKAVLLDTARIVRRFLSREP

SEQ ID NO: 10097 - protein, 1196 aa, Hecatera dysodea
MLTRSQTRAQIAPTTSSGSSLSSASQPPGPAPPVSPEIPVAAVASSSSDEYFSPPTTPPPARRRGRGRPPTSLGPRGPPASDRVPATGGSVQRMRWTQSINENVMRSYFGATEGGTNLTAYRGRMLSLFQVLEPAVNVSAQRLSDQVRVIQRNRMLDDAVLDRLRLESRSSRVSPASPPAAVQIQSISPRPDHVSEDVDDGAITVSTQCNERLRSALEDAFREYRSTPPGLRPRLPRLPMHNKNRALVCALDSQLENCFNSSKDLTDTHSILYCAAAAACRVAHVKFPNSDRAARPAVPAWQCRIERRIGEARALIGKLICFREGNTRRRVMRFVRRAFSGTDISPRDYLTRVTERIDFLKQKVYAWASRIRRYKRRVERYTQNRTFQSNERWVYRAWERPDQVVTDTHLPDDDAMCSFWRSIWSVPVSHTEGDWTREVERTCDPIPEMGAITISPQDVARAVRPLPNWKSPGPDGLHNFWIKWFPRSHARLASQFQSALESGSLPQFLTTGITHLLHKSGSTVEPKNYRPITCLPTVYKVLTSILRAKINDHIESNSIMSTSQNGCRNGARGTKELLLIDVAISQQVRRSRKDLSTCWIDYKKAYDSVPHTWLMRVLELYKVDAVLRTFLMSCMGQWMTVLHYPGCRQTQANSEPIRIERGIFQGDSLSPLWFFLALNPLSTLLESSGQGYRLRRGGQVISHLLYMDDLKLFAPNNLQLMKLLKVTETFSSDISMEFGVDKCAVMHVKRGEIMESVGTQLSDSIYLRSLCSTETYKYLGMSEALGINATSVKQSLKERFFGRLNKVLNSLLSGGNKVRAFNGWVMPVLMYSFGILKWTQTELDALDRRVRSLLTANRMHHPRSSVMRLYIPRKCGGRGFLNAKTLHNREVCSLREYFLEADVGMHRDVVAVDKGFTPLSLANENWRKPVVLDTNDRREVWQSKELHGRFYRVLHGPDVDFLASVAWLRFGDLFGETEGFICAITDEVMMTNNYRKYIVKDGTVDICRACHRPGESIRHIISGCSSLANGDYLHRHNLVARIIHQQLALKYNLVESEVPYYRYAPDPVLENGNCTLYWDRSIITDRTIVANKPDIVVIDRLERRAMIVDIAVPHDENLVKAEKDKQSKYLDLAREVVDMWDVNTAVIVPIVVTANGISLDHHLKRLSLGSWIKGLIQKAVLLDTARIVRRFLSRES

SEQ ID NO: 10098 - protein, 1200 aa, Mythimna impura
MLTRAAARRARHPPPGSPLSSASPPPDLGSPVSPVAAVASSSSDEYFSPPTSPTPVRRPGRGRPPKSLGPGGQPAPSRVPAAGGCVQRMRWTQSMNENVMRAYYGSTEGGTSLTAYRDRMLSLFQDLEPTVNVSAQRLSDQVRFIQRNHRLDDAALDRLRSEVLSNQIVSTSIQTQTAATPTTNAISPRSILNNDDADERVVTVSSQCNDELRSALEDALREYRLTPTELRPRLPRLPMHKKNRALVCTLDSLLKNIFESSENLVDTHSILYCGAVAACRLANIKFPNTDGTIRPKPAVPAWQYRIERRIDGARVLIGKLHSFREGNTRPRVMRFVRRAFLGTSISPQEYMSRVTERIDFLKQKVCAWASRIRRYKRRVDRYSQNRIFQSDERWVYRAWERPEQNVIDGLRPDDFATITFWRNIWSVPVSHTEGGWIREVERVCEAIPEMEKITISPADVAKAVRPLPNWKSPGPDGLQNFWLKWYRNSHAPLASQFQSTLESGSLPEYLTTGVTHLLHKTGNPAEPKNYRPITCLSTVYKLLTSILREKINRHIENNSIMSASQNGCRNGSRGTKELLLIDMAVSQQARRSRKDLSTCWIDYKKAYDSVPHTWLMRVLELYKIDTTLRTFLESCMRQWKTVLRYPGCRPIQGDDEPIRIKRGIFQGDSLSPLWFCLALNPLSTLLEDSGLGYRLRRGGQAISHLLYMDDLKLFAPSNLQLMELLKVTETFSSAIRMEFGVDKCAAMHVKQGEIMESEGIQLPDSIHLKSLSSTETYRYLGMSEALGINNADMKQSLKERFFGRLKKVLNSLLSGGNKVRAFNGWVMPVLMYSFGILKWTQTELDALDRRVRTLLTANRMHHPRSSVMRLYISRKCGGRGFLNAKTLHNREVCSLREYFLKTDVGMHRDVVAVDKGLTPLSMAKEDWRKPVVLTTDDRKEVWKGKELHGRFYRALHEPDVDFLASVAWLRFSDLFGETEGFVCAIMDEVILTNNYRKYIMKDGTVDVCRACHRPGESIRHIISGCSRLANGEYLHRHNQVARIIHQQLALKYNLVDSEVPYYKYVPDPVLENDHVTLYWDRSIITDRTIVANKPDIVVIDRLARRAIIVDVTIPHDENLVKAEKEKQIKYLDLAHEVVGMWNMDSAVIVPIVVTANGLIAKSFDDHLSKLSLRGWIKGLIQKAVLLDTARIVRRFLSLEP

SEQ ID NO: 10099 - protein, 1110 aa, Mythimna impura
MRWTQSINENVMRAYYGATEGGNNLTAYRARMLSLFQVLEPAVNVSAQRLSDQVRVIQRNHMLDDTVLDRLRTEMSNHAIAPSSQSVVPVMVPPSYHLSDHADEAITDMVTHVSTQCNNELRSALECAIREYRSMPLELRPRLPRLPMHNKNKALVAALDLQLSIYFDDCKDLTDTHSIMYCAAVAACRVAHVKFPHCDVATRPKPAVPAWQCRIERRIGGARALIGKLICFREGNTRPRVMRFVRRAFSGTDISPRDYMSRVTERIDFLKQKVYAWANRIRRYKRRVERYTQNRTFRSNERWVYRAWERPDQGVTDECLPDDDAMSSFWRSIWSVPVSHTEGDWTREVERACDPIPQMGAINISPQDVARAVRPLPNWKSPGPDGLHNFWIKWFTRSHARLAYQFQSALESGSLPQFLTIGITHLLHKSGSTAEPKNYRPITCLPTVYKVLTSILRSKINSHIDKNLIMSPSQNGCRNGSRGTKELLLIDMTISQQVRRSRKDLSTCWIDYKKAYDSVPHTWLMRVLELYKIDTTLRTFLMSCMRQWSTVLRYPGCRHTQRNSEPVRIERGIFQGDSLSPLWFCLALNPLSTLLENSGLGYRLKRGGQVISHLLYMDDLKLFAPNNLQLMELLKVTETFSSAIRMEFGVDKCAVMHVKRGEVVESVGTQLTDSINLRSLSPTETYKYLGMSEALGINITDMKQSLKERFFGRLKKVFNSPLSGGNKVRAFNGWVMPVLMYSFGVLKWTQTELDALDRRVRTLLTAYRMHHPRSSVMRLYIPRKCGGRSFLNAKTLHNREVCSLREYFLAADVSMHRDVVAVDKGLTPLSLANENWRKPVVLDTNDRREVWQSKELHGRFFRALHGPDVDQLASVAWLRSGDLFGETEGFVCAIMDEVIMTNNYRRFIVKDGTVDICRACHRPGESIRHIISGCSRLANGEYLHRHNLVARIIHQQLALKYSLVESEVPYYRYEPDPVLDNGHITLYWDRSIITDRTIVANKPDIVVVDRSERRAMIVDISVPHDENLVKAEKDKQIKYNIDLAREVVDMWDVDSAIIVPIVVSGNGLISKSLDQHLRRLALGGWIKGLIQKAVLLDTARIVRRFLSLEP

SEQ ID NO: 10100 - protein, 1200 aa, Mythimna impura
MLTRAAARRARLPPPASSLSSASPPPESSPTVSAVTPAVAVASSSSDEYFSPPTSPPPARRRRGRRPPSGLGPRGPPASDRVPAPGGSVQRMRWTQSINENVMRAYYGATEGGNNLTAYRVRMLSLFQVLEPAVNVSAQRLSDQVRVIQRNHMLDDTVLDRLRTEMSNHAIAPSSQPVVPVMVPPSYHLSDHADEEITDMVTHVSTQCNNELRSALECAIREYRNMPLELRPRLPRLPMHNKNKALVAALDLQLSNYFDDCEDLTDTHSIMYCAAVAACRVAHVKFPSCDVSTRPKPAVPAWQCRIERRIGGARALIGKLICFREGNTRPRVMRFVRRAFSGTDISPRDYMSRVTERIDFLKQKVYAWANRIRRYKRRVERYTQNRTFRSNERWVYRAWERPDQGVTDTRLPDDDAMSSFWRSIWSVPVSHTEGDWTREVERACDPIPQMGAIDISPQDVARAVRPLPNWKSPGPDGLHNFWIKWFTRSHARLAYQFQSALESGSLPQFLTTGITHLLHKSGSTAEPKNYRPITCLPTVYKVLTSILRSKINSHIDKNLIMSPSQNGCRNGSRGTKELLLIDMTISQQVRRFRKDLSTCWIDYKKAYDSVPHTWLMRVLELYKIDTTLRTFLMSCMRQWSTVLRYPGCRHIQRNSEPVRIERGIFQGDSLSPLWFCLALNPLSTLLENSGLGYRLKRGGQVISHLLYMDDLKLFAPNNLQLMELLKVTETFSSAIRMEFGVDKCAVMHVKRGEVVESVGTQLTDSINLRSLSPTETYKYLGMSEALGINITDMKQSLKERFFGRLKKVFNSLLSGGNKVRAFNGWVMPVLMYSFGVLKWTQTELDALDRRVRTLLTAYRMHHPRSSVMRLYIPRKCGGRGFLNAKTLHNREVCSLREYFLATDVGMHRDVVAVDKGLTPLSLANENWRKPVVLDTNDRREVWQSKELHGRFFRAFHGPDVDQLASVAWLRFGDLFGETEGFVCAIMDEVIMTNNYRRFIVKDGTVDICRACHRPGESIRHIISGCSRLANGEYLHRHNLVARIIHQQLALKYSLVESEVPYYRYEPDPVLDNGHITLYWDRSIITDRTIVANKPDIVVVDRSERRAMIVDISVPHDENLVKAEKDKQIKYIDLAREVVDMWDVDSAIIVPIVVSANGLIAKSLDQHLRRLALGGWIKALIQKAVLLDTARIVRRFLSLEP

SEQ ID NO: 10101 - protein, 1200 aa, Mythimna impura
MLTRSRAQKLHTHPTSSGSSLSSASQPPGPAPTVSPEIPVAAVASSSSDEYFSPPTTPPPARRRGRGRPPASLGPRGPPASDRVPAAGGSVQRMRWTSSINENVMRSYFGATEGGINLTAYRGRMLSLFQVLEPAVNVSVQRLSDQVRVIQRNRMLDDAVLDRLRLESQSSRVSPATTPAAVQRLPTASPRPVQVGDADDDAAISVSTQCNDRLRGALEDAFREYRSTPPGLRPRLPRLPMHKRNRALVCALDSQLSNCFDSSKDLTDAHSILYCAAVAACRVAHVKFPNCDRATRPAVPAWQCRIEHRIGEARALIGKLICFREGNTRPRVMRFVRRAFSGTDISPRDYLPCVTERIDFLKQKIYAWANRIRRYKRRVERYTRNRTFQSNERWVYRDWERSDQGVTDTRLPDDDAMCSFWRSIWSAPVSHTEGDWIREVERACDLLPEMGAITISPQDVARAVRPLPNWKSPGPDGLHNFWVKWFQRSHARLASQFQSALESGSLPQFLTTGITHLLHKSGSTAEPKNYRPITCLPTVYKVLTSILRAKINSHIETNSIMSASQNGCRNGSRGTKELLLIDIAISQQVRRSRKNLSACWIDYKKAYDSVPHTWLMRVLELYKVDATLRTFLMSCMGQWRTVLHYPGCRQIQENNEPIRIERGIFQGDSLSPLWFCLALNPLSTLLEGSGLGYRLKRGGQVISHLLYMDDLKLFAPNNLQLVELLKVTETFSSAIRMGFGVDKCAIIHVKRGEIMESVGIQLSDSIHLRSLCSTETYKYLGMSESLGINTDDVKQSLKECFFGRLNKVLNSLLSGGNKVRAFNGWVMPVLMYSFGILKWTQTELDALDRRVRTLLTANRMHHPRSSVMRLYIPRKCGGRGFLNAKTLHNREVCSLREYFLKTDVGMHRDVVAVDKGLTPLSLANENWRKPIVLDTNDRREVWQSKELHGRFYRALHGPDVDLLASVSWLRFGDLFGETEGFVFAIMDEVMMTNNYRKYIVKDGTVDICRACHRPGESIRHIISGCSHLANGDYLHRHNLVARIIHQQLALKYNLVESEVPYYRYVPDPVLDNGNITLYWDRSIITDRTIVANKPDIVVIDRLERRTMIVDIAVPHDENLVKAEKDKQTKYLDLAREVVDMWEVDRAIIVPIVVTANGLIAKSLEQHLRRLSLGSWIKGLIQKAVLLDTARIVRRFLSQEP

SEQ ID NO: 10102 - protein, 1200 aa, Mythimna impura
MLTRAAARRARLPPPASSLSSASPPPEPSPTVSAVTPAVAVASSSSDEYFSPPTSPPPARRRRGRRPPSGLGPRGPPASDRVPAPGGSVQRMRWTQSINENVMRAYYGATEGGNNLTAYRVRMLSLFQVLEPAVNVSAQRLSDQVRVIQCNHMLDDTVLDRLRTEMSNHAIAPSSQSVVPVMVPPSYHLSGHVDEEITDMVTHVSTQCNNELRSALECAIREYRNMPLELRPRLPRLPMHNKNKALVAALDLQLSNYFDDCKDLTDTHSIMYCAAVAACRLAHVKFPNCDVATRPKPAVPAWQCRIERRIGGARALIGKLICFREGNIRPRVMRFVRRAFSGTDISPRDYMSRVTERIDFLKQKVYAWANRIRRYKRRVERYTQNRTFRSNERWVYRAWERPDQGVTDACLPDDDAMSSFWRSIWSVPVSHTEGDWTREVERACDPIPQMGAIDISPQDVARAVRPLPNWKSPGPDALHNFWIKWFTRSHARLAYQFQSALESGSLPQFLTTGITHLLHKSGSTAEPKNYRPITCLPTVYKVLTSILRSKINSHIDKNLIMSPSQNGCRNGSRGTKELLLIDMTISQQVRRSRKDLSTCWIDYKKAYDSVPHTWLMRVLELYKIDTTLRTFLMSCMRQWSTVLRYPGCRHTQRKSEPVRIERGIFQGDSLSPLWFCLALNPLSTLLENSGLGYRLKRGGQVISHLLYMDDLKLFAPNNLQLMELLKVTETFSSAIRMEFGVDKCAVMHVKRGEVVESVGTQLTDFINLRSLSPTETYKYLGMSEALGINITDMKQSLKERFFGRLKKVFNSLLSGGNKVRAFNGWVMPVLMYSFGVLKWTQTELDALDRKVRTLLTAYRMHHPRSSVMRLYIPRKCGGRGFLNAKTLHNREVCSLREYFLAADVGMHRDVVTVDKGLTPLSLANENWRKPVVLDTNDRREVWQSKELHGRFFRALHGPDVDQLASVAWLRSGDLFGETEGFVCAIMDEVIMTNNYRRFIVKDGTVDICRACHRPGESIRHIISGCSRLANGEYLHRHNLVARIIHQQLALKYFLVESEVPYYRYEPDPVLDNGHITLYWDRSIITDRTIVANKPDIVVVDRSERRAMIVDISVPHDENLVKAEKDKQIKYIDLAREVVDMWDVDSAIIVPIVVSGNGLIAKSLDQHLRRLALGDWIKGLIQKAVLLDTARIVRRFLSLEP

SEQ ID NO: 10103 - protein, 1200 aa, Mythimna impura
MLTRAAARRARLPPPASSLSSASPPPESSPTVSAVTPAVAVASSSSDEYFSPPTSPPPARRRRGRRPPSGLGPRGPPASDRVPAPGGSVQRMRWTQSINENVMRAYYGATEGGNNLTAYRVRMLSLFQVLEPAVNVSAQRLSDQVRVIQRNHMLDDTVLDRLRTEMSNHAIAPSSQPVVPVMVPPSYHLSDHADEEITDMVTHVSTQCNNELRSALECAIREYRNMPLELRPRLPRLPMHNKNKALVAALDLQLSNYFDDCEDLTDTHSIMYCAAVAACRVAHVKFPSCDVSTRPKPAVPAWQCRIERRIGGARALIGKLICFREGNTRPRVMRFVRRAFSGTDISPRDYMSRVTERIDFLKQKVYAWANRIRRYKRRVERYTQNRTFRSNERWVYRAWERPDQGVTDTRLPDDDAMSSFWRSIWSVPVSHTEGDWTREVERACDPIPQMGAIDISPQDVARAVRPLPNWKSPGPDGLHNFWIKWFTRSHARLAYQFQSALESGSLPQFLTTGITHLLHKSGSTAEPKNYRPITCLPTVYKVLTSILRSKINSHIDKNLIMSPSQNGCRNGSRGTKELLLIDMTISQQVRRFRKDLSTCWIDYKKAYDSVPHTWLMRVLELYKIDTTLRTFLMSCMRQWSTVLRYPGCRHIQRNSEPVRIERGIFQGDSLSPLWFCLALNPLSTLLENSGLGYRLKRGGQVISHLLYMDDLKLFAPNNLQLMELLKVTETFSSAIRMEFGVDKCAVMHVKRGEVVESVGTQLTDSINLRSLSPTETYKYLGMSEALGINITDMKQSLKERFFGRLKKVFNSLLSGGNKVRAFNGWVMPVLMYSFGVLKWTQTELDALDRRVRTLLTAYRMHHPRSSVMRLYIPRKCGGRGFLNAKTLHNREVCSLREHFLATDVGMHRDVVAVDKGLTPLSLANENWRKPVVLDTNDRREVWQSKELHGRFFRAFHGPDVDQLASVAWLRFGDLFGETEGFVCAIMDEVIMTNNYRRFIVKDGTVDICRACHRPGESIRHIISGCSRLANGEYLHRHNLVARIIHQQLALKYSLVESEVPYYRYEPDPVLDNGHITLYWDRSIITDRTIVANKPDIVVVDRSERRAMIVDISVPHDENLVKAEKDKQIKYIDLAREVVDMWDVDSAIIVPIVVSANGLIAKSLDQHLRRVALGGWIKALIQKAVLLDTARIVRRFLSLEP

SEQ ID NO: 10104 - protein, 1200 aa, Mythimna impura
MLTRAAARRARPPPPDSSLSSASPPPEPSPIVSAVTSAAAVASSSSDEYFSPPTTPPPARRRGGRRPPSGLGPRGPPASDRVPAPGGSVQRMRWTRSINENVMRSYYGATEGGNNLTAYRVRMLSLFQVLEPAVNVSAQRLSDQVRVIQRNHMLDDTVLDRLRTEMGSHAIASSSQTVAPSQVSPSNHLPNHADEESTDMVTHVSTQCSNELRSALECAIREYRNMPLELRPRLPRLPMCNKNKALVAALDLQLSNYFDDCEDLTDTHSIMYCAAVAACRVAHVKFPNSDVATRPKPAVPAWQCRIERRIGGARALIGKLICFREGNTRPRVMRFVRRAFSGTDISPRDYMSCVTERIDFLKQKVYAWANRIRRYKRRVERYTQNRTFRSNERWVYRAWEQPDQGGADTRLPDDDAMSSFWRNIWSVPVSHTEGGWTREVERACEPIPEMGAITISPQDVARAVRPLPNWKSPGPDGLHNFWIKWLQRSHARLASQYQTALESGSLPEFLTTGVTHLLHKSGSTAEPKNYRPITCLPTVYKVLTSILRAKINLHVDNNAIMSASQNGCRNGSRGTKELLLIDMAISQQVRRSRKDLSTCWIDYKKAYDSVPHTWLMRVLELYKIDATLRTFLMSCMRQWRTVLRYPGCRHIQRNSEPVRIERGIFQGDSLSPLWFCLALNPLSTLLENSGLGYRLKRGGQVISHLLYMDDLKLFAPNNLQLMELLKVTETFSSAIRMEFGVDKCAVMHVKRGEIVESVGTQLSDSINLRSLSPTETYKYLGMSEALGINAIDMKQTLRERFFGRLKKVFNSLLSGGNKVRAFNGWVMPVLMYSFGVLKWTQTELDALDRRVRTLLTAYRMHHPRSSVMRLYIPRKCGGRGFLNAKILHNREVCSLREYFLTADVGMHRDVVAVDKGLTPLSLANESWRKPVVLDTNDRREVWQSKELHGRFFRALHGPDVDQLASVAWLRVGDLFGETEGFVCAIMDEVIMTNNYRRFIVKDGTVDICRACHRPGESIRHIISGCSRLANGEYLHRHNLVARIIHQQLALNYSLVESEVPYYRYVPDPVLDNGDITLYWDRSIITDRTIVANKPDIVVVDRRERRTMIVDISVPHDENLVKAEKDKQIKYIDLAREVVDMWDVDSAIIVPIVVSANGLIAKSLDQHLRRLALGGWIKGLIQKAVLLDTARIVRRFLSLEP

SEQ ID NO: 10105 - protein, 960 aa, Mythimna impura
MHKKNRALVCALDSQLSNCFDSSEDLTDTHSILYCAAVAACRVARVKFPNSDRVTRPAVPAWQCRIERRIGEARALIGKLICFREGNTRPRVMRFVRRAFSGTDISPRDYLPHITERIDFLKQKVYAWANRIRRYKRRVERYTQNRTFQRNERWVYRAWERPDQGVIDTRLPDDDAMCSFWRSIWSVPVSHTEGDWIREIERTCDLIPEMGAITISPQDVARAVRPLPNWKSPGPDGLHNFWLKWFQRSHARLASQFQSALESGSLPQFLTTGITHLLHKSGSTAEPKNYRPITCLPTVYKVLTSILRAKINSHIETNSIMSASQNGCRNGSRGTKELLLIDVAISQQVRRSRRDLSTCWIDYKKAYDSVPHTWLMRVLELYKVDATLRTFLMSCMRQWRTALHYPGCRQIRESSEPIRIERGIFQGDSLSPLWFCLALNPLSTLLEGSGLGYRLRRGGHVISHLLYMDDLKLFASNNLQLMELLKVTETFSSAIRMEFGLDKCAVMHVKRGEIMESVGTQLSDSIYIRSLCSTETYKYLGMSEALGINAADMKQSLRERFFGRLNKVLNSLLSGGNKVRAFNGWVMPVLMYSFGILKWTQTELDALDRRVRSLLTANRMHHPRSSVMRLYIPRKCGGRGFLNAKTLHNREICSLREYFLKTDVGMHRDVVAVDKGLTPLSLVNENWRKPTVMDTNERRAVWQGKELHGRFYRALHGPDVDLLASVSWLRFGDLFGETEGFVFAIMDEVMMTNNYRKYIVKDGTVDICRACHRPGESIRHIISGCSHLANGDYLHRHNLVARIIHQQLALKYNLVESEVPYYRYVPDPVLENGGVTLYWDRSIITDRTIVANKPDIVVIDRLERRTMIVDIAVPHDENLVKAEKDKQTKYLDLAREVVDMWEVDRAIIVPIVVTANGLIAKSLEQHLRRLSLGSWIKGLIQKAVLLDTARIVRRFLSQQP

SEQ ID NO: 10106 - protein, 1200 aa, Mythimna impura
MLTRSRAQKLHTHPTSSGSSLSSASQPPGPAPTVSPEIPVAAVASSSSDEYFSPPTTPPPARRRGRGRPPASLGPRGPPASDRVPAAGGSVQRMRWTSSINENVMRSYFGATEGGINLTAYRGRMLSLFQVLEPAVNVSVQRLSDQVRVIQRNRMLDDAVLDRLRLESQSSRVSPATTPAAVQRLPTASPRPVHVGDADDDAAISVSTQCNDRLRGALEDAFREYRSTPPGLRPRLPRLPMHKRNRALVCALDSQLSNCFDSSKDLIDTHSILYCAAVAACRVAHVKFPNCDRATRPAVPAWQCRIEHRIGEARALIGKLICFREGNTRPRVMRFVRRAFSGTDISPRDYLPCVTERIDFLKQKIYAWANRIRRYKRRVERYTRNRTFQSNERWVYRDWERSDQGVTDTRLPDDDAMCSFWRSIWSAPVSHTEGDWIREVERACDLLPEMGAITISPQDVARAVRPLPNWKSPGPDGLHNFWVKWFQRSHARLASQFQSALESGWLPQFLTTGITHLLHKSGSTAEPKNYRPITCLPTVYKVLTSILRAKINSHIETNSIMSASQNGCRNGSRGTKELLLIDIAISQQVRRSRKNLSACWIDYKKAYDSVPHTWLMRVLELYKVDATLRTFLMSCMGQWRTVLHYPGCRQIQENNEPIRIERGIFQGDSLSPLWFCLALNPLSTLLEGSGLGYRLKRGGQVISHLLYMDDLKLFAPNNLQLVELLKVTETFSSAIRMEFGVDKCAVIHVKRGEIMESVGIQLSDSIHLRSLCSTETYKYLGMSESLGINTDDVKQSLKERFFGRLNKVLNSLLSGGNKVRAFNGWVMPVLMYSFGILKWTQTELDALDRRVRTLLTANRMHHPRSSVMRLYIPRKCGGRGFLNAKTLHNREVCSLREYFLKTDVGMHRDVVAVDKGLTPLSLANENWRKPIVLDTNDRREVWQSKELHGRFYRALHGPDVDLLASVSWLRFGDLFGETEGFVFAIMDEVMMTNNYRKYIVKDGTVDICRACHRPGESIRHIISGCSHLANGDYLHRHNLVARIIHQQLALKYNLVESEVPYYRYVPDPVLDNGNITLYWDRSIITDRTIVANKPDIVVIDRLERRTMIVDIAVPHDENLVKAEKDKQTKYLDLAREVVDMWEVDRAIIVPIVVTANGLIAKSLEQHLRRLSLGSWIKGLIQKAVLLDTARIVRRFLSQEP

SEQ ID NO: 10107 - protein, 1202 aa, Phlogophora meticulosa
MLTRSRARVLNAPKTSSGSSLSSASQLPGPAPDVSPVTPAAAVASSSSDEYYSPPTSPPPVRRCGRGRPPASLGLRGPPASARVPASGGSVQRMRWTQSINENVMRSYYGATEGGTNLTAYRSRMLSLFQVLEPAVNVSAQRLSDQVRVIQRNHMLDDTVLDRLRLNSRSNRVMPASPLVAVQLPSLPIVSPRPDYVGEEDDDAAISVSSQCNVRLRSALEDAFREYRSTPPELRQRLPRLPMHKKNKALMCALDSLLSNSFDNSKDLADTHSILYCAAAAACRVANVKFPNSKKATRPAVPAWQCRIERRIGEARVLIGKLICFREGNTRPRVMRFVRRAFSGTDISSRDYLTRVTERIDFLKQKICAWANRIRRYKRRVERYTQNRTFRSDERWVYRVWERPDQGVIDTCLPDDEAMYSFWRSIWSVPVSHTEGDWTREVERACEPLPVMGTINISPQDVACAVCPLPNWKSPGPDGLHNFWIKWLKSSHARLATQFQSALESGSLPQFLTTGITHLLHKSGSTAEPKNYRPITCLPTVYKVLTSILRSKINNHIETSSIMSVSQNGCKNGSRGTKELLLIDMAISQQVRRSRKDLSTCWIDYKKAYDSVPHTWLMRVLELYKIDATLRTFLTSCMRQWRTVLHYPGCRQYRENSEPIRIERGIFQGDSLSPLWFCLALNPLSTQLEGSGLGYRLRRGTQVISHLLYMDDLKLFAPNNLHLMELLKVTETFSSAIRMDFGVDKCAVMHVKRGGIVESAGTQLSDSIYLRSLSSTETYKYLGMSEALGINAADMKQSLKERFFCRLNKVLNSLLSGGNKVRAFNGWVMPVLMYSFGILKWTQTELDALDRRVRTLLTANRMHHPRSSVMRLYISRKCGGRGFLNAKTLHNREVCSLRKYFIEANVGMHRDVVAVDKGLTPLSLANENWRKPIVLDTTDRMEIWKSKELHGRFYRVLHGPDVDLLASISWLRFGDLFGETEGFVCAIMDEVIMTNNYRKYIVKDGTVDICRACHRPGESIRHIISGCSRLANGEYLHRHNLVARIIHQQLALKYNLVELEVPYYKYVPDPVLENGNITLYWDRSIITDRTIVANKPDIVVIDRSERRTMIVDITVPHDENLVKAEKEKQMKYLDLAREVVDMWEVNTAVIVPIVVTANGIIAKSLDQHLRRLSLGSWIKGLIQKAVLLETARIVRRFLSQEP

SEQ ID NO: 10108 - protein, 1198 aa, Phlogophora meticulosa
MLTRSAARRARPPPPASSLSSASLPPKPSTIVSTVKPAVPVASSSSDEYFSPPTSPPPARRRRGRRPPDGLGPRGPPASGRVPAPGGSVQRMRWTQSINENVMRSYYGATEGGSNLTAYRVRMLSLFQVLEPAVNVSAQRLSDQVRVIQRNHMLDDVVLDRLRTEMQSSRVITSPSHTVVPPQYNIVLSSFADGEGSDKVTNVSTQYNEELRSALEGAIREYRFMLPALRPRLPRLPMHSKNRALVAALDSQLSNYFDNCDDLTDAHSILYCAAVAACRVAHVKFPNDIATRPKPAVPAWQCRIERRIAGARALIGKLVCYREGNTRPRVMRYVRRAFLGTDISPRDYMSRVTERIDFLKQKVYAWASRIRRYKRRVERYTQNRTFQSNERWVYRAWERPVQGVTDTHLPDDDVMCSFWRNIWSVPVSHTEGDWTREVERACDPIPQMGAITISPQDVARAVRPLPNWKSPGPDGLHNFWIKWLQKSHARLASQFQSALETGSLPQFLTTGITHLLYKSGSTAEPKNYRPITCLPTVYKVLTSILRVKINNHIDSNSIMSASQNGCRNGSRGTKELLLIDTAISQQVRRSRKDLSTCWIDYKKAYDSVPHTWLKRVLELYKVDATLRTLLTSCMGQWRTVLRYPGCRQIQRNSEPIRIERGIFQGDSLSPLWFCLALNPLSTLLEDSGLGYRLKRGGQVVSHLLYMDDLKLFAPSDLQLMELLTVTKTFSSAIRMEFGVDKCAVMHVKRGKIVESVGTQLPDFINFRALSPIETYKYLGMSEALGINAADMKQSLKERFFGRLKKVCNSLLSGGNKVRAFNGWVMPVLMYSFGILKWTQTELDALDRRVRTFLTASRMHHPRSSVMRLYIPRKCGGRGFLNAKTLHNREICSLRDYFLETDVGMHRDVVAVDQGLTPLSLAKENWRKPVVLDTNDRKEVWQSKELHGRFFQALHGPDVDQLASVSWLRFGDLFGETEGFVCAIMDEVIMTNNYRRFIVKDGTVDICRACHRPGESIRHIISGCSRLANEEYLHRHNLVARIIHQQLALKYSLVESEVPYYKYVPDPVLENGSVTLYWDRSIITDRTIVANKPDIVVMDRIERRATIIDVTVPHDGNLVKAEKDKQIKYLDLAREVVDMWDVDSAIVVPIVVSANGLIAKSLDQHLRRLALGSWIKGLIQKAVLLDTARIVRRFLSLEP

SEQ ID NO: 10109 - protein, 1202 aa, Phlogophora meticulosa
MLTRSRARVLNAPKTSSGSSLSSASQLPGPAPDVSPVTPAAAVASSSSDEYYSPPTSPPPVRRCGRGRPPASLGLRGPPASARVPASGGSVQRMRWTQSINENVMRSYYGATEGGTNLTAYRSRMLSLFQVLEPAVNVSAQRLSDQVRVIQRNHMLDDTVLDRLRLNSRSNRVMPASPLVAVQLPSLPIVSPRPDYVGEEDDDAAISVSSQCNVRLRSALEDAFREYRSTPPELRQRLPRLPMHKKNKALMCALDSLLSNSFDNSKDLADTHSILYCAAAAACRVANVKFPNSKKATRPAVPAWQCRIERRIGEARVLIGKLICFREGNTRPRVMRFVRRAFSGTDISSRDYLTRVTERIDFLKQKICAWANRIRRYKRRVERYTQNRTFWSDERWVYRAWERPDQGVIDTCLPDDEAMYSFWRSIWSVPVSHTEGDWTREVERACEPLPVMGTINISPQDVACAVCPLPNWKSPGPDGLHNFWIKWLKSSHARLATQFQSALESGSLPQFLTTGITHLLHKSGSTAEPKNYRPITCLPTVYKVLTSILRSKINNHIETSSIMSVSQNGCKNGSRGTKELLLIDMAISQQVRRSRKDLSTCWIDYKKAYDSVPHTWLMRVLELYKIDATLRTFLTSCMRQWRTVLHYPGCRQFRENSELIRIERGIFQGDSLSPLWFCLALNPLSTQLEGSGLGYRLRRGTQVISHLLYMDDLKLFAPNNLHLMELLKVTETFSSAIRMDFGVDKCAVMHVKRGGIVESAGTQLSDSIYLRSLSSTETYKYLGMSEALGINAADMKQSLKERFFCRLNKVLNSLLSGGNKVRAFNGWVMPVLMYSFGILKWTQTELDALDRRVRTLLTANRMHHPRSSVMRLYISRKCGGRGFLNAKTLHNREVCSLRKYFIEADVGMHRDVVAVDKGLTPLSLANENWRKPIVLDTTDRMEIWKSKELHGRFYRVLHGPDVDLLASISWLRFGDLFGETEGFVCAIMDEVIMTNNYRKYIVKDGTVDICRACHRPGESIRHIISGCSRLANGEYLHRHNLVARIIHQQLALKYNLVELEVPYYKYVPDPVLENGNITLYWDRSIITDRTIVANKPDIVVIDRSERRTMIVDITVPHDENLVKAEKEKQMKYLDLAREVVDMWEVNTAVIVPIVVTANGIIAKSLDQHLRRLSLGSWIKGLIQKAVLLETARIVRRFLSQEP

SEQ ID NO: 10110 - protein, 1496 aa, Xestia xanthographa
MTTKRETYLKVGFLNAGSLGTDHDDLIVAIDRHCFDVMAINETWLRPGEEGRAPVVPGYRLRHTPRPASVRAGRGGGVGFYLRRGLSARTWTSVIDPRFESVEQMWLTISLNKIALGIALKKIALGTAYRPPWIDLVLFLDAITDSISSLGNCDHYILLGDFNVNMLDINGTKTKNINEFLNCLNLTQLVTSPTHHTATSATLIDLLCTDLTARYTVVESFGSLNGHSILVSEFNIKRDKFQPYLVKFQPLQNVCTETFNMDLLSLNIDIISTLDSVNDMVHVFNTLITNNNNNNETTPMLTRSAAARRARLPPPDSSLSSASPPPEPSPIVSAVTPAVAVASSSSDEYFSPPTTPPPARRRGGHRPPDGLGPRGPPASDRVPAPGGSVQRMRWTQSINENVMRAYYGATEGGNNLTAYRVRMLSLFQVLEPAVNVSAQRLSDQVRVIQRNRMLDDTVLDRLRTEIQSNHVIVTPSQAVVPPQSSIIPCDNDVSNDMVTNVSTQCNVEMRSALEGAIREYRFMQPDLRPRIPRLPMHNKNRALVAVLDSQLSNYFDNCEDLTDVHSILYCAAVAACRVAHVKFPSDRATRPKPAVPAWQYRIERRIGGARALIGKLVCFREGNTRLRVMRFVRQAFSGTDISPRDYMSRVTERIDFLKQKVYAWANRIRRYKRRVDRYTQNRTFQKDERWVYRAWERPDQGVADTHLPDDDAMCSFWRSIWSVPVSHAEGEWTRVIERACDPISEMGAINISPQDVARAVRPLPNWKSPGPDGLHNFWIKWFTRSHARLATLFQSALESGSLPEFLTTGITHLLHKSGSTAEPKNYRPITCLPTVYKVLTSILRTKISKHIDDNSVMSASQNGCRNGSRGTKELLLIDMAISHQVRRSRKDLSTCWIDYKKAYDSVPHTWLMRVLELYKVDATLRTFLMSCMGQWRTVLRYPGCRQIQRNSEPIRIERGIFQGDSLSPLWFCLALNPLSTLLEDSGLGYQLRKDGQVISHLLYMDDLKLFAPNDLRLMELLKVTETFSNAIRMEFGVDKCAVMHVKRGEIVESVGTQLSDSITLRSLSATETYKYLGMSEALGVNVADMKQSLKERFFGRLKKVLNSLLSGGNKVRAFNGWVMPVLMYSFGILKWTQTELDALDTKVRKLLTAYRMHHPRSSVMRLYIPRKCGGRGFLNAKTLHNREICSLREYFLGTDVGMHRDVVTMDKGFTPLSLAKENWRKPPVLDTNDRREVWQSKQLHGRFFRALHGPDVDLSASVAWLRSGDLFGETEGFVCAIMDEVMMTNNYRRFIVKDGTVDICRACHRPGESIRHIISGCSRLANGEYLHRHNLVARIIHQQLALKYNLVESEVPYYRYVPDPVLDNGCITLYWDQSIITDRTIVANKPDIVVVDRSERRAMIVDITVPHDENLVKAEKDKQIKYLDLAREVVDMWEVDSAIIVPIVVSAHGLIAKSLDQYLRRLSLGSWIKGLIQKAVLLDTARIVRRFLSLEP

SEQ ID NO: 10111 - protein, 1178 aa, Xestia xanthographa
MLTRSAAARRARLPPPDSSLSSASPPPEPSPIVSAVTPAVAVASSSSDEYFSPPTTPPPARRRGGRRPPDGLGPRGPPASDRVPAPGGSVQRMRWTQSINENVMRAYYGATEGGNNLTAYRVRMLSLFQVLEPAVNVSAQRLSDQVRVIQRNRMLDDTVLDRLRTEIQSSHVIATPSQAVVPPQSSIIPNCDNDVGNDMVTNVSTQCNVEMRSALEGAIREYRFMQPDLRPRIPRLPMHNKNRALVAVLDSQLSNYFDNCEDLTDVHSILYCAAVAACRVAHVKFPSDRATRPKPAVPAWQYRIERRIGGARALIGKLVCFREGNTRPRVMRFVRQAFSGTDISPRDYMSRVTERIDFLKQKVYAWANRIRRYKRRVDRYTQNRTFQKDERWVYRAWERPDQGVADTHLPDDDAMCSFWRSIWSVPVSHAEGEWTRVIERACDPVSEMGAITISPQDVARAVRPLPNWKSPGPDGLHNFWIKWFTRSHARLATLFQSALESGSLPEFLTTGITHLLHKSGSTAEPKNYRPITCLPTVYKVLTSILRTKISKHIDDNSVMSASQNGCRNGSRGTKELLLIDMAISHQVRRSRKDLSTCWIDYKKAYDSVPHTWLMRVLELYKVDATLRTFLMSCMGQWRTVLRYPGCRQIQRNSEPIRIERGIFQGDSLSPLWFCLALNPLSTLLEDSGLGYRLRKDGQVISHLLYMDDLKLFAPNDLQLMELLKVTDTFSSAIRMEFGVDKCAVMHVKRGEIVESVGTQLSDSITLRSLSATETYKYLGMSEALGVNVADMKQLLKERFFGRLKKVFNSLLSGGNKVRAFNGWVMPVLMYSFGILKWTQTELDALDTKVRKLLTAYRMHHPRSSVMRLYIPRKCGGRGFLNAKTLHNREICSLREYFLGTDVGMHRDVVTVDKGLTPLSLAKENWRKPPVLDTNDRREVWQSKELHGRFFRALHGPDVDLPASVAWLRSGDLFGETEGFVCAIMDEVMMTNNYRRFIVKDGTVDICRACHRPGETIRHIISGCSRLANGEYLHRHNLVARIIHQQLALKYNLVVSEVPYYRYVPDPVLDNGCITLYWDQSIITDRTIVANKPDIVVVDRSERRAMIVDITVPHDENLVKAEKDKQIKYLDLAREVVDMWEVDSAIIVPIVVSAHGLIAKSLDQYLRRLSLGSWIKGLI

SEQ ID NO: 10112 - protein, 1108 aa, Cosmia trapezina
MRWTRAINENVMRSYYGATEGGNNLTAYRVRMHSLFQVLEPALNVSAQRLSDQVRVIQRNHMLDDTVLDRLRNEMQSSRVIAPLSQTIVAPPPPQCNTTQADEGSDGTAANVSTQCNEELRSALEGAIQEYRFVSPELRPRLPRLPMHNKNRALVAALDSQLSNYFDDCEDLTDTHSILYCAAVAACLVAHVKFANDSRATRPKPAVPAWQCRIERRIGGARALIGKLICFREGNTRPRVMRFVKRAFSGTDVSPQDYMSRVTERIDFLRQKVYAWANRIRRYKRRVDRYTQNRTFQSDERWVYRGWERPDQGVTDTRLPDDDAMCSFWRSIWSVPVSHTEGDWAREVRRACDPIPEMGAITICPQDVARAVRPLPNWKSPGPDGLHNFWIKWFLGSHARLAAQYQSALQSGSLPQFLTTGITHLLHKSGSTTEPKNYRPITCLPTVYKVLTSILRAKINEHIDTNSIMSASQNGSRNGSRGTKELLLIDMAISQQVRRSRRDLSTCWIDYKKAYDSVPHTWLMRVLELYKVDATLRTFLMSCMGQWRTVLRYPGCRNIQRNSEPIRIERGIFQGDSLSPLWFCLALNPLSTLLENSGLGYRLRRGGQVISHLLYMDDLKLFAPSNLQLMELLKVTETFSSAIRMEFGVDKCAVMHVKRGEIVESVGTQLPDSINLRTLSAAETYKYLGMSEALGINVADMKQSLKERFFGRLKKVFNSLLSGGNKVRAFNGWVMPVLMYSFGILKWTQTELDALDRRVRTLLTAYRMHHPRSSVMRLYIPRKCGGRGFLNAKTLHNREICSLREYFLETDVGMHRDVVAVDKGLTPLSLAKENWRKPVVLDANDRMEVWQSKELHGRFFRALHGPDVNLLASVAWLRSGDLFGETEGFVCAIMDEVIMTNNYRRFIVKDGTVDICRACHRPGESIRHIISGCSRLANEEYLHRHNLVARIIHQQLALKYSLVESEVPYYRYVPDPVLENGHITLYWDRSIITDRTIVANKPDIVVVDRTERRAMIVDITVPHDGNLVKAEKDKQIKYIDLAREVVDMWDVDSAVIVPIVVSANGLIAKSLDQHLRRLSLGSWIKGLIQKAVLLDTARIVRRFLSLEP

SEQ ID NO: 10113 - protein, 1205 aa, Cosmia trapezina
MLTRSRAQHLRNTHPTSSGSSLSSASQLPEPAPDVSQVIPAAAVASSSSDEYFSPPTTPPPVRRRGRGRPPASLGPRGPPASDRVPAPGGSVQRMRWTQTVNENVMRAYFGATEGGSNLTAYRGRMLSLFQVLEPAVNVSAQRLSDQVRVIQRNHMLDDVVLDRLRLESRNSRVTSDSPMVAVQLQNLPSASPRPDRVGEEDDSGAISVSSQCNVQLRSALEDAFREYRSAPPGLRPRLPRLPMHKKNKALVCALDSQLSNCFDGSKDLADTHSILYCAAVAACRVAHVKFHNNDRVTRPKPAVPTWQCRIERRIGEARALIGKLICFREGNTRPRVMRFVRRAFSGMDISPRDYLTCVTERIDFLKQKICAWANRIRRYRRRVERYTQNRTFQSDERWVYRAWERPDQGVADTRLPDDDAMCSFWRSIWSVPVSHTEGDWTREVERACDHIPQMGALTISPQDVARAVRPLPNWKSPGPDGLHNFWIKWFQRSHARLASQFQSALQSGSLPQFLTTGITHLLHKSGSTAEPRNYRPITCLPTVYKVLTSILRAKINKHIDTNSIMSASQNGCGNGSRGTKELLLIDMTISQQVRRSRKDLSTCWIDYKKAYDSVPHTWLMRVLELYKIDATLRTFLMSCMGQWRTVLRYPGCRNIQRNSEPIRIERGIFQGDSLSPLWFCLALNPLSTLLEDSGLGYRLRRGGQVISHLLYMDDLKLFAPNNLQLMELLKVTETFSSAIRMEFGVDKCAVMHVKRGEIVESVRTQLSDSIHLRSLSSLETYKYLGMSEALGINAADMKQSLRERFFGRLNKVLNSLLSGGNKVRAFNGWVMPVLMYSFGILKWTQTELDALDRRVRTLLTANRMHHPRSSVMRLYIPRKCGGRGFLNAKTLHNREVCSLREYFLEADVGMHREVVSVDKGLTPLSLANENWRKPIVLDTNDRREVWQSKELHGRFYRVLHGPDVDFLASVSWLRFGDLFGETEGFVFAIMDEVMMTNNYRKYIVKDGTVDICRACHRPGESIRHIISGCSRLANGDYLHRHNLVARIIHQQLALKYSLVESEVPYYRYVPDPVLENGNITLYWDRSIITDRTIVANKPDIVVIDRLERRTVIVDIAVPHDENLVKAEKDKQIKYLDLAREVVDMWDVDTAIIVPIVVTANGIIAKSLDQHLRRLSLGGWIKGLIQKAVLLDTARIVRRFLSQQP

SEQ ID NO: 10114 - protein, 1200 aa, Cosmia trapezina
MLTRSATRKARLPPPDSSLSSASPPPVPSLTVSAVSTPAAVVASSSSDEYFSPPTTPPPARRRGGRRPPDGLGPRGPPASDRVPAPGGSVQRMRWTRAINENVMRSYYGATEGGNNLTAYRVRMHSLFQVLEPALNVSAQRLSDQVRVIQRNHMLDDTVLDRLRNEMQSSRVIAPLSQTIVAPPPPQCNTTQADEGSDGTAANVSTQCNEELRSALEGAIQEYRFVSPELRPRLPRLPMHNKNRALVAALDSQLSNYFDDCEDLTDTHSILYCAAVAACRVAHVKFANDSRATRPKPAVPAWQCRIERRIGGARALIGKLICFREGNTRPRVMRFVRRAFSGTDVSPQDYMSRVTERIDFLRQKVYAWANRIRRYKRRVDRYTQNRTFQSDERWVYRGWERPDQGVTDTRLPDDDAMCSFWRSIWSVPVSHTEGDWAREVRRACDPIPEMGAITICPQDVARAVRPLPNWKSPGPDGLHNFWIKWFLGSHARLAAQYQSALQSGSLPQFLTTGITHLLHKSGSTTEPKNYRPITCLPTVYKVLTSILRAKINEHIDTNSIMSASQNGSRNGSRGTKELLLIDMAISQQVRRSRRDLSTCWIDYKKAYDSVPHTWLMRVLELYKVDATLRTFLMSCMGQWRTVLRYPGCRNIQRNSEPIRIERGIFQGDSLSPLWFCLALNPLSTLLEDSGLGYRLRRGGQVISHLLYMDDLKLFAPSNLQLMELLKVTETFSSAIRMEFGVDKCAVMHVKRGEIVESVGTQLPDSINLRTLSAAETYKYLGMSEALGINVADMKQSLKERFFGRLKKVFNSLLSGGNKVRAFNGWVMPVLMYSFGILKWTQTELDALDRRVRTLLTAYRMHHPRSSVMRLYIPRKCGGRGFLNAKTLHNREICSLREFFLETDVGMHRDVVAVDKGLTPLSLAKENWRKPIVLDANDRMEVWQSKELHGRFFRALHGPDVNLLASVAWLRSGDLFGETEGFVCAIMDEVIMTNNYRRFIVKAGTVDICRACHRPGESIRHIISGCSRLANEEYLHRHNLVARIIHQQLALKYSLVESEVPYYRYVPDPVLENGHITLYWDRSIITDRTIVANKPDIVVVDRTERRAMIVDITVPHDGNLVKAEKDKQIKYIDLAREVVDMWDVDSAVIVPIVVSANGLIAKSLDQHLRRLSLGSWIKGLIQKAVLLDTARIVRRFLSLEP

SEQ ID NO: 10115 - protein, 1200 aa, Mamestra brassicae
MLTRSRARAQTAQPTSSGSSLSSASQPPGPAPAVSPEIPVAAVASSSSDEYFSPPTTPPPARRRGRGRPPTSFGPRGPPASDRVPAIGGSVQRMRWTQTINENVMRSYYGATEGGTNLTAYRGRMFSLFQVLEPAVNVSAQRLSDQVRVILRNRMLDDAVLDRLRLESRSGRVSPASPPAAVEIQSSISPRPNNVGEDDDDGAISVSTQCNERLRSALEDAFREYRSTPPELRPRLPRLPMHNKNRALVCALDSQLTNCFDSSEDLADTHSILYCAAAAACRVAHVKFLNSDRATRPAVPAWQCRIERRIGEARALIGKLICFREGNTRRRVMRFVRRAFSGTDTSPRDYLTRVTERIDFLKQKIYAWANRIRRYKRRVERYTQNRTFQSNERWVYRAWERPDQGVTDTRLPDDDVMCSFWRNIWSVPVSHTEGDWIREVERACDPILEMGAITISPQDVAREVRPLPNWKSPGPDGLHNFWIKWFTGSHVRLASQFQSALESGSLPQFLTTGITHLLHKSGSTAEPKNYRPITCLPTVYKVLTSILRAKINHHIESNSIMSASQNGCRNGSRGTKELLLMDIAISQQVRRSRKDLSTCWIDYKKAYDSVPHTWLMRVLELYKVDAVLRTFLMSCMGQWRTVLRYPGCRQIQVNGDPIRIERGIFQGDSLSPLWFCLALNPLSTLLEGSGQGYRLRRGGQVISHLLYMDDLKLFAPNNLQLMELLKVTETFSSAISMEFGVDKCAVMHVKRGEIMESVGTQLSDSIRLRSLSSTETYKYLGMSKALGINANDMKQSLKERFFGRLNKVLNSLLSGGNKVRAFNGWVMPVLMYSFGILKWTQTELDALDRRVRSLLTANRMHHPRSSVMRLYIPRKCGGRGFLNAKTLHNREICSLREFFLEADVGMHRDVVAVDKGLTALSLANENWRKPVILDTNDRREVWQSKELHGRFYRVLHGPDVDFLASVAWLRFGDLFGETEGFVCAIMDEVMMTNNYRKYIVKDGTVDICRACHRPGESIRHIISGCPSLANGDYLHRHNLVARIIHQQLALKYNLVESEVPYYRYVPDPVLENGNCTLYWDWSIITDRTIVANKPDIVVIDRLERRAMIVDIAVPHDENLVKTEKDKQTKYLDLAREVVDMWDVNTAVIVPIVVTANGIIAKSLDQHLKRLSLGSWIKGLIQKAVLLDTARIVRRFLSQGP

SEQ ID NO: 10116 - protein, 1200 aa, Mamestra brassicae
MLTRSRARAQTAQPTSSGSSLSSASQPPGPAPAVSPEIPVAAVASSSSDEYFSPPTTPPPARRRGRGRPPTSLGPRGPPASDRVPAIGGSVQRMRWTQTINENVMRSYYGATEGGTNLTAYRGRMLSLFQVLEPAVNVSAQRLSDQVRVILRNRMLDDAVLDRLRLESRSGRVSPASPPAAVQIQSSISPRSNNVGEDDDDGAISVSTQCNERLRSALEDAFREYRSTPPELRPRLPRLPMHNKNRALVCALDSQLTNCFDSSEDLADTHSILYCAAAAACRVAHVKFLNSDRATRPAVPAWQCRIERRIGEARALIGKLICFREGNTRRRVMRFVRRAFSGTDTSPRDYLTRVTERIDFLKQKIYAWANRIRRYKRRVERYTQNRTFQSNERWVYRAWERPDQGVTDTRLPDDDIMCSFWRNIWSVPVSHTEGDWIREVERACDPILEMGATTISPQDVARAVRPLPNWKSPGPDGLHNFWIKWFTGSHARLASQFQSALESGSLPQFLTTGITHLLHKSGSTAEPKNYRPITCLPTVYKVLTSILRAKINHHIESNSIMSASQNGCRNGSRGTKELLLMDIAISQQVRRSRKDLSTCWIDYKKAYDSVPHTWLMRVLELYKVDAVLRTFLMSCMGQWRTVLRYPGCRQIQVNGDPIRIERGIFQGDSLSPLWFCLALNPLSTLLEGSGQGYRLRRGGQVISHLLYMDDLKLFAPNNLQLMELLKVTETFSSAISMEFGVDKCAVMHVKRGEIMESVGTQLSDSIHLRSLSSTETYKYLGMSEALGINANDMKQSLKERFFGRLNKVLNSLLSGGNKVRAFNGWVMPVLMYSFGILKWTQTELDALDRRVRSLLTANRMHHPRSSVMRLYIPRKCGGRGFLNAKTLHNREICSLREFFLEADVGMHRDVVAVDKGLTALSLANENWRKPVVLDTNDRRKVWQSKELHGRFYRVLHGPDVDFLASVAWLRFGDLFGETEGFVCAIMDEVMMTNNYRKYIVKDGTVDICRACHRPGESIRHIISGCSSLANGDYLHRHNLVARIIHQQLALKYNLVESEVPYYRYVPDPVLENGNCTLYWDRSIITDRTIVANKPDIVVIDRLERRAMIVDIAVPHDENLVKTEKDKQTKYLDLAREVVDMWDVNTAVIVPIVVTANGIIAKSLDQHLKRLSLGSWIKGLIQKAVLLDTARIVRRFLSQGP

SEQ ID NO: 10117 - protein, 1197 aa, Mamestra brassicae
MLTRSRARHLATHPSPSASSLSSASPPPEPSPTVSAVTPAVAVASSSSDEYFSPPTTPPPARRRRGRRPPDGLGPRGPPASDRVPAPGGSVQRMRWTQSINENVMRSYFGATEGGTNLTAYRGRMLSLFQVLEPAVNVSAQRLSDQVRVIQRNRMLDDSVLDRLRMEMCGHVITPPSQTVAPPQSQISSHADEESYDRVTNVSTQCNEELRSALECAIREYRYIPPKLRPRLLRLPMHNKNRALVAALDSQLSNYFDDCEDLTDTHSIMYCAAVAACRVAHVKMTNDRVTRPKPAVPAWQCRIERRIGGARALIGKLICFREGNTRPRVMRFVRRAFSGTDISPRDYMSRVTERIDFLKQKVYAWANRIRRYRRRVERYTQNRTFRSNERWVYRVWEQPDQGVTDTRLPDDDAMCSFWRNIWSVPVSHTEGGWIREVERACDPLPEMGAITISPQDVTRAVRPLPNWKSPGPDGLHNFWIKWLQRSHARLASQYQTALESGSLPEFLTTGVTHLLHKSGSTAEPKNYRPITVLPTVYKVLTSILRAKINNHINSNNIMSVSQNGCRNGSRGTKELLLIDMAISQQVRRSRKDLSTCWIDYKKAYDSVPYTWLMRVLELYKIDTMLRTFLMSCMGKWRTVLRYPGCRNIQRNSEPVRIERGIFQGDSLSPLWFCLALNPLSTLLENSGLGYRLKRGGQVISHLLYMDDLKLFAPSNLQLMELLKVTETFSSAIRMEFGVDKCAVMHVKRGEIIESVGTQLSDSINLRSLSSTETYKYLGMSEALGINVTDMKQSLRERFFGRLKKVFNSLLSGGNKVRAFNGWVMPVLMHSFGVLKWTQTELDALDRRVRTLLTAYRMHHPRSSVMRLYIPRKCGGRGFLNAKTLHNREICSLREYFLAVDVGMHRDVVTVDKGLTPLSLANENWRKPAVLDTNDRRAVWQSKELHGRFFRALHGPDVDQLASVAWLRFGDLFGETEGFVCVIMDEVIMTNNYRRFIVKDGTVDICRSCHRPGESIRHIVSGCSRLANGEYLHRHNLVARIIHQQLALKYSLVESEVPYYRYAPDPVLDNGNITLYWDRSIITDRTIVANKPDIVVVDRIERRAMIVDITVPHDENLVKAEKDKQIEYIDLAREVVDMWDVDSAIIVPIVVSANGLIATSLDQHLRRLSLGSWIKGLIQKAVLLDTARIVRRFLSLEP

SEQ ID NO: 10118 - protein, 1198 aa, Mamestra brassicae
MLTRAAAQRARLPPPASSLSSASPPPEPSPTVSAVIPAVAVASSSSDEYFSPPTSPPPARRRRGRRPPDGLGPRGPPASDRVPAPGGSVQRMRWTQTINENVMRSYYGATEGGTNLTAYRGRMLSLFQVLEPAVNVSAQRLSDQVRVIQRNRMLDDAVLDRLRLESRNGRVSAASPPAAVQIQSSVSPRPNIVGKDDDDGAISVSTQCNERLRSALEDAFREYRSTPLELRPRLPRLPMHNKNRALVCALDSQLANCFDSSEDLADTHSILYCAAAAACRVAHVKFPNSDRATRPAVPAWQCRIERRIGEARALIGKLICFREGNTRRRVMRFVRRAFSGTDTSPRDYLTRVTERIDFLKQKIYAWANRIRRYKRRVERYTQNRTFQSNERWVYRVWERPDQGVTDTRLPDDDVMCSFWRNIWSVPVSHTEGDWTREVERACDPIPEMGAITISPQDVARAVRPLPNWKSPGPDGLHNFWIKWFKRSHARLASQFQSALESGSLPQFLTTGITHLLHKSGNTAEPKNYRPITCLPTVYKVLTSILRAKINQHIETNSIMSASQNGCRNRSHGTKELLLIDVAISQQVRRSRRDLSTCWIDYKKAYDSGPHTWLMRVLELYKVDAVLRTFLMSCMGQWRTVLRYPGCRQIQANSDPIRIERGIFQSDSLSPLWFCLALNPLSTLLEGSGQGYRLRRGGQVISHLLYMDDLKLFAPNNLQLMKLLKVTETFSSAISMEFGVDKCAVMHVKRGEIMESVGTQLSDSIHLRSLSSTETYKYLGMSEALGINANDVKQSLKERFFGRLNKVLNSLLSGGNKVRAFNGWVMPVLMYSFGILKWTQTELDALDRRVRSLLTANRMHHPRSSVMRLYIPRKCGGRGFLNAKTLHNREICSLREFFLEADVGMHRDVVAVDKGLTALSLANENWRKPVVLDTNDRREVWQSKELHGRFYRVLHGPDVDFLASVAWLRFGDLFGETEGFVCAIMDEVMMTNNYRKYIVKDGTVDICRACHRPGESIRHIISGCSSLANGDYLHRHNLVARIIHQQLALKYNLVESEVPYYRYVPDPVLENGNCTLYWDRSIITDRTIIANKPDIVVIDRLERRAMIVDIAVPHDVNLVKTEKDKQTKYLDLAREVVDMWDVNTAVIVPIVVTANGIIGKSLDQHLKRLSLGSWIKGLIQKAVLLDTARIVRRFLSQGP

SEQ ID NO: 10119 - protein, 1200 aa, Mamestra brassicae
MLTRSRARAQTAQPTSSGSSLSSASQPPGPAPAVSPEIPVAAVASSSSDEYFSPPTTPPPARRRGRGRPPTSLGPRGPPASDRVPAIGGSVQRMRWTQTINENVMRSYYGATEGGTNLTAYRGRMLSLFQVLEPAVNVSAQRLSDQVRVILRNRMLDDAVLDRLRLESRSGRVSPASPPAAVQIQSSISPRSNNVGEDDDDGAISVSTQCNERLRSALEDAFREYRSTPPELRPRLPRLPMHNKNRALVCALDSQLTNCFDSSEDLADTHSILYCAAAAACRVAHVKFLNSDRATRPAVPAWQCRIERRIGEARALIGKLICFREGNTRRRVMRFVRRAFSGTDTSPRDYLTRVTERIDFLKQKIYAWANRIRRYKRRVERYTQNRTFQSNERWVYRAWERPDQGVTDTRLPDDDVMCSFWRNIWSVPVSHTEGDWIREVERACDPILEMGATTISPQDVARAVRPLPNWKSPGPDGLHNFWIKWFTGSHARLASQFQSALESGSLPQFLTTGITHLLHKSGSTAEPKNYRPITCLPTVYKVLTSILRAKINHHIESNSIMSASQNGCRNGSRGTKELLLMDIAISQQVRRSRKDLSTCWIDYKKAYDSVPHTWLMRVLELYKVDAVLRTFLMSCMGQWRTVLRYPGCRQIQVNGDPIRIERGIFQGDSLSPLWFCLALNPLSTLLEGSGQGYRLRRGGQVISHLLYMDDLKLFAPNNLQLMELLKVTETFSSAISMEFGVDKCAVMHVKRGEIMESVGTQLSDSIHLRSLSSTETYKYLGMSEALGINANDMKQSLKERFFGRLNKVLNSLLSGGNKVRAFNGWVMPVLMYSFGILKWTQTELDALDRRVRSLLTANRMHHPRSSVMRLYIPRKCGGRGFLNAKTLHNREICSLREFFLEADVGMHRDVVAVDKGLTALSLANENWRKPVVLDTNDRREVWQSKELHGRFYRVLHGPDVDFLASVAWLRFGDLFGETEGFVCAIMDEVMMTNNYRKYIVKDGTVDICRACHRPGESIRHIISGCSSLANGDYLHRHNLVARIIHQQLALKYNLVESEVPYYRYVPDPVLENGNCTLYWDRSIITDRTIVANKPDIVVIDRLERRAMIVDIAVPHDENLVKTEKDKQTKYLDLAREVVDMWDVNTAVIVPIVVTANGIIAKSLDQHLKRLSLGSWIKGLIQKAVLLDTARIVRRFLSQGP

SEQ ID NO: 10120 - protein, 1107 aa, Noctua fimbriata
MRWTQSINANVMRAYYGATEGGNNLTAYRVRMLSLFQVLEPAVNVSAQRLSDQVRVIQRNRMLDDTVLDRLRTEMQSSHVIATPPPQAVVPPQSTIIPNRDNDVSNDIVTNVSTQCNEEMRSALEGAIREYRFMQPDLRPRIPRLPMHNKNRALVAVLDSQLSNYFDNCEDLTDAHSILYCAAVAACRVAHVKFSDDRATRPKPAVPPWQYRIERRIGGARALIGKLICFREGNTRPRVMRFVRRAFSGTDISPRDYMSRITERIDFLKQKVYAWANRIRRYKRRVDRYTQNRTFQRDERWVYRAWERPDQGVADTRLPDDDAMCSFWRSIWSAPVSHTEGEWTQGVERACDLVPEMGAITISPQDVVRAVRPLPNWKSPGPDGLHNFWIKWFTRSHARLAILFQSALESGSLPEFLTTGITHLLHKSGSTAEPKNYRPITCLPTVYKVLTSILRAKINKHIDDNSIMSASQNGCRNGSRGTKELLLIDMAISQQVRRSRSDLSTCWIDYKKAYDSVPHTWLMRVLELYKVDATLRTFLMSCMGQWRTVLRYPGCRQIQRNSEPIRIERGIFQGDSLSPLWFCLALNPLSTLLEDSGLGYRLRRGGQVISHLLYMDDLKLFAPNDLQLMELLKVTETFSSAIRMEFGVDKCAVMHVKRGEIVESVGTQLSDSINLRSLSATETYKYLGMSEALGINVADMKQSLKERFFGRLKKVFNSLLSGGNKVRAFNGWVMPVLMYSFGILKWTQTELDALDRRVRTLLTAYRMHHPRSSVMRLYIPRKCGGRGFLNAKTLHNREICSLREYFLETDVGMHRDVVAVDKGLTPLSLAKENWRKPVVFDTNYRMEVWQSKELHGRFFRALHGPDVDLSASVAWLRSGDLFGETEGFVCAIMDEVMMTNNYRRFIVKDGTVDICRACHRPGESIRHIISGCSRLANGEYLHRHNLVARIIHQQLALKYNLVELEVPYYKYVPDPVLENGSITLYWDQSIITDRTIVANKPDIVVVDRSERRTMIIDITVPHDENLVKAEKDKKIKYLDLAREVVDMWDVDSAIIVPIVVSAHGLIAKSLDQYLRRLSLGSWIKGLIQKAVLLDTARIVRRFLSLEP

SEQ ID NO: 10121 - protein, 1198 aa, Noctua fimbriata
MLTRSAAARRARLLSPDPSLSSASPPPESSPIVSAVTPAVAVASSSSDEYFSPPTTPPPVRRRGGRRPPDGLGPRGPPASDRVPAPGGSVQRMRWTQSINENVMRSYYGATEGGNNLTAYRVRMLSLFQVLEPAVNVSAQRLSDQVRVIQRNRMLDDTVLDRLRTEMQSSHVITPSAQAVVLPQSSTITNRDNDVSNDMVTNVSTQCNEEMRSALEGAIREYRFMQPDLRPRIPRLPMHNKNRALVAVLDSQLSNYFDNCEDLTDAHSILYCAAVAACRVAHVKFFDDRATRPKPVVPPWQYRIERRIGGARALIGKLICFREGNTRPRVMRFVRRAFSGTDISPRDYMSRITERIDFLKQKVYAWASRIRRYKRRVDRYTQNRTFQRDERWVYRTWERPDQGVADTRIPDDDAMCSFWRSIWSVPVSHTEGEWTRKVERACDLVPEMGAITISPQDVVRAVRPLPNWKSPGPDGLHNFWIKWFTRSHARLAILFQSALESGSLPEFLTTGITHLLHKSGSTAEPKNYRPITCLPTVYKVLTSILRTKINKHIDDNTIMSASQNGCRNGSRGTKELLLIDMAISQQVRRSRRDLSTCWIDYKKAYDSVPHTWLMRVLELYKVDATLRTFLMSCMGQWRTVLRYPGCRQIQRNSEPIRIERGIFQGDSLSPLWFCLALNPLSTLLEDSGLGYQLRRGGQVISHLLYMDDLKLFAPNDLQLMELLKVTETFSSAIRMEFGVDKCAVMHVKRGEIVESVGTQLSDSINLRSLSATETYKYLGMSEALGINVADMKQSLKERFFGRLKKVFNSLLSGGNKVRAFNGWVMPVLMYSFGILKWTQTELDALDRRVRTSLTAYRMHHPRSSVMRLYIPRKCGGRGFLNAKTLHNREICSLREYFLETDVGMQRDVVAVDKGLTPLSLAKENWRKPLVLDTNDRMEVWQSKELHGRFFRALHGPDVDLSASVAWLRSGNLFGETEGFVCAIMDEVMMTNNYRRFIVKDGTVDICRACHRPGESIRHIISGCSRLANGEYLHRHNLVARIIHQQLALKYNFVESEVPYYKYVPDPVLENGSITLYWDQSIITDRTIVANKPDIVVVDRSERRTMIVDITVPHDENLVKAEKDKKIKYLDLAREVVDMWDVDSAIIVPIVVSAHGLIAKSLDQYLRRLSLGSWIKGLIQKAVLLDTARIVRRFLSLEP

SEQ ID NO: 10122 - protein, 1198 aa, Noctua fimbriata
MLTRSAARRARLSPPDPSLSSASPPPESSPVVSAVTPAVAVASSSSDEYFSPPTTPPPVRRRGGRRPPDGLGPRGPPASDRVPAPGGSVQRMRWTQSINANVMRAYYGATEGGNNLTAYRVRMLSLFQVLEPAVNVSAQRLSDQVRVIQRNRMLDDTVLDRLRTEMQSSHVIATPPPQAVVPPQSTIIPNRDNDVNNDIVTNVSTQYNEEMRSALEGAIREYRFMQPDLRPRIPRLPMHNKNRALVAVLDSQLSNYFDNCEDLTDAHSILYCAAVAACRVAHVKFSDDRATRPKPAVPPWQYRIERRIGGARALIGKLICFREGNTRPRVMRFVRRAFSGTDISPRDYMSRITERIDFLKQKVYAWANRIRRYKRRVDRYTQNRTFQRDERWVYRAWERPDQGVADTRLPDDDAMCSFWRSIWSVPVSHTEGEWTQGVERACDLVPEMGAITISPQDVVRAVRPLPNWKSPGPDGLHNFWIKWFTRSHARLAILFQSALESGSLPEFLTTGITHLLHKSGSTAEPKNYRPITCLPTVYKVLTSILRAKINKHIDDNSIISASQNGCRNGSRGTKELLLIDMAISQQVRRSRSDLSTCWIDYKKAYDSVPHTWLMRVLELYKVDATLRTFLMSCMGQWRTVLRYPGYRQIQRNSEPIRIERGIFQGDSLSPLWFCLALNPLSTLLEDSGLGYRLRRGGQVISHLLYMDDLKLFAPNDLQLMELLKVTETFSSAIRMEFGVDKCAVMHVKRGEIVESVGTQLSDSINLRSLSATETYKYLGMSEALGINVADMKQSLKERFFGRLKKVFNSLLSGGNKVRAFNGWVMPVLMYSFGILKWTQTELDALDRRVRTLLTAYRMHHPRSSVMRLYIPRKCGGRGFLNAKTLHNREICSLREYFLETDVGMHRDVVAVDKGLTPLSLAKENWRKPLVLDTNDRMEVWQSKELHGRFFRALHGPDVDLSASVAWLRCGDLFGETEGFVCAIMDEVMMTNNYRRFIVKDGTVDICRACHRPGESIRHIISGCSRLANGEYLHRHNLVARIIHQQLALKYNLVESEVPYYKYVPDPVLENGSITLYWDQSIITDRTIVANKPDIVVVDRSERRTMIVDITVPHDENLVKAEKDKKIKYLDLAREVVDMWDVDSAIIVPIVVSAHGLIAKSLDQYLRRLSLGSWIKGLIQKAVLLDTARIVRRFLSLEP

SEQ ID NO: 10123 - protein, 1198 aa, Noctua fimbriata
MLTRSAAARRARLLPPDPSLSSASPPPESSPIVSAVTPAVAVASSSSDEYFSPPTTPPPVRRRGGRRPPDGLGPRGPPASDRVPAPGGSVQRMRWTQSINENVMRSYYGATEGGNNLTAYRVRMLSLFQVLEPAVNVSAQRLSDQVRVIQRNRMLDDTVLDRLRTEMQSSHVITPSAQAVVLPQSSTITNRDNDVSNDMVTNVSTQCNEEMRSALEGAIREYRFMQPDLRPRIPRLPMHNKNRALVAVLDSQLSNYFDNCEDLTDAHSVLYCAAVAACRVAHVKFFDDRATRPKPVVPPWQYRIERRIDGARALIGKLICFREGNTRPRVMRFVRRAFSGTDISPRDYMSRITERIDFLKQKVYAWASRIRRYKRRVDRYTQNRTFQRDERWVYRAWERPDQGVADTRIPDDDAMCSFWRSIWSVPVSHTEGEWTREVERACDLVPEMGAITISPQDVVRAVRPLPNWKSPGPDGLHNFWIKWFTRSHARLAILFQSALESGSLPEFLTTGITHLLYKSGSTAEPKNYRPITCLPTVYKVLTSILRAKINKHIDDNSIMSASQNGCRNGSRGTKELLLIDMAISQQVRRSRRDLSTCWIDYKKAYDSVPHTWLMRVLELYKVDATLRTFLMSCMGQWRTVLRYPGCRQIQRNSEPIRIERGIFQGDSLSPLWFCLALNPLSTLLEDSGLGYQLRRGGQVISHLLYMDDLKLFAPNDLQLMELLKVTETFSSAIRMEFGVDKCAVMHVKRGEIVESVGTQLSDSINLRSLSATETYKYLGMSEALGINVADMKQSLKERFFGRLKKVFNSLLSGGNKVRAFNGWVMPVLMYSFGILKWTQTELDALDRRVRTLLTAYRMHHPRSSVMRLYIPRKCGGRGFLNAKTLHNREICSLREYFLETDVGMHRDVVAMDKGLTPLSLAKENWRKPLVLDTNDRMEVWQSKELHGRFFRVLHGPDVDLSASVAWLRSGDLFGETEGFVCAIMDEVMMTNNYRRFIVKDGTVDICRACHRPGESIRHIISGCSRLANGEYLHRHNLVARIIHQQLALKYNLVESEVPYYKYVPDPVLENGSITLYWDQSIITDRTIVANKPDIVVVDRSERRTMIVDITVPHDENLVKAEKDKKIKYLDLAREVVDMWDVDSAIIVPIVVSAHGLIAKSLDQYLRRLSLGSWIKGLIQKAVLLDTARIVRRFLSLEP

SEQ ID NO: 10124 - protein, 1198 aa, Noctua fimbriata
MLTRAAAKRARLSPPDPSLSSASPPPESSPVMSAVTPAVAVASSSSDEYFSPPTTPPPVRRRGGRRPPDGLGPRGPPASDRVPAPGGSVQRMRWTQSINENVMRSYYGATEGGNNLTAYRVRMLSLFQVLEPAVNVSAQRLSDQVRVIQRNRMLDDTVLDRLRTEMQSSHVIATPPPQAVVPPQSTIIPNRDNDVSNDMVTNVSTQCNEEMRSALEGAIREYRFMQPDLRPRIPRLPMHNKNRALVAVLDSQLSNYFDNCEDLTDAHSILYCAAVAACRVAHVKFFDDRATRPKPVVPPWQYRIERRIGGARALIGKLICFREGNTRPRVMRFVRRAFSGTDISPRDYMSRITERIDFLKQKVYAWASRIRRYKRRVDRYTQNRTFQRDERWLYRTWERPDQGVADTRIPDDDAMCSFWRSIWSVPVSHTEGEWTREVERACDLVPEMGAITISPQDVVRAVRPLPNWKSPGPDGLHNFWIKWFTRSHARLAILFQSALESGSLPEFLTTGITHLLHKSGSTAEPKNYRPITCLPTVYKVLTSILRAKINKHIDDNSIMSASQNGCRNGSRGTKELLLIDMAISQQVRRSRRDLSTCWIDYKKAYDSVPHTWLMRVLELYKVDATLRTFLMSCMGQWRTVLRYPGCRQIQRNSEPIRIERGIFQGDSLSPLWFCLALNPLSTLLEDSGLGYQLRRGGQVISHLLYMDDLKLFAPNDLQLMELLKVTETFSSAIRMEFGVDKCAVMHVKRGEIVESVGTQLSDSINLRSLSATETYKYLGISEALGINVADMKQSLKERFFGRLKKVFNSLLSGGNKVRAFNGWVMPVLMYSFGILKWTQTELDALDRRVRTLLTAYRMHHPRSSVMRLYIPRKCGGRGFLNAKTLHNREICSLREYFLETDVGMHRDVVAMDKGLTPLSLAKENWCKPLVLDTNDRMEVWQSKELHGRFFRALHGPDVDLSASVAWLRSGNLFGETEGFVCAIMDEVMMTNNYRRFIVKDGTVDICRACHRPGESIRHIISGCSRLANGEYLHRHNLVARIIHQQLALKYNLVESEVPYYKYVPDPVLENGSITLYWDQSIITDRTIVANKPDIVVVDRSERRTMIVDITVPHDENLVKAEKDKKIKYLDLAREVVDMWDVDSAIIVPIVVSAHGLIAKSLDQYLRRLSLGSWIKGLIQKAVLLDTARIVRRFLSLEP

SEQ ID NO: 10125 - protein, 1197 aa, Noctua fimbriata
MLTRSATRRARLLPPDPSLSSASPPPESSPTVSAVTPAVAVASSSSDEYFSPPTTPPPVRRRGGRRPPDGLGPRGPPASDRVPAPGGSVQRMRWTQSINENVMRSYYGATEGGNNLTAYRVRMLSLFQVLEPAVNVSAQRLSDQVRVIQRNRMLDDTVLDRLRTETLSSHVITPSAQAVVLPQSSTIPNRDNDVSNDMVTNVSTQCNEEMRSALEGAIREYRFMQPDLIPRIPRLPMHNKNRVLVAVLDSQLSNYFDNCEDLTDAHSILYCAAVAACRVAHVNFSDDRATRPKPAVPPWQYRIERRIGGARALIGKLICFREGNTRPRVMRFVRRAFSGTDISPRDYMSRITERIDFLKQKVYAWASRIRRYKRRVDRYTQNRTFQRDERWVYRTWERPDQGVADTRIPDDDAMCSFWRSIWSVPVSHTEGEWTREVEQACDLVPEMEAITISPQDVVRAVRPLPNWKSPGPDGLHNFWIKWFTRSHARLAILFQSALESGSLPEFLTTGITHLLHKSGSTAEPKNYRPITCLPTVYKVLTSILRAKINKHIDDNSIMSASQNGCRNGSRGTKELLLIDMAISQQVRRSRRDLSTCWIDYKKAYDSVPHTWLMRVLELYKVDATLRTFLMSCMGQWRTVLRYPGCRQIQRNSEPIRIERGIFQGDSLSPLWFCLALNPLSTLLEDSGLGYQLRRGGQVISHLLYMDDLKLFAPNDLQLMELLKVTETFSSAIRMEFGVDKCAVMHVKRGEILESVGTQLSDSINLRSLSATETYKYLGMSEALGINVADMKQSLKERFFGRLKKVFNSLLSGGNKVRAFNGWVMPVLMYSFGILKWTQTELDALDRRVRTLLTAYRMHHPRSSVMRLYIPRKCGGRGFLNAKTLHNREICSLREYFLETDVGMHRDVVAIDKGLTPLSLAKENWRKPLVLDTNDRMEVWQSKELHGRFFRALHGPDVDLSASVAWLRSGDLFGETEGFVCAIMDEVMMTNNYRRFIVKDGTVDICRACHRPGESIRHIISGCSRLANGEYLHRHNLVARIIHQQLALKYNLVESEVPYYKYVPDPVLENGSITLYWDQSIITDRTIVANKPDIVVVDRSERRTMIVDITVPHDENLVKAEKDKKIKYLDLAREVVDMWDVDSAIIVPIVVSAHGFIAKSLDQYLRRLSLGSWIKGLIQKAVLLDTARIVRRFLSLEP

SEQ ID NO: 10126 - protein, 1198 aa, Noctua fimbriata
MLTRAAAKRARLSPPDPSLSSASPPPESSPVMSAVTPAVAVASSSSDEYFSPPTTPPPVRQRGGRRPPDGLGPRGPPASDRVPAPGGSVQRMRWTQSINENVMRSYYGATEGGNNLTAYRVRMLSLFQVLEPAVNVSAQRLSDQVRVIQRNRMLDDTVLDRLRTEMQSSHVIATPPPQAVVPPQSTIIPNRDNDVSNDIVTNVSTQCNEEMRSALEGAIREYRFMQPDLRPRIPRLPMHNKNRALVAVLDSQLSNYFDNCEDLTDAHSILYCAAVAACRVAHVKFSNDRATRPKPAVPPWQYRIERRIGGARALIGKLICFREGNTRPRVMRFVRRAFSGTDISSRDYMSRITERIDFLKQKVYAWANRIRRYKRRVDRYTQNRTFQRDERWVYRAWERPDQGVADTRLPDDDAMCSFWRSIWSVPVSHTEGEWTQEVERACDLVPEMGAITISPQDVVRAVRPLPNWKSPGPDGLHNFWIKWFTRSHARLAILFQSALESGSLPEFLTTGITHLLHKSGSTAEPKNYRPITCLPTVYKVLTSILRAKINKHIDDNSIMSASQNGCRNGSRGTKELLLIDMAISQQVRRSRRDLSTCWIDYKKAYDSVPHTWLMRVLELYKVDATLRTFLMSCMGQWRTVLRYPGCRQIQRNSEPIRIERGIFQGDSLSPLWFCLALNPLSTLLEDSGLGYRLRRGGQVISHLLYMDDLKLFAPNDLQLMELLKVTETFSSAIRMEFGVDKCAVMHVKRGEIVESVGTQLSDSINLRSLSATETYKYLGMSEALGINVADMKQSLKERFFGRLKKVFNSLLSGGNKVRAFNGWVMPVLMYSFGILKWTQTELDALDRRVRTLLTAYRMHHPRSSIMRLYIPLKCGGRGFLNAKTLHNREICSLREYFLETDVGMHRDVVAVDKGLTPLSLAKENWRKPLVLDTNDRMEVWQSKELHGRFFRALHGPDVDLSASVAWLRSGDLFGETEGFVCAIMDEVMMTNNYRRFIVKDGTVDICRACHRPGESIRHIISGCSRLANGEYLHRHNLVARIIHQQLALKYNLVESEVPYYKYVPDPVLENGSITLYWDQSIITDRTIVANKPDIVVVDRSERRTMIVDITVPHDENLVKAEKDKKIKYLDLAREVVDMWDVDSAIIVPIVVSAHGLIAKSLDQYLRRLSLGSWIKGLIQKAVLLDTARIVRRFLSLEP

SEQ ID NO: 10127 - protein, 1195 aa, Noctua fimbriata
MLTRAAAKRARLSPPDPSLSSASPPPESSPVMSAVTPAVAVASSSSDEYFSPPTTPPPVRRRGGRRPPDGLGPRGPPASDRVPAPGGSVQRMRWTQSINENVMRSYYGATEGGNNLTAYRVRMLSLFQVLEPAVNVSAQRLSDQVRVIQRNRMLDDTVLDRLRTEMQSSHVIATPPPQAVVPPQSTIIPNRDNDVSNDIVTNVSTQCNEEMRSALEGAIREYRFMQPDLRPRIPRLPMHNKNRALVAVLDSQLSNYFDNCEDLTDAHSILYCAACRVAHVKFSNDRATRPKPAVPPWQYRIERRIGGARALIGKLICFREGNTRPRVMRFVRRAFSGTDISPRDYMSRITERIDFLKQKVYAWANRIRRYKRRVDRYTQNRTFQRDERWVYRAWERPDQGVADTRLPDDDAMCSFWRSIWSVPVSHTEGEWTQGVERACDLVPEMGAITISPQDVVRAVRPLPNWKSPGPDGLHNFWIKWFTRSHARLAILFQSALESGSLPEFLTTGIIHLLHKSGSTAEPKNYRPITCLPTVYKVLTSILRAKINKHIDDNSIMSASQNGCRNGSRGTKELLLIDMAISQQVRRSRRDLSTCWIDYKKAYDSVPHTWLMRVLELYKVDATLRTFLMSCMGQWKTVLRYPGCRQIQRNSEPIRIERGIFQGDSLSPLWFCLALNPLSTLLEDSGLGYRLRRGGQVISHLLYMDDLKLFAPNDLQLMELLKVTETFSSAIRMEFGVDKCAVMHVKRGEIVESVGTQLSDSINLRSLSATETYKYLGMSEALGINVADMKQSLKERFFGRLKKVFNSLLSGGNKVRAFNGWVMPVLMYSFGILKWTQTELDALDRRVRTLLTAYRMHHPRSSIMRLYIPRKCGGRGFLNAKTLHNREICSLREYFLETDVGMHRDVVAVDKGLTPLSLAKENWRKPLVLDTNDRMEVWQSKELHGRFFRALHGPDVDLSASVAWLRSGDLFGETEGFVCAIMDEVMMTNNYRRFIVKDGTVDICRACHRPGESIRHIISGCSRLANGEYLHRHNLVARIIHQQLALKYNLVKSEVPYYKYVPDPVLENGSITLYWDQSIITDRTIVANKPDIVVVDRSERRTMIVDITVPHDENLVKAEKDKKIKYLDLAREVVDMWDVDSAIIVPIVVSAHGLIAKNLDQYLRRLSLGSWIKGLIQKAVLLDTARIVRRFLSLEP

SEQ ID NO: 10128 - protein, 1198 aa, Noctua fimbriata
MLTRSAARRARLSPPDPSLSSASPPPESSPVVSAVTPAVAVASSSSDEYFSPPTTPPPVRRRGGRRPPDGLGPRGPPASDRVPAPGGSVQRMRWTQSINANVMRAYYGATEGGNNLTAYRVRMLSLFQVLEPAVNVSAQRLSDQVRVIQRNRMLDDTVLDRLRTEMQSSHVIATPPPLAVVPPQSTIIPNRDNDVSNDIVTNVSTQCNEEMRSALEGAIREYRFMQPDLRPRIPRLPMHNKNRALVAVLDSQLSNYFDNCEDLTDAHSILYCAAVAACRVAHVKFSDDRATRPKPAVPPWQYRIERRIGGARALIGKLICFREGNTRPRVMRFVRRAFSGTDISPRDYMSRITERIDFLKQKVYAWANRIRRYKRRVDRYTQNRTFQRDERWVYRAWERPDQGVADTRLPDDDAMCSFWRSIWSVPVSHTEGEWTQGVERACDLVPEMGAITISPQDVVRAVRPLPNWKSPGPDGLHNFWIKWFTRSHARLAILFQSALESGSLPEFLTTGITHLLHKSGSTAEPKNYRPITCLPTVYKVLTSILRAKINTHIDDNSIMSASQNGCRNGSRGTKELLLIDMAISQQVRRSRSDLSTCWIDYKKAYDSVPHTWLMRVLELYKVDATLRTFLMSCMGQWRTVLRYPGYRQIQRNSEPIRIERGIFQGDSLSPLWFCLALNPLSTLLEDSGLGYRLRRGGQVISHLLYMDDLKLFAPNDLQLMELLKVTETFSSAIRMEFGVDKCAVMHVKRGEIVESVGTQLSDSINLRSLSATETYKYLGMSEALGINVADMKQSLKERFFGRLKKVFNSLLSGGNKVRAFNGWVMPVLMYSFGILKWTQTELDALDRRVRTLLTAYRMHHPRSSVMRLYIPRKCGGRGFLNAKTLHNREICSLREYFLETDVGMHRDVVAVDKGLTPLSLAKENWRKPLVLDTNDRMEVWQSKELHGRFFRALHGPDVDLSASVAWLRCGDLFGETEGFVCAIMDEVMMTNNYRRFIVKDGTVDICRACHRPGESIRHIISGCSRLANGEYLHRHNLVARIIHQQLALKYNLVESEVPYYKYVPDPVLENGSITLYWDQSIITDRTIVANKPDIVVVDRSERRTMIVDITVPHDENLVKAEKDKKIKYLDLAREVVDMWDVDSAIIVPIVVSAHGLIAKSLDQYLRRLSLGSWIKGLIQKAVLLDTARIVRRFLSLEP

SEQ ID NO: 10129 - protein, 1198 aa, Noctua fimbriata
MLTRSAARRARLSPPDPSLSSASPPPESSPVVSAVTPAVAVASSSSDEYFSPPTTPPPVRRRGGRRPPDGLGPRGPPASDRVPAPGGSVQRMRWTQSINANVMRAYYGATEGGNNLTAYRVRMLSLFQVLEPAVNVSAQRLSDQVRVIQRNRMLDDTVLDRLRTEMQSSHVIATPPPQAVVPPQSTIIPNRDNDVSNDIVTNVSTQCNEEMRSALEGAIREYRFMQPDLRPRVPRLPMHNKNRALVAVLDSQLSNYFDNCEDLTDAHSILYCAAVAACRVAHVKFYDDRATRPKPVVPPWQYRIERRIGGARALIGKLICFREGNTRPRVMRFVRRAFSGTDISPRDYMSRITERIDFLKQKVYAWASRIRRYKRRVDRYTQNRTFQRDERWVYRAWERPDQGVADTRIPDDDAMCSFWRSIWSVPVSHTEGEWTREVERACDLVPEMGAITISPQDVVRAVRPLPNWKSPGPDGLHNFWIKWFTRSHARLAILFQSALESGSLPEFLTTGITHLLHKSGSTAEPKNYRPITCLPTVYKVLTSILRAKINKHIDDNSIMSASQNGCRNGSRGTKELLLIDMAISQQVRRSRSDLSTCWIDYKKAYDSVPHTWLMRVLELYKVDATLRTFLMSCMGQWRTVLRYPGCRQIQRNSEPIRIERGIFQGDSLSPLWFCLALNPLSTLLEDSGLGYRLRRGGQVISHLLYMDDLKLFAPNDLQLMELLKVTETFSSAIRMEFGVDKCAVMHVKRGEIVESVGTQLSDSINLRSLSATETYKYLGMSEALGINVADMKQSLKERFFGRLKKVFNSLLSGGNKVRAFNGWVMPVLMYSFGILKWTQTELDALDRRVRTLLTAYRMHHPRSSVMRLYIPRKCGGRGFLNAKTLHNREICSLREYFLETDVGMHRDVVAVDKGLTPLSLAKENWRKPLVLDTNDRMEVWQSKELHGRFFRALHGPDVDLSASVAWLRCGDLFGETEGFVCAIMDEVMMTNNYRRFIVKDGTVDICRACHRPGESIRHIISGCSRLANGEYLHRHNLVARIIHQQLALKYNLVESEVPYYKYVPDPVLENGSITLYWDQSIITDRTIVANKPDIVVVDRSERRTMIVDITVPHDENLVKAEKDKKIKYLDLAREVVDMWDVDSAIIVPIVVSAHDLIAKSLDQYLRRLSLGSWIKGLIQKAVLLDTARIVRRFLSLEP

SEQ ID NO: 10130 - protein, 1183 aa, Atethmia centrago
MIQSTLYLFVTSVYNNNNNKCTPTAAVASSSSDEYFSPPTTPPPVRRRGGRRPPDGLGSRGPPASDRVPAPGGSVKRMRWTQSVNENVMRSYYGATEGGNNLTAYRVRMLSLFQVLEPAVNVSAQRLSDQVRVIQRNHMLNDTVLDRLRSEMQRSHVIVPPSQTVVHSPQLSTNQADEGSDDRATNVSTQCNVELRSALEDAIREYRLMSPELRPRLPRLPMHKKNRALVAALDSQLSNYFDDCEDLTDTHSILYCAAVAVCRVAHVKFAKDSRTTRPKPTVPAWQCRIESRIGGARALIGKLICFREGNTRPRVMRFVRRAFSGTDIGPQDYMTRVTERIDFLKQKVYAWANRIRRYKRRVERYTQNRTFQSDERWVYRGWERPDQDVTDTRLPDDDVMCSFWRSIWSVPVSHTEGDWARKVERACDPIPEMGAITICPQDVARAVRPLPNWKSPGPDGLHNFWLKWFLRSHARLAAQYQTALESGSLPQFLTTGVTHLLHKSGSTAEPKNYRPITCLPTVYKLLTSILRAKINKHIDTNSIMSASQNGCRNGSRGTKELLLIDMTISQQVRRSRKDLSTCWIDYKKAYDSVPHTWLMRVLELYKVDATLRTFLISCMGQWRTVLRYPGCRNIQRNSEPIRIERGIFQGDSLSPLWFCLALNPLSTLLEDSGLGYRMRRGGQVISHLLYMDDLKLFASNNLQLMELLKITESFSSAIRMEFGVDKCAVMHVKRGKIVESVGTQLSDSINLRTLSASETYKYLGMSEALGINVTDMKQSLKERFFGRLKKVFNSLLSGGNKVRAFNGWVMPVLMYSFGILKWTQTELDALDRRVRTLLTAYRMHHPRSSVMRLYIPRKCGGRGFLNAKILHNREVCSLREYFLEADVGMHRDVVAVDKGLTPLSLAKENWRKLVVLDTNDRREVWQSKELHGRFFRALHEPDVDFQASVAWLRFGDLFGETEGFVCAIMDEVIMTKNYRRFIVKDGTVDVCRACHRPGESIRHIISGCSRLANEEYLHRHNLVARIIHQQLALKYSLVESEVPYYRYVPDPVLDNGNITLYWDRSIITDRTIVANKPDIVVVDRTERRAMIVDITVPHDGNLVKAEKDKQIKYLDLAREVVDMWDVDSAIIVPIVVSANGLIAKSLDQHLKRLTLDGWIKGLIQKAVLLDTARIVRRFLSLEP

SEQ ID NO: 10131 - protein, 1198 aa, Mesoligia furuncula
MLTRSALRKARLPPPDSSLSSASPPPVPSLTVSAVTTPAVAVASSSSDEYFSPPTTPPPARRRGGRRPPDGLGPRGPPASDRVPAPGGSVQRMRWTRSINENVMRSYYGATEGGNNLTVYRVRMLSLFQVLEPAVNVSAQRLSDQVRVIQRNHMLDDTVLDRLRSEMQSSHVIAPQPQTAVLLPQCNTIHADEGSNDRATNVSTQCNEKLRSALEDAIREYRFMSPEHRPRLPRLPMHNKNRALVAALDSQLSNYFDDCEDLTDTHSILYCAAVAACRVAHVKFANDSRATRPKPAIPAWQCRIERRIGGARALIGKLICFREGNTRPRVMRFVRRAFLGTDISPQDYMSCVTERIDFLKQKVYAWANRIRRYKRRVERYTQNRTFQSDERWVYRGWERPDQSVADTCLPDAEAMCSFWRSIWSVPVSHTEGDWAREVERACDPIPEMGAITICPQDVARAVRPLPNWKSPGPDGLHNFWIKWFLRSHARLASQFQTALESGSLPQFLTTGITHLLHKSGSTAEPKNYRPITCLPTVYKVFTSILRAKIDKHINTNSIMSVSQNGCKNGSRGTKELLLIDMAISQQVRRSRKDLSTCWIDYKKAYDSVPHTWLMRVLELYKVDATLRTFLMSCMGQWRFVLRYPGCRNIQRNSEPIRIERGIFQGDSLSPLWFCLALNPLSTLLEDSGLGYRLRRGGQVISHLLYMDDLKLFAPNNLQLMELLKVTQIFSSAIRMEFGVDKCAVMHVKRGEIVESVGTQLSDSTNLRALSASETYKYLGMSEALGINVTDMKQSLKERFFGRLKKVLNSLLSGGNKVRAFNGWVMPVLMYSFGILKWTQTELDALDRRVRTLLTANRMHHPRSSVMRLYIPRKCGGRGFLNAKTLHNREICSLREYFLETDVGMHRDVVAVDKGLTPLSLAKENWRKPVVLDTNDRMEVWQSKELHGRFFRALHGPDVDLLATVAWLRFGDLFGETEGFVCAIMDEVMMTNNYRRFIVKDDTVDICRACHRPGESIRHIISGCSRLANGEYLHRHNLVARIIHQQLALKYSLVESEVPYYRYVPDPVLENGNISLYWDRSIITYRTIVANKPDIVVVDRSERRAMIVDITVPHDENLVKAEKDKQIKYLDLAREVVDMWDVDSAIIVPIVVTANGLIAKSLDQHLRRLSLGSWIKGLIQRAVLLDTARIVRRFLSLEP

SEQ ID NO: 10132 - protein, 1198 aa, Mesoligia furuncula
MLTRSALRKARLPPPDSSLSSASPPPVPSLTVSAVTTPAAAVASSSSDEYFSPPTTPPPARRRGGRRPPDGLGPRGPPASDRVPAPGGSVQRMRWTQSINENVMRSYYGATEGGNNLTAYRVRMLSLFQVLEPTVNVSAQRLSDQVRVIQRNHMLDDTVLDRLRNEMQSSHVIAPQSQTAVVLPQSNTSHADEGSNDRATNVSTQCNEELRSTLEDAIQEYRFMSPELRPRLPRLPMHNKNRALVAVLDSQLSNYFDGCEDLTDTHSILYCATVAACRVAHVKFANDSRATRPKPAVPAWQCRIERRIGEARALIGKLTCFREGNTRPRVMRFVRRAFLGTDISPQDYMSCVTERIDFLKQKVYAWANRIRRYKRRVERYTQNRTFQSDQRWVYRDWERPDQSVTDACLPNDDAMCSFWRSIWSVPVSHTESDWTREVERACDPIPEMGAITICPQDVARAVRPLPNWKSPGPDGLHNFWIKWFTRSHARLASQFQTALESGSLPQFLTTGITHLFHKSGSTAEPKNYRPITCLPTVYKVLTSILRVKIDKHINTNSIMSASQNGCRNGSRGTKELLLIDMTISQQVRRFRKDLSTCWIDYKKAYDSVPHTWLMRVLGLYKVDTTLRTFLMSCMGQWRTVLRYPGCRNIQRNSEPIRIERGIFQGDSLSPLWFCLALNPLSTLLEDSGLGYRLRRGGQVISHLLYMDDLKLFAPNNLQLMELLKITETFSSAIRMEFGVDKCAVMHVKRGEIVESVGTQLSDSTNLRALSASETYKYLGMSEALGINVTDMKQSLKERFFGRLKKVFNSLLSGGNKVRAFNGWVMPVLMYSFGILKWTQTELDALDRKVRTLLTANRMHHPRSSVMRLYIPRKCGGRGFLNAKTLHNREICSLREYFLETDVGMHRDVVAVDKGLTPLSLGKENWRKPVVLDTNDRMEVWQSKELHGRFFRALHGPDVDLLASVAWLRFGDLFGETEGFVCAIMDEVMMTNNYRRFIVKDGTVDICRACHRPGESIRHIISGCSRLANGEYLHRHNLVARIIHQQLALKYSLVESEVPYYRYVPDPVLENGNITLYWDRSIITDRTIIANKPDIVVVDRSERRAMIVDITVPHDENLVKAEKDKQIKYLDLAHEVVDMWDVDSAIIVPIVVTANGLIAKSLDQHLKRLSLGSWIKGLIQKAVLLDTARIVRSFLSLEP

SEQ ID NO: 10133 - protein, 1198 aa, Mesoligia furuncula
MLTRSALRKARLPPPDSSLSSASPPPVPSLTVSAVTTPGAAVASSSSDEYFSPPTTPPPARRRGGRRPPDGLGPRGPPASDRVPAPGGSVQRMRWTQSINENVMRSYYGATEGGNNLTAYRVRMLSLFQVLEPAVNVSAQRLSDQVRVIQRNHMLDDTVLDRLRNEMQSSHVIAPQSQTAVVLPQSNTSHADEGSNDRATNVSTQCNEELRSTLEDAIQEYRFMSPELRPRLPRLPMHNKNRALVAVLDSQLSNYFDGCEDLTDTHSILYCAAVAACRVAHVKFANDSRATRPKPAVPAWQCRIERRIGEARALIGKLTCFREGNTRPRVMRFVRRAFLGTDISPQDYMSCVTERIDFLKQKVYAWANRIRRYKRRVERYTQNRTFQSDQRWVYRDWERPDQSVTDACLPDDDAMCSFWRSIWSVPVSHTESDWTREVERACDPIPEMGAITICPQDVARAVRPLPNWKSPGPDGLHNFWIKWFTRSHARLASQFQTALESGSLPQFLTTGITHLLHKSGSTAEPKNYRPITCLPTVYKVLTSILRVKIDKHINTNSIMSASQNGCRNGSRGTKELLLIDTTISQQVRRFRKDLSTCWIDYKKAYDSVPHTWLMRVLGLYKVDTTLRTFLMSCMGQWRTVLRYPGCRNIQRNSEPIRIERGIFQGDSLSPLWFCLALNPLSTLLEDSGLGYRLRRGGQVISHLLYMDDLKLFAPNNLQLMELLKITETFSSAIRMEFGVDKCAVMHVKRGEIVESVGTQLSDSTNLRALSASETYKYLGMSEALGINVTDMKQSLKERFFGRLKKVFNSLLSGGNKVRAFNGWVMPVLMYSFGILKWTQTELDALDRKVRTLLTANRMHHPRSSVMRLYIPRKCGGRGFLNAKTLHNREICSLREYFLETDVGMHRDVVAVDKGLTPLSLGKENWRKPVVLDTNDRMEVWQSKELHGRFFRALHGPDVDLLASVAWLRFGDLFGETEGFVCAIMDEVMMTNNYRRFIVKDGTVDICRACHRPGESIRHIISGCSRLANGEYLHRHNLVARIIHQQLALKYSLVESEVPYYRYVPDPVLENGNITLYWDRSIITDRTIIANKPDIVVVDRSERRAMIVDITVPHDENLVKAEKDKQIKYLDLAHEVVDMWDVDSAIIVPIVVTANGLIAKSLNQHLKRLSLGSWIKGLIQKAVLLDTARIVRRFLSLEP

SEQ ID NO: 10134 - protein, 1206 aa, Mesoligia furuncula
MLTRSRARQLLENTHPTSSGSPLSSASQLPDPAPDVSSVRPAAAVASSSSDEYFSPPTTPPPVCRRGRGRPPASLGLRGPPASDRVPAPGGSVQRMRWTQTVNENVMRSYFGATEGGSNLTAYRGRMLSLFQVLEPAVNVSAQRLSDQVRVIQRNHMLDNVVLDRLRLESRNSHVTPASSSVAVHLQNVPSVSPRPDHVHVEDDDEAISVSSQCNARLRSALEDAFREYRSIPPGLRPRLPRLPMHKKNKALVCALDSQLSNCFNNSKDLTDTHSILYCAAVAACRVAHVKFPNSDRAPRPKPAVPAWQCRIECRIGEARALIGKLICFREGNTRPRVMRFVRRAFSGTDISSRDYLSRVTERIDFLKQKIYAWANRIRRYRRRVERYTQNRTFQSDERWVYRAWERPDHGVTDTRLPDDGAMCSFWRNIWSVPVSHTEGDWTAKIERACDLIPEMGVLTISPQDVARAVRPLPNWKSPGPDGLHNFWIKWFQGSHARLASQFQSALESGLLPQFLTTGITHLLHKSGSTADPKNYRPITCLPTVYKILTCILKAKINKHIDTNSIMSVSQNGCKNGSRGTKELLLIDMTISQQVRRSRKDLSTCWIDYKKAYDSVPHTWLMRVLELYKVDTTLRTFLMSCMRQWRTVLRYPGCRNIQRNSEPIRIERGIFQGDSLSPLWFCLALNPLSTLLEDSGLGYRMRRGGQAISHLLYMDDLKLFAPNNLQLMELLKITETFSSAIRMEFGVDKCAVMHVKRGVIVESVGIQLSDSTNLRALSASETYKYLGMSEALAINVTDMKQSLKERFFGRLKKVFNSLLSGGNKVRAFNGWVMPVLMYSFGILKWTQTELDALDRKVRTLLTANRMHHPRSSVMRLYIPRKCGGRGFLNAKTLHNREICSLREYFLETDVGMHRDVVAVDKGLTPLSLGKENWRKPVVLETNDRMEVWQSKELHGRFFRALHGPDVDLLASVAWLRFGDLFGETEGFVCAIMDEVMMTNNYRRFIVKDGTVDICRACHRPGESIRHIISGCSRLANGEYLHRHNLVARIIHQQLALKYNLVESEVPYYRYVPDPVLENGNITLYWDRSIITDRTIVANKPDIVVVDRSERRAMIVDITVPHDENLVKAEKDKQVKYLDLAREVVDMWDVDSGIIVPIVVTANGLIAKSLDQHLKRLSLGSWIKGLIQKAVLLDTARIVRRFLSLEP

SEQ ID NO: 10135 - protein, 1198 aa, Mesoligia furuncula
MLTRLAARRARLPPPDSSLSSASPPPVPSLTVSAVTTPAVAVASSSSDEYFSPPTTPPPARRRGGRRPPDGLGPRGPPASDRVPAPGGSVQRMRWTRSINENVMRSYYGATEGGNNLTAYRVRMLSLFQVLEPAVNVSAQRLSDQVRVIQRNHMLDDTVLDRLRNEMQSSHVIAPQPQTAVLLPQCNTNHADEGSNDRATNVSTQCNEELRSALEDAIREYRFMSPEHRPRLPRLPMHNKNRALVAALDSQLSNYFDDCEDLTDTHSILYCAAVAVCRVAHVKFANDSRATRPKPAIPAWQCRIERRIGGARALIGKLICFREGNTRPRVMRFVRRAFLGTDISPQDYMSCVTERIDFLKQKVYAWANRIRRYKRRVERYTQNRTFQSDERWVYRSWERPDQSVADTCLPDDEAMCSFWRNIWSVPVSHTEGDWAREVERACDPIPEMGAITICPQDVARAVRPLPNWKSPGPDGLHNFWIKWFLRSHARLASQFQTALESGSLPQFLTTGFTHLLHKSGSTTEPKNYRPITCLPTVYKVLTSILRAKIDKHINTNSIMSVSQNGCKNGSRGTKELLLIDMAISQQVRRSRKDLSTCWIDYKKAYDSVPHTWLMRVLELYKIDATLRTFLMSCMGQWRTVLRYPGCRNIQRNSEPIRIERGIFQGDSLSPLWFCLALNPLSTLLEDSGLGYRLRRGGQVISHLLYMDDLKLFAPNNLQLMELLKVTQTFSSAIRMEFGVDKCAVMHVKRGEIVESVGTQLSDSTNLRALSASETYKYLGMSEALGINVTDMKQSLKERFFGRLKKVLNSLLSGGNKVRAFNGWVMPVLMYSFGILKWTQTELDALDRRVRTLLTANRMHHPRSSVMRLYIPRKCGGRGFLNAKTLHNREICSLREYFLETDVGMHRDVVAVDKGLTPLSLAKENWRKPVVLDTNDRMEVWQSKELHGRFFRALHGPDVDLLASVAWLRFGDLFGETEGFVCAIMDEVMMTNNYRRFIVKDGTVDICRACHRPGESIRHIISGCSRLANGEYLHRHNLVARIIHQQLALKYSLVESEVPYYRYVPDPVLENGNISLYWDRSIITDRTIVANKPDIVVVDRSERRAMIVDITVPHDENLVKAEKDKQIKYLDLACEVVDMWDVDSAIIVPIVVTANGLIAKSLDQHLRRLSLGSWIKGLIQKAVLLDTARIVRRFLSLEP

SEQ ID NO: 10136 - protein, 868 aa, Mesoligia furuncula
MRFVRRAFSGTDISSRDYLSRVTERIDFLKQKIYAWANRIRRYRRRVERYTQNRTFQNDERWVYRAWERPDQGVTDTHLPDDDAMCSFWRNIWSVPVSHTEGDWTTKIERACDLIPEMGVLTISPQDVARAVRPLPNWKSPGPDGLHNFWIKWFQGSHARLASQFQSALESGSLPQFLTTGITHLLHKSGSTADPKNYRPITCLPTVYKVLTSILRAKINKHIDTNSIMSVSQNGCGNGSRGTKELLLIDMTISQQVRRFRKDLSTCWIDYKKAYDSVPHTWLMRVLELYKVNTTLRTFLMSCMGQWRTVLRYPGCRNIQRNSEPIRIERGIFQGDSLSPLWFCLALNPLSTLLEDSGLGYRLRRGGQVISHLLYMDDLKLFAPNNLRLMELLKVTQTFSSAIRMEFGVDKCAVMHVKRGEIVESVGTQLSDSTNLRALSASETYKYLGMSEALGINATDMKQSLKERFFGRLKKVFNSLLSGGNKVRAFNGWVMPVLMYSFGILKWTQTELDALDRKVRTLLTANRMHHPRSSVMRLYIPRKCGGRGFLNAKTLHNREICSLRDYFLETDVGMHRDVVAVDKGLTPLSLGKENWRKPVVLDTNDRMEVWQRKELHGRFFRALHGPDEDLIASVAWLRFGDLFGETEGFVCAIMDEVMMTNNYRRFIVKDGTVDICRACHRPGESIRHIISGCSRLANGEYLHRHNLVARIIHQQLALKYSLVESEVPYYRYVPDPVLENGNITLYWDRSIITDRTIVANKPDIVVVDRSERRAMIVDITVPHDENLVNAEKDKQVKYLDLAREVVDMWDVDSAIIVPIVVTANGLIAKSLDQHLKRLSLGSWIKGLIQKAVLLDTARIVRRFFSLEP

SEQ ID NO: 10137 - protein, 1111 aa, Mesoligia furuncula
MRWTQTVNENVMRAYFGATEGGSNLTAYRGRMLSLFQVLEPAVNVSAQRLSDQVRVIQRNHMLDNVVLDRLRLESRNSHVTPASSLIAVQLQNVPSVSPRPDHVYVEDDDEAITVSSQCNARLRSALEDAFREYRSIPPGLRPRLPRLPLHKKNKALVCALDSQLSNCFNNSKDLTDTHSILYCAAVAACRVAHVKFPNSDRAPRPKPAVPAWQCRIECRIGEARALIGKLICFREGNTRPRVMRFVRRAFSGTDISSRDYLSRVTERIDFLKQKIYAWANRIRRYRRRVERYTQNRTFQNDERWVYRAWERPDQGVTDTPLPDDDAMCSFWRNIWSVPVSHTEGDWTAKIERACDLIPEMGVLTISPQDVARAVRPLPNWKSPGPDGLHNFWIKWFQGSHARLASQFQSALESGSLPQFLTTGITHLLHKSGSTADPKNYRPITCLPTVYKVLTSILRAKINKHIDTNSIMSVSQNGCRNGSRGTKELLLIDMTISQQVRRFRKDLSTCWIDYKKAYDSVPHTWLMRVLELYKVDTTLRTFLMSCMGQWRTVLRYPGCRNIQRNSEPIRIERGIFQGDSLSPLWFCLALNPLSTLLEDSGLGYRLRRGGQVISHLLYMDDLKLFAPNNLRLMELLKITETFSSAIRMEFGVDKCAVMHVKRGEIVESVGTQLSDSTNLRALSASETYKYLGMSEALGINVTDMKQSLKERFFGRLKKVFNSLLSGGNKVRAFNGWVMPVLMYSFGILKWTQTELDALDRKVRTLLTANRMHHPRSSVMRLYIPRKCGGRGFLNAKTLHNREICSLREYFLETDVGMHRDVVAVDKGLTPLSLGKENWRKPVVLDTNDRMEVWQSKELHGRFFRALHGPDVDLLASVAWLRFGDLFGETEGFVYAIMDEVMMTNNYRRFIVKDGTVDICRACHRPGESIRHIISGCSRLANGEYLHRHNLVARIIHQQLALKYSLVESEVPYYRYVPDPVLENGNITLYWDRSIITDRTIVANKPDIVVVDRSERRAMIVDITVPHDENLVKAEKDKQVKYLDLAREVVDMWDVDSAIIVPIVVTANGLIAKSLDQHLKRLSLGSWIKGLIQKAVLLDTARIVRRFLSLEP

SEQ ID NO: 10138 - protein, 1199 aa, Mesoligia furuncula
MLTRLAARRARLLPPDSSLSSASPPPVPSPTVSAVMTPAAAVASSSSDEYFSPPTTPPPARRRRGRRPPDGLGLRGPPASDRVPAPGGSVQRMRWTQSINENVMRSYYGATEGGNILTAYRVRMLSLFQVLEPAVNVSAQRLSDQVRVIQRNHMLDDTVLDRLRSEMQSSHVIAPQSQTAVILPQPNISHADEGSNDTAINVSTQCNEELRSALEDAIQEYRFMSPELRPRLPRLPMHNKNRALVAALDSQLSKYFDTCEDLIGTHSILYCAAVAACRVAHVKFANDSRATRPKQAVPAWQCRIERRIGGARTLIGKLICFREGNTRPRVMRFVRRAFSGTDISPQDYNMSCVTERIDFLKQKVYAWANRIRRYRRRVERYTQNRTFQSDERWVYRGWERPDQGVAETCLPDDDAMCSFWRNIWSVPVSHTEGDWTREVERACDPIPEMGAITICPQDVARAVRPLPNWKSPGPDGLHNFWIKWFPRSHALLASQFQAALKSGSLPQFLTTGITHLLHKSGSTAEPKNYRPITCLPTVYKVLTSILRTKINKHIDTNSIMSASQNGCRNGSRGTKELLLIDMAISQQVRRFRKDLSTCWIDYKKAYDSVPHTWLMRVLELYKVDTTLRTFLMSCMGQWRTVLRYPGCRNIQRNSEPIRIERGIFQGDSLSPLWFCLALNPLSTLLEDSGLGYRLRRGGQVISHLLYMDDLKLFAPNNLQLMELLKITETFSSAIRMEFGVDKCAVMHVKRGEIVESVGTQLSDSTNLRALSASETYKYLGMSEALGINVTDMKQSVKERFFGRLKKVLNSLLSGGNKVRAFNGWVMPVLMYSFGILKWTQTELDALDRRVRTLLTANRMHHPRSSVMRLYIPRKCGGRGFLNAKTLHNREICSLREYFLETDVGMHRDVVIVDKGLTPLSLAKENWRKPVVLDTNDRMEVWQSKELHGRFLRALRGPDVDLQASVAWLRFGNLFGETEGFVCAIMDEVMMTNNYRRFIVKDGTVDICRACHRPGESIRHIISGCSRLANGEYLHRHNLVARIIHQQLALKYNLVESEVPYYRYVPDPVLENGNITLYWDRSIITDRTIVANKPDIVVVDRSERRAMIVDITVPHDENLVKAEKDKQIKYLDLAREVVDMWDVDTAIIVPIVVTANGLIAKSLDQHLRRLSLGSWIKGLIQRAVLLDTARIVRRFLSLEP

SEQ ID NO: 10139 - protein, 1199 aa, Spilarctia lutea
MLTRARLRAQLSPPDSSLRSTLPSPEAITEVPVDAEASSSSSSDEFFSPPTSPIPVRRQGRGRPPTSLGSRGPLTSNRAPATGGDVRRMKWTHSINENVMRAYFRATELGTNLTAYRVRLVSLFQELEPSVNVSAQRLSDQVRAIQRCHLLDNAVLERIRSDIRNILIVPSSSHAVDLVPINTPQLPHDHYVDELVESEDISVSTQCNNKIRSALEDAIQEYRYVNWNNRPRLPRLPIHKRNLALVSALDSLLSDYFDNSEDLSDTHSILYCAAVAVCRVANVKFRENMTYVRPKNTIPAWQCRIERRIAETRTLIGKLVSFRSGNTRPRIMRFVKHAFSGTTISPGQYMSCVTERIDFLKQKVYAWANRIRRYRKRVDRYNQNRMFQRNEKWVYRKWEEPSQSVSDGQFPDDNATNTFWRSIWSVPVTHTEGDWCRDVERSCESILPMEPLTIGKDDVSCAARSLPNWKSPGPDGLHNFWLKWFRSSHACLASQFQAAVDSSSLPQFLTTGITHLLYKSGSAMDPKIFRPITCLPTVYKLLTSILRLKISTHINNNSIISVSQNGCRSGTRGTKELLIMDMTISQQVRRNRKSLATCWIDYKKAYDSVPHTWLLRVLELYKIDTTLCTFLKSCMGQWRTVLRYPGCRQSAMTDVLIKIERGIFQGDSLSPLWFCLALNPLSTLLEGSELGYRLRKDDRAISHLLYMDDLKLLAPTKLQLTELLKVTENFSNSIKMEFGVDKCAVMYVKKGLIVESEGIELSDSIKLRSLSATESYKYLGFSQSLGIPESDMKQALRERFFGRLKKVLKSLLSGGNKVRAYNGWVMPVLMYSFGVLRWTQTELDALDRRVRTLLTAFRMHHPRSSVMRLYIPRKFGGRGLLNIKTLHNREIYNLREYFLHTDVGIHRSVVAVDSGLTPLALAKENWRKPVVLSTNDRREIWRGKELHGRFYRALHGPDIDFKTSTSWLRYGDLFGETEGFVCAIMDEVIMTNNYRKYILKDGTVDICRACHRPGESIRHIISGCSRLANGEYLHRHNQVARIVHQQLALKYHLVNSEVPYYRYEPDPVLENGRATLYWDRSIITDRTIVANKPDIVVIDRLERRAIIIDIAVPHDENLVKVEKEKQIKYLDLSHEIVDMWNVDSVIIVPIVVSAHGLIAKSLDQHLKRLTLEGWIKGLIQKAVLLDTARIVRRFLSLES

SEQ ID NO: 10140 - protein, 1199 aa, Spilarctia lutea
MLTRARSRAQLSPPDSSHRSTLPSPEAITEVPVDAEASSSSSSDEFFSPPTSPIPVRRQGRGRPPTSLGSRGPLTSNRAPAAGGDVRRMKWTHSINENVMRAYFRATELGTNLTAYRVRLVSLFQELEPSVNVSAQRLSDQVRAIQRCHLLDDAVLERIRSDIRNVLIVPSSSHAVDLVPINTPQLPHDHYVDELVESEDISVSTQCNNKIRSALEDAIQEYRYVNCNNRPRLPRLPIHKRNLALVSALDSLLSDYFDNSEDLSDTHSILYCAAVAVCRVANVKFKENMTYVRPKNTIPAWQCRIERRIAETRTLIGKLVSFRSGNTRPRVMRFVKHAFSGTTISPGQYMSCVTERIDFLKQKVYAWANRIRRYRKRVDRYNQNRMFQRNEKWVYRKWEEPSPCVSDGQFPDDNATNTFWRSIWSVPVTHTEGDWCRDVERSCESIIPMEPLTISKDDVSCAARSLPNWKSPGPDGLHNFWLKWFRSSHACLASQYRAAVDSSSLPQFLTTGITHLIYKSGSAMDPKNFRPITCLPTIYKLLTSILRLKISTHINNNSIISVSQNGCRSGTRGTKELLIMDMTISQQVRRNRKSLATCWIDYKKAYDSVPHTWLLRVLELYKIDTTLCTFLKVCMGQWRTALRYPGCRQSAMNDVLIKIERGIFQGDSLSPLWFCLALNPLSTLLEGSGLGSRLQKDDRVISHLFYMDDLKLLAPTKLQLTALLKVTENFSNSIKMEFGVDKCAVMYVKKGEIVESEGIELSDSTKLRSLSATETYKYLGFSQSLGMPESDMKQTLRERFFSRLKKVLKSLLSGGNKVRACNGWVMPVLMYSFGVLRWTQTELDAIDRRVRTLLTAFRMHHPRSSVMRLYIPRRLGGRGLLNIKTLHNREVYNLREYFLQTDVGVHRSVVTVDTGLTPLALAKENWRKPVVLSTNDRREVWKGKELHGRFYRALHGPDIDFKTSTSWLRYGDLFGETEGFVCAIMDEVIMTNNYRKYILKDGTVDICRACHRPGESIRHIISGCSRLANGEYLHRHNQVARIVHQQLTLKYHLVNSEVPYYRYVPDPVLENGRATLYWDRSIITDRTIVANKPDIVVIDRLERRAIIIDIAVPHDENLVKVEKEKQIKYLDLSHEIVDMWNVDSAIIVPIVVSAHGLIAKSLDQHLKRLTLEGWIKGLIQKAVLLDTARIVRRFLSLEP

SEQ ID NO: 10141 - protein, 1197 aa, Spilarctia lutea
MLTRARRRALITSPDSSLRSALPSPEEAIEVPAGAEASSSSSSDEFFSPPTSPIPVRRQGRDRPPTSLGSRGPLTSNRAPATGGDVRRMKWTHSINENVMRAYFRATELGTNLTAYRVRLVSLFQELEPAVNVSAQRLSDQVRAIQRCHLLDDAVLERIGSDVRNTLTIPSSSHTVDVVVNTPQLPDNHDVDEQRESEIISVSTQCNDRIRSALEDAIQEYRYVNYNNRPRLPRLPIHKRNLALVGALNSLLPDYFGNSEDLSDTHSILYCAAIAVCRVVGVKFIERITTRTKNTVPAWQYRIERRIAETRTLIGKLISFKSGNTRPRVMRFVKQAFLGTTISPQQYMSSVTERIDFLKQKVCAWANRIRRYKKRGDRFNQNRMFQTNEKWVYRKWEAPNPCDRDGHLPDENATNTFWRNIWSVPVTHTDGDWMRDVKRSCESITNMEPVRINKEDVSCAVRSLPNWKAPGPDGLHNFWLKWFRSSHACLASQFQAALDSGSLPQFLTTGITHLLYKSGGTMDPKNFRPITCLPTLYKLLSSILRIKITTHINHNSILSISQNGCRSGTRGTKELLIIDMTISQQVRRNRRNLATCWIDYKKAYDSVPHTWLLKVLELYKIDKTLCTFLKSCMGQWRTVLRYPGCRQSPMTDVLIKIERGIFQGDSLSPLWFCLALNPLSTLLEGSELGYGLRKDDRVISHLLYMDDLKLLAPTKLQLTALLKITENFSNSIKMEFGVDKCAVMYVKKGLIVESEGVELSDSTKLRSLSVTEGYKYLGFTQSLGIPESDMKQALRERFFGRLKKVLKSLLSGGNKVRACNGWVMPVLMYSFGILRWTQTELDALDRGVRTLLTAFRMHHPRSSVMRLYIPRKLGGRGLLNIKTLHNREIYNLREYFLHTDVGMHRSVVAVDTGLTPLALAKENWRKPVVLSTDDRREVWKGKELHGRFYRALHGPDIDFKTSTSWLRYGDLFGETEGFVCAIMDEVIMTNNYRKYILKDGTVDICRACHRPGESIRHIISGCSRLANGEYLHRHNQVARIVHQQLALKYNLVISEVPYYRYVPDPVLENGRATLYWDRSIITDRTIVANKPDIVVIDRLERRAIIIDIAVPHDDNLVKVEKEKQIKYLDLSHEIVDMWNVDSVIIVPIVVSVHGLIARSLDQHLKRLTLDGWIKGLIQKAVLLDTARIVRRFLSLEP

SEQ ID NO: 10142 - protein, 1199 aa, Xestia c-nigrum
MLTRAAARRARLPPPDPSLSSASPPPEPSPIVSAVTPAVAVASSSSDEYFSPPTTPPPARRRGGRRPPDGLGPRGPPASDRVPAPGGSVQRMRWTKSNNENVMRAYYGATEGGINLTAYRVRMLSLFQVLEPAVNVSAQRLSDQVRVIQRNRMLDDTVLDRLRTEVQSSRVTATPPSQAVVPPQSTVTTPYCDGDVSSDMVTNVSTQCSEDMRSALEGAIREYRFMTPELRPRLPRLPMHNKNKMLMAVLDSQLSNYFDSCEDLTDIHSILYCAAVAACRVAHVKFSDDRATRPKPAVPAWQYRIEQRIGGARALIGKLICFREGNTRPRVMRFVRRAFSGTDISPRDYMFRVTERIDFLKQKVYAWASRIRRYKRRVDRYTQNRTFQRDERWVYRAWERPDQGVADTRLPDDDAMCSFWRSIWSVPVSHAEGEWTRVVERACDPVPEMGAITISPQDVACAVRPLPNWKSPGPDGLHNFWIKWFTRSHARLATLFQSALESGSLPEFLTTGITHLLHKSGSTAEPKNYRPITCLPTIYKVLTSILRAKITKHIDENSVMSASQNGCRNGSRGTKELLLIDMAISQQVRRSRKDLSTCWIDYKKAYDSVPHTWLRRVLELYKVDATLRTFLMSCMGQWRTVLRYPGCRQIQRNSEPIRIERGIFQGDSLSPLWFCLALNPLSTLLEDSGLGYRLRKDGRVISHLLYMDDLKLFAPNDFQLMELLKVTETFSSAIRMEFGVDKCAVMHVKRGGIVESVGTQLSDSINLRSLSATETYKYLGMSEALGISVADMKQSLKERFFGRLKKVFNSLLSGGNKVRAFNGWVMPVLMYSFGILKWTQTELDALDTKVRKLLTAYRMHHPRSSVMRLYIPRKCGGRGFLNAKTLHNREICSLREYFLAADVGMHRDVVAMDKGLTPLSLAKENWRIPVVFTTDDRRKEWQSKELHGRFYRALHGPDVDFQASVSWLRSGDLFGETEGFVCAIMDEVMMTNNYRRFIVKDGTVDICRACHRPGESIRHIISGCSRLANGEYLHRHNLVARIIHQQLALKYNLVESEVPYYRYVPDPVLVNGSITLYWDQSIITDRTVIANRPDIVVMDRSERRAMIVDITVPHDENLVKAEKDKQIKYLDLAREVVDMWEVESAIIVPIVVSAHGLIAKSLDQHLRRLSLGSWIKGLIQKAVLLDTARIVRRFLSMEP

SEQ ID NO: 10143 - protein, 1199 aa, Xestia c-nigrum
MLTRAAARRARLSPPDPSLSSASPPPEPSPIVSAVTPAVAVASSSSDEYFSPPTTPPPARRRGGRRPPDGLGPRGPLASDRVPAPGGSVQRMRWTQSNNENVMRAYYGATEGGINLTAYRVRMLSLFQVLEPAVNVSAQRLSDQVRVIQRNRMLDDTVLDRLRTEVQSSRVTATPPSQAVVPPQSTVTTPYCDGDVSSDMVTNVSTQCSEDMRSALEGAIREYRFMTPELRPRLPRLPMHNKNKMLMAVLDSQLSNYFDSCEDLTDIHSILYCAAVAACRVAHVKFSDDRATRPKPAVPAWQYRIEQRIGGARALIGKLICFREGNTRPRVMRFVRRAFSGTDISPRDYMFRVTERIDFLKQKVYAWASRIRRYKRRVDRYTQNRTFQRDERWVYRAWERPDQGVADTRLPDYDAMCSFWRSIWSVPVSHAEGEWTRVVERACDPVPEMGAITISPQDVACAVRPLPNWKSPGPDGLHNFWIKWFTRSHARLATLFQSALESGSLPDFLTTGITHLLHKSGSTAEPKNYRPITCLPTVYKVLTSILRAKITKHIDENSVMSASQNGCRNGSRGTKELLLIDMAISQQVRRSRKDLSTCWIDYKKTYDSVPHTWLRRVLELYKVDATLRTFLMSCMGQWRTVLRYPGCRQIQRNSEPIRIERGIFQGDSLSPLWFCLALNPLSTLLEDSGLGYRLRKDGRVISHLLYMDDLKLFAPNDLQLMELLKVTETFSSAIRMEFGVDKCAVMHVKRGGIVESVGTQLSDSINLRSLSATETYKYLGMSEALGISVADMKQSLKERFFGRLKKVFNSLLSGGNKVRAFNGWVMPVLMYSFGILKWTQTELDALDTKVRKLLTAYRMHHPRSSVMRLYIPRKCGGRGFLNTKTLHNREICSLREYFLAADVGMHRDVVAMDKGLTPLSLAKENWRIPVVFTTDDRRKEWQSKELHGRFYRALHGPDVDFQASVSWLRSGDLFGETEGFVCAIMDEVMMTNNYRRFIVKDGTVDICRACHRPGESIRHIISGCSRLANGEYLHRHNLVARIIHQQLALKYNLVESEVPYYRYVPDPVLNSGSITLYWDQSIITDRTVIANRPDIVVMDRSERRAMIVDITVPHDENLVKAEKDKQIKYLDLAREVVDMWEVDSAIIVPIVVSAHGLIAKSLDQHLRRLSLGSWIKGLIQKAVLLDTARIVRRFLSLEP

SEQ ID NO: 10144 - protein, 1199 aa, Xestia c-nigrum
MLTRAAARRARLSPPDPSLSSASPPPEPSPIVSAVTPAVAVASSSSDEYFSPPTTPPPARRRGGRRPPDGLGPRGPPASDRVPAPGGSVQRMRWTQSNNENVMRAYYGATEGGINLTAYRVRMLSLFQVLEPAVNVSAQRLSDQVRVIQRNRMLDDTVLDRLRTEVQSSRVTATPPSQAVVPPQSTVTTPYCDGDVSSDMVTNVSTQCSEDMRSALEGAIREYRFMTPELRPRLPRLPMHNKNKMLMAVLDSQLSNYFDSCEDLTDIHSILYCAAVAACRVAHVKFSDDRATRPKPAIPAWQYRIEQRIGGARALIGKLICFREGNTRPRVMRFVRRAFSGTDISPRDYMFRVTERIDFLKQKVYAWASRIRRYKRRVDRYTQNRTFQRDERWVYRAWERPDQGVADTRLPDDDAMCSFWRSIWSVPVSHAEGEWTRVVERACDPVPEMGAITISPQDVACAVRPLPNWKSPGPDGLHNFWIKWFTRSHARLATLFQSALESGSLPEFLTTGITHLLHKSGSTAEPKNYRPITCLPTVYKVLTSILRAKITKHIDENSVMSASQNGCRNGSRGTKELLLIDMAISQQVRRSRKDLSTCWIDYKKAYDSVPHTWLRRVLELYKVDATLRTFLMSCMGQWRTVLRYPGCRQIQRNSEPIRIERGIFQGDSLSPLWFCLALNPLSTLLEESGLGYQLRKDGRVISHLLYMDDLKLFAPNDLQLMELLKVTETFSSAIRMEFGVDKCAVMHVKRGGIVEFVGTQLSDSINLRSLSATETYKYLGMSEALGISVADMKQSLKERFFGRLKKVFNSLLSGGNKVRAFNGWVMPVLMYSFGILKWTQTELDALDTKVRKLLTAYRMHHPRSSVMRLYIPRKCGGRGFLNAKTLHNREICSLREYFLAADVGMHRDVVAMDKGLTPLSLAKENWRIPVVFTTDDRRKEWQSKELHGRFYRALHGPDVDFQASVSWLRSGDLFGETEGFVCAIMDEVMMTNNYRRFIVKDGTVDICRACHRPGESIRHIISGCSRLANGEYLHRHNLVARIIHQQLALKYNLVESEVPYYRYVPDPVLNSGSITLYWDQSIITDRTVIANRPDIVVMDRSERRAMIVDITVPHDENLVKAEKDKQIKYLDLAREVVDMWEVDSAIIVPIVVSAHGLIAKSLDQHLRRLSLGSWIKGLIQKAVLLDTARIVRRFLSLEP

SEQ ID NO: 10145 - protein, 1198 aa, Griposia aprilina
MLTRSAARRARPPPPDSSLSSASLPPVSSPTVSAVTTPAAVVASSSSDEYFSPPTTPPPVRRRGGHRPPDGLGPRGPPASDRVPAPGGSVQRMRWARSINENVMRSYYGATEGGNNLTAYRVRMLSLFQVLEPAVNVSAQRLSDQVRVIQRNHMLDDTVLDRLRNEMQSSHVIAPPSQTVVVLPQSNTSQADKESDDRATNVSTQCNDELRSALEDAIREYRFISPELRPRLPRLPMHNKNRVLVAALDAQLSNYFDDCVDLTDTHSILYCAAVAACRVAHVKFANDSRATRPKPAVPAWQCRIQRRIGGARALIGKLICFREGNTRPRVMRFVRRAFAGTNISPQDYMSCVTERIDFLKQKVYAWANRIRRYKRRVERYTQNRTFQRDERWVYRGWERPDQSVADTCLPDDDAMCSFWRNIWSVPVSHTEGDWTREVERACDSIPEMGAITICPQDVTRAVRPLPNWKSPGPDGLHNFWIKWFGRSHARLAAQYQVALESGSLPQFLTTGVTHLLHKSGSTAEPKNYRPIACLPTVYKVLTSILRDKINKHIDTNYIMSPSQNGCRNGSRGTKELLLIDMAISQQVRRSRKDLSTCWIDYKKAYDSVPHTWLMRVLELYKVEATLRTFLMSYMGQWRTVLHYPACRNTQRNSEPIRIERGIFQGDSLSPLWFCLALNPLSTLLEDSGLGYRLRRGGQVISHLLYMDDLKLFAPNNSQLMDLLKVTETFSSAIRMEFGVDKCAVMHVKRGEIVESVGTQLSDSINLRALSASETYKYLGMSEALGINGTDMKQSLKDRFFGRLKKVFNSLLSGGNKVRAFNGWVMPVLMYSFGILKWTQTELDALDRKVRTLLTANRMHHPRSSVKTLYIPRKCGGRGFLNAKTLHNREICSLREYFLEADVGMHRDVVTVDKGLTPLSLAKENWRKPVVLDTNDRMEVWQSKELHGRFFRALHGPDVDQLASVAWLRFGDLFGETEGFVCAIMDEVMMTNNYRRFIVKDGTVDICRACHRPGESIRHIISGCSRLANEEYLHRHNLVARIIHQQLALKYSLVESEVPYYRYVPDPVLENGHIILYWDRSIITDRTIVANKPDIVMVDRLERRAMIVDITVPHDGNLVKAEKDKQIKYLDLAREVVDMWDVDSAIIVPIVVTANGLIAKSLDQHLRRLSLGSWIKGLIQKAVLLDTARIVRRFLSLEP

SEQ ID NO: 10146 - protein, 1075 aa, Griposia aprilina
MLSLFQVLEPAVNVSAQRLSDQVRVIQRNHMLDDTVLDRLRNEIQSSHVIAPPSQTVVVLPQSNTSQADEESDDRATNVSTQCNDELRSALEDAIREYRFISPELRPRLPRLPMHNKNRVLVAALDAQLSNYFDDCVDLTDTHSILYCAAVAACRVAHVKFANDSRATRPKPAVPAWQCRIERRIGEARALIGKLICFREGNTRPRVMRFVRRAFAGTNISPQDYMSCVTERIDFLKQKVYAWANRIRRYKRRVERYTQNRTFQRDERWVYRGWERPDQGVADTCLPDDDAMCSFWRNIWSVPVSHTEGDWTREVERACDPIPEMGAITICPQDVTRAVRPLPNWKSPGPDGLHNFWIKWFGRSHARLAAQYQVALESGSLPQFLTTGVTHLLHKSGSTAEPKNYRPIACLPTVYKVLTSILRDKINKHIDTNYIMSPSQNGCRNGSRGTKELLLIDMAISQQVRRSRKDLSTCWIDYKKAYDSVPHTWLMRVLELYKVEATLRTFLMSCMGQWRTVLHYPACRNTQRNSEPIRIERGIFQGDSLSPLWFCLALNPLSTLLEDSGLGYRLRRGGQVISHLLYMDDLKLFAPNNSQLMDLLKVTETFSSAIRMEFGVDKCAVMHVKRGEIVESVGTQLSDSINLRALSASETYKYLGMSEALGINGTDMKQSLKDRFFGRLKKVFNSLLSGGNKVRAFNGWVMPVLMYSFGILKWTQTELDALDRKVRTLLTANRMHHPRSSVMRLYIPRKCGGRGFLNAKTLHNREICSLREYFLEADVGMHRDVVTVDKGLTPLSLAKENWRKPVVLDTNDRMEVWQSKELHGRFFRALHGPDVDQLASVAWLRFGDLFGETEGFVCAIMDEVMMTNNYRRFIVKDGTVDICRACHRPGESIRHIISGCSRLANEEYLHRHNLVARIIHQQLALKYSLVESEVPYYRYVPDPVLENGHITLYWDRSIITDRTIVANKPDIVMVDRLERRAMIVDITVPHDGNLVKAEKDKQIKYLDLAREVVDMWDVDSAIIVPIVVTANGLIAKSLDQHLRRLSLGSWIKGLIQKAVLLDTARIVRRFLSLEP

SEQ ID NO: 10147 - protein, 1198 aa, Griposia aprilina
MLTRSAARRARPPPPDSSLSSASLPPVSSPIVSAVTTPAAVVASSSSDEYFSPPTTPPPVRRRGGHRPPDGLGPRGPPASDRVPAPGGSVQRMRWTRSINENVMRSYYGATEGGNNLTAYRVRMLSLFQVLEPAVNVSAQRLSDQVRVIQRNHVLDDTVLDRLRNEMQSSHVIAPPSQTVVVLPQSNTSQADEESDDRATNVSTQCNDELRSALEDAIREYRFISPELRPRLPRLPMHNKNRVLVAALDAQLSNYFDDCVDLTDTHSILYCAAVAACRVAHVKFANDSRATRPKPAVPAWQCRIERRIGGARALIGKLICFREGNTRPRVMRFVRRAFAGIDISPQDYMSCVTERIDFLKQKVYAWANRIRRYKRRVERYTQNRTFQRDERWVYRDWERPDQGVADTCLPDDDAMCSFWRNIWSVPVSHTEGDWAREVERACDPIPEMGAISICPQDVTRAVRPLPNWKSPGPDGLHNFWIKWFGRSHARLAAQYQVALESGSLPQFLTTGVTHLLHKSGSTAEPKNYRPITCLPTVYKVLTSILRAKINKHIDTNSIMSPSQNGCRNGSRGTKELLLIDMAISQQVRRSRKDLSTCWIDYKKAYDSVPHTWLVRVLELYKVDATLRTFLKSCMGQWRTVLHYPGCRNIQRNNEPIRIERGIFQGDSLSPLWFCLALNPLSPLLEDSGLGYRLRRGGQVISHLLYMDDLKLFAPNNLQLMELLKVTETFSSAIRMELGVDKCAVMHVKRGEIVESVGTQLSDSINLRALSAFETYKYLGMSEALGINGTDMKQLLKERFFGRLKKVFNSLLSGGNKVRAFNGWFMPVLMYSFVILKWTQTELDALDRKVRTLLTANRMHHPRSSVMRLYIPRKCGGRGFLNAKTLHNREICSLREFFLEADVGMHRDVVTVDKGLTPLSLAKENWRKPVVLDTNDRMEVWQSKELHGRFFRALHGPDVDQLASVAWLRFGDLFGETEGFVCAIMDEVILTNNYRRHIMKDGTVDVCRACHRPGESIRHIISGCSRLANEEYLHRHNLVARIIHQQLALKYSLVESEVPYYRYVPDPVFENGHITLNWDRSIITDKTIVANKPDIVMVDRLERRAMIVDITVPHDGNLVKAEKDKQIKYLDLAREVVDMWDVDSAIIVPIVVTANGLIAKSLDQHLRRLSLGSWIKGLIQKAVLLATARIVRRFLSLEP

SEQ ID NO: 10148 - protein, 1205 aa, Omphaloscelis lunosa
MLTRSRARKLIDTHPTSSGSSLSSASQLPDPAPDVSPVIPVAAVASSSSDEYFSPPTTPPPTRQRGRGRPPASLGLRGPPASDRVPAPGGSVQRMRWTQTVNENVMRAYFGATEGGSNLTAYRGRMLSLFQVLEPAVNVSAQRLSNQVRVIQRNHMLDDVVLDRLRLESRNNHVTPASPLVTVQLQNLPSSSPRSDRVGEEDDDGVISVSSQCNVRLRSALEDAFREYRSIPPGLRPQLPRLPMHKKNKALMCTLDSLLSNCFDGSKDLADTHSILYCAAVAACRVAHVKFPNSDRAPRPKPAVPAWQCRIERRIGEARVLIGKLICFREGNTRPRVMRFVKRAFSGTDISFQDYLTRVTERIDFLKQKIYAWANRIRRYRRRVERYTQNRTFQSDERWVYRAWERPDQGVADTHLPDDDAMCSFWRSIWSVPVSHTEGDWTREVERACDPIPEMGAITICPQDVARAVRPLPNWKSPGPDGLHNFWIKWFQRSHARLASQFQSALESGSLPQFLTTGITHLLHKSGSTAEPKNYRPITCLPTVYKVFTSILRTKINKHIDTNSIMSASQNGCRNGSRGTKELLLIDMAINQQVRRSRRDLSTCWIDYKKAYDSVPHTWLMRVLELYKVNATLRTFLMSCMGQWRTVLRYPGCRQILRNSEPIRIERGIFQGDSLSPLWFCLALNPLSTLLEDSGLGYRLRRGGQVISHLLYMDDLKLFAPNNLQLLELLKVTETFSSAIRMEFGVDKCAVMHVKRGEIVESVGTQLSDSIQLRSLSSIETYKYLGMSEALGVNAADMKQSLKERFFNRLNKVLNSLLSGGNKVRAFNGWVMPVLMYSFGILKWTQTELDALDRRVRTLLTANRMHHPRSSVMRLYIPRKCGGRGFLNAKTLHNREVCSLREYFLEADVGMHRDVVTVDKGLTPLSLANENWRKPIVLDTNDRREVWQSKELHGRFYRALHGPDVDLLASVSWLRFGDLFGETEGFVFAIMDEVMMTNNYRKYIVKDGTVDICRACHRPGESIRHIISGCSRLANGDYLHRHNLVARIIHQQLALKYSLVESEVPYYRYVPDPVLENGNITLYWDRSIITDRTIVANKPDIVVIDRLERRTMIIDIAVPHDENLVKAEKDKQIKYLDLAREVVDMWDVDTAIIVPIVVTANGIIAKSLDQHLKRLSLGSWIKGLIQKAVLLDTARIVRRFLSQEP

SEQ ID NO: 10149 - protein, 975 aa, Omphaloscelis lunosa
MSPELRPRLPRLPMHNKNRALVAALDSQLSNYFDDCEDLTDTHSILYCAAVAVCRVAHVKFSNDSRATLPKPAVPAWQCRIERRIDGARTLIGKLICFREGNTRPRVMRFVRRAFLGTDISPQDYMTRVTERIDFLKQKVYAWANRIRRYKRRVERYTQNRTFQSDERWVYRAWERPNQGVTDTHLPDEDAMCSFWRSIWSVPVSHTEGDWTREVERACDSIPEMGAITICPQDVARAVRPLPNWKSPGPDGLHNFWIKWFVRSHARLAAQYQTALESGSLPQFLTTGVTHLLHKSGSTAEPKNYRPITCLPTVYKVLTSVLRAKINKHIDTNSIMSASQNGCRNGSRGTKELLLIDMAISQQVRRSRKDLSTCWIDYKKAYDSVPHTWLMRVLELYKVDITLRTFLMSCMGQWRTVLRYPGCRNIQRNSEPIRIERGIFQGDSLSPLWFCLALNPLSTLLEDSGLGYRLRRGGQVISHLLYMDDLKLFAPNNLHLMELLKVTETFSSAIRMEFGVDKCAVMHVKRGKIMESVGTQLSDSINLRALSASETYKYLGMSEALGINVTDMKQSLKERFFGRLKKVLNSLLSGGNKVRAFNGWVMPVLMYSFGILKWSQTELDALDRRVRTLLTAYRMHHPRSSVMRLYIPRKCGGRGFLNAKTLHNREICSLREYFLEADVGMHRDVVVVDKGLTPLSLAKENWRKPVVLDTKNRMEIWQSKELHGRYFRALHGPDVDLPASVAWLRCGDLFGETEGFVCAIMDEVMMTNNYRRFIVKDGTVDICRACHRPGESIRHIISGCSRLANEEYLHRHNLVARIIHQQLALKYSLVESEVPYYRYVPDPVLENGNITLYWDRSIITDRTIVANKPDIVVVDRGERSAMIIDITVPHDENLVKAEKDKQIKYLDLAREVVDMWDVDSAIIVPIVVTANGLIAKSLDQHLRRLSLGSWIKGLVQKAVLLDTARIVRRFLSLEP

SEQ ID NO: 10150 - protein, 1197 aa, Busseola fusca
MLTRSAAQRARLRPPDSSLSSASPPPVPSPSVSAVTTSAAVVASSSSDEYFSPPTTPPPARRRGGRRPPDGLGPRGPPASDRVPAPGGSVQRMRWTQAINENVMRSYYGATEGGNNLTAYRVRMLSLFQVLEPAVNVSAQRLSDQVRVIRRNHMLDDTVLDRLRTEMQSSRVIAHQSQTTVDPPQSTSYADEGSNDRATNVSTQCNEEIRNALETAIREYRSMSPELRPRLPRLPMHNKNRALVAALDAQLSNYFDACQNLTDTHSILYCAAVAACRVAHIKFDNNFRATRPKPAVPAWQCRIERRIGGARALIGKLICFREGNTRPRVMRFVKRAFSGTDISSQDYMSRVTERIDFLKQKVYAWANRIRRYKRRVERYTQNRTFQSNERWVYRGWERPDQVVADACLPDDDAMCSFWRSIWSVRVGHTEGDWAREVERACDPISEMETITISTQDIARAVRPLPNWKSPGPDGLHNFWIKWLTRSHARLASQFQSALESGSLPQFLTTGITHLLHKSGSTAEPKNYRPITCLPTIYKVLTSILRAKINKHIDTNSIMSVSQNGCRNGSRGTKELLLIDMAISQQVRRFRKDLSTCWIDYKKAYDSVPHTWLMRVLELYKVDATLRTFLMTCMGQWRTVLRYPGCRNIQRNSEPIRIERGIFQGDSLSPLWFCLALNPLSTLLEDSGLGYRLRRGGQVISHLLYMDDLKLFAPNNLQLMELLKITETFSSAIRMEFGVDKCAVMHVKRGVIVESVGTQLSGSTNLRALSASETYKYLGMSEALGINVTDMKQSLKERFFGRLKKVLNSLLSGGNKVRAFNGWVMPVLMYSFGILKWTQTELDALDRRVRTLLTANRLHHPRSSVMRLYVPRKCGGRGFLNAKTLHNREICSLREYFLEADVGMHRDVVAVDKGLTPLSLAKENWRKPVVLDTNDRLEVWQSKELHGRFYRALHGPDVDLLASVAWLRFGDLFGETEGFVCAIMDEVMMTNNYRRYIVKDGTVDICRACHRPGESIRHIISGCSRLANGEYLHRHNLVARIIHQQLALKYNLVESEVPYYRYVPGPVLENGNITLYWDRSIITDRTIVANKPDIVMVDRSERRAMIVDITIPHDENLVKAEKDKQIKYLDLAREVVDMWDVDSAIIVPIVVTANGLIAKSLDQHLRRLSLGSWIKGLIQKAVLLDTARIVRRFLSLEP

SEQ ID NO: 10151 - protein, 868 aa, Sesamia nonagrioides
MRFVRRAFSRTNTSPQNYMARVTERIDFLKQKVYAWANRIRRYKRRVERYTQNRTFQSNERRVYRDWERSEQGVTDTCLPDDDAMCSFWRSIWSVPVSHTEGDWARDVERACDPIPEMGAITICPLDVAHAVRPLPNWKSPGPDGLHNFWIKWFPRSHARLASQFQTALVSGSLPQFLTTGITHLLHKSGSTAEPKNYRPITCLPTVYKVLTSILKTKINKHIDSNSILSASQNGCRSGSCGTKELLLIDMAISQQVRRSRKDLSTCWIDYKKAYDSVPHTWLMRVLELYKVDATLRTFLMTCMRTWRTVLRYPGCRNIQRNSEPIRIERGIFQGDSLSPLWFCLALNPLSTLLEDSGLGYRLRRGGQVISHLLYMDDLKLFAPNNSQLNELLKITEIFSSSIRMEFGVDKCAVMHVKRGEIMEPVGTQLTSSINLRALSASETYKYLGMSEALGINVTDMKQSLKERFFGRLKKVLNSLLSGGNKVRAFNGWVMPVLMYSFGILKWTQTELDALDQRVRTLLTANRLHHPRSSVMRLYIPRKCGGRGFLNAKTLHNREICSLRDYFLETDVGMHRDVVAADKGLTPLSLANENWRKPVVLDTNDRMEVWKSKELHGRFFRALHGPDVDFQASVAWLRFGDLFGETEGFVFAIMDEVMMTNNYRRFIVKDGTVDICRACHRPGESIRHIISGCSRLANGEYLHRHNLVARIIHQQLALKYKLVESEVPYYRYMPDPVLENGHITLYWDRSIITDRTIVANKPDIVLVDRSERRAMIVDITIPHDENLVKAEKDKQIKYLDLAHEVVDMWEVDSAIIVPIVVTANGLIAKSLDQHLRRLSLGSWIKGLIQKAVLLDTARIVRKFLSLEP

SEQ ID NO: 10152 - protein, 1200 aa, Sesamia nonagrioides
MLTRSAARCARPPPPDSSLSSASPPPVSSPNVNAVMTPAAVVASSSSDEYFSPPTTPPPARRRGGRRPPDRLGPRGPSASDRVPAPGGSVQRMRWTQSINENVMRSYYGATEGGNNLTAYRVRMLSLFQVLEPAVNVSAQRLSDQVRVIQRNHMLDDVVLDRLRLESRNSHVTPASSLVAVQLNSVSPRPNHVDEEDDDRAISVSPQCNEKLRSALEDAFREYRSIPPEFRPRLPRLPMHKKNKALVCALDSQLSNYLKDSNDLNDTHSILYCGAVAICRVAHVKFPDSDRATRPKSAVPAWQCRIERRIGETRALIGKLISFREGNTRPRVMRFVRRAFSGTDTSTRDYLFRVTERIDFFKQKIYAWANRIRRYRRRVERYSQNRNFQSDERRVYRAWERSDQGVTDTCLPDDDATCSFWRNIWSVPVSHTEGSWTRVVERACDPVPEMGAITICPQDVARAVRPLPNWKSPGPDGLHNFWIKWFSGSHARLASQFQTALESGSLPQFLTTGVTHLLHKSGSTAEPKNYRPITCLPTVYKVLTSILKSKINTHIDSNSIMSASQNGCRSGSRGTKELLLIDMAISQQVRRSRKDLSTCWIDYKKAYDSVPHTWLMRVLELYKVDATLRTFLMTCMRTWRTVLRYPGCRNIQRNSEPIRIERGIFQGDSLSPLWFCLALNPLSTLLEDSGLGYRLRRGGQVISHLLYMDDLKLFAHTDSQLKELLKITETFSSSIRMEFGVDKCAVMHVKRGEIMESVGTQLTSSINLRALSASETYKYLGMSEALGINVTDMKQSLKERFFGRLKKVLNSLLSGGNKVRAFNGWVMPVLMYSFGILKWTQTELDALDRRVRTLLTANRLHHPRSSVMRLYIPRKCGGRGFLNAKTLHNREICSLRQYFLTTDVGMHRDVVAVDKGLTPLSLAKENWRKPVVLDTNDRMEVWKSKELHGRFFKALHGPDVDLQASVAWLRFGDLFGETEGFVCAITDEVMMTNNYRRFIVKDGTVDICRACHRPGESIRHIISGCSRLANGEYLHRHNLVARIIHQQLALKYNLVESEVPYYRYTPDPVLENDHITLYWDRSIITDRTIIANKPDIVLVDRSERRAMIVDITIPHDENLVKAEKDKQIKYLDLAHEVVDMWEVDSAIIVPIVVTANGLIAKSLDQHLRRLSLGSWIKGLIQKAVLLDTARIVRKFLSLEP

SEQ ID NO: 10153 - protein, 1048 aa, Sesamia nonagrioides
MKRNEMDDTVLDRLRNEMQSSRVIAHQSQTAEIPPQSTNYADEGSNDRATNVSTQCNEELINALEAAIREYRSTSAELRPRLPRLPMHNRNRALMAALDAQLSNYFDTCEDLTDTHSILYCAAVAACRVAHVKFPSDSRATRPKPVVPAWQHRIERRIGGARALIGKLICFREGNTRPRVMRFVRRAFAGTNISPQNYMARVTERIDFLKQKVYAWANRIRRYKRRVERYTQNRTFQNNERWVYRDWERPEQGVTDTCLPDDDVMCSFWRSIWSVPVSHTEGDWARDVERACDLIPEMGAITICPQDVACAVRPLPNWKSPGPDGLHNFWIKWFPRSHARLASQFQTALVSGSLPQFLTTGITHLLHKSGSTAEPKNYRPITCLPTVYKVLTSILKTKINKHIDSNSIMSASQNGCKSGSRGTKELLLIDMAISQQVRRSRKDLSTCWIDYRKAYDSVPHTWLMRVLELYKVDATLRTFLMSCMRTWRTVLRYPGCRNIQRNSEPIRIERGIFQGDSLSPLWFCLALNPLSTLLEDSGLGYRLRRGGQVISHLLYMDDLKLFAPNNSQLRELLKITETFSSSIRMEFGVDKCAVMHVKRGEIMESVGTQLTGSINLRALSASETYKYLGMSEALGINVTDMKQSLKERFFGRLKKVLNSLLSGGNKVRAFNGWVMPVLMYSFGILKWTQTELDALDQRVRTLLTANRLHHPRSSVMRLYIPRKCGGRGFLNAKTLHNREVCSLREYFLETDVGMHRDVVAADKGLTPLSLAKENWRKPVVLDTNDRLEVWKSKELHGRFFRALHGPDVDFQASVAWLRFGDLFGETEGFVFAIMDEVMMTNNYRRFIVKDGTVDICRACHRPGESIRHIISGCSRLANGEYLHRHNLVARIIHQQLALKYKLVESEVPYYRYMPDPVLENGHITLYWDRSIITDRTIVANKPDIVLVDRSERRAMIVDITIPHDENLVKAEKDKQIKYLDLAHEVVDMWEVDSAIIVPIVVTANGLIAKSLDQHLRRLSLGSWIKGLIQKAVLLDTARIVRKFLSLEP

SEQ ID NO: 10154 - protein, 1044 aa, Sesamia nonagrioides
MLDDTVLDRLRNEMQSSRVITHQSQSAEIPPQPTNYADEGSNDRATNVSTQCNEELRNALEAAIREYRFMSAELRPRLPRLPMHNRNRALMVALDAQLSNYFDTCENLTDTHSILYCAAVAACRVAHVKFSSDSRATRPKPVVPAWQHRIERRIGGARALIGKLICFREGNTRPRVMRFVRRAFSGTNTSPPNYMARITERIDFLKQKVYAWANRIRRYKRRVERYAQNRTFQSNQRCVYRDWERPEQGVADTCLPDDDAMCSFWRSIWSVPVSHTEGDWARDVERACDPIPEMGAITICPQDVARAVRPLPNWKSPGPDGLHNFWIKWFPRSHASLASQFQTALVSGSLPQFLTTGITHLLHKSGSTAEPKNYRPITCLPTVYKVLTSILKAKINNHIDSNSIMSVSQNGCRSGSRGTKELLLIDMAISQQVRRSRKDLSTCWIDYKKAYDSVLHTWLMRVLELYKVDTTLRTFLMTCMGQWRTVLRYPGCRNIQRNSEPIRIERGIFQGDSLSPLLFCLALNPLSTLLEDSGLGYRLRRGGQVISHLLYMDDLKLFAPNNLQLKELLKITETFSSAIRMEFGVDKCAVMHIKRGEIVESVGTQLTSSINLRALSASETYKYLGMSEALGINVTVMKQSLKERFFGRLKKVLNSLLSGGNKVRAFNGWVMPVLMYSFGILKWTQTELDALDQRVRTLLTANRLHHPRSSVMRLYIPRKCGGRGFLNAKTLHNREICSLREYFLETDVGMHQDVVVVDKGLTPLSLAKENWRKPVVLDANDRMEVWKSKELHGRFFRALHGPDVDLQASVAWLRFGDLFGETEGFVCAIMDEVMMTNNYRRFIVKDGTVDICRACHRPGESIRHIISGCSRLANGEYLHRHNLVARIIHQQLALKYNLVESEVLYYRYMPDPVLENGHITLYWDRSIITDRTIVANKPDIVMVDRSERRAMIVDITIPHDENLVKAEKDKQIKYLDLAHEVVDMWEVDSAIIVLIVVTANGLIAKSLDQHLRRLSLGSWIKGLIQKVVLLDTARIVRKFLSLEP

SEQ ID NO: 10155 - protein, 1200 aa, Sesamia nonagrioides
MLTRSAARRARSPPPDSSPSSASPPPVSSPTVNAVMTPAAAVALSSSDEYFSPPTTPPPVRRRGGRRPPDCLGPRGPPASDRAPATGGNVQRMKWTQSINENVMRAYFGATEGGSNLTAYRGRMLSLFQVLEPAVIVSAQRLSDQVRVIQRNHMLDDVVLDRLRLESRNSHVTPASSLVAVQLNSVPSRPNLVDEEDDDEAISVTPQCNEKVRSALEDAFREYRSTPPELRPRLPRLPMHKKNKALVCALDSQLSNYLKDSKDLADTHSILYCGAVAICRVAHVKFPDSDRATRPKPAVPAWQCRIERRIGETRALIGKLISFREGNTRPRVMRFVRRAFSGTDVSTRDYLLRVTERIDFLKQKIYAWANRIRRYRRRVERYSQNRNFQSDERWVYRAWERSDQGVTDTCLPDDDATRSFWRNIWSVPVSHTEGGWTRDVERACDPVPEMGAITICPQDVARAVRPLPNWKSPGPDGLHNFWIKWFSGSHACLASQFQTALESGSLPQFLTTGITHLVHKSGSTAEPKNYRPITCLPTVYKVLTSILKAKINTHIDSNSIMSASQNGCRNGSRGTKELLLIDMAISQQVRRSRKDLSTCWIDYKKAYDSVPHTWLMRVLELYKVDATLRTFLMTCLSQWRTVLRYPGCRNIQRNSEPIRIERGIFQGDSLSPLWFCLALNPLSTLLEDSGLGYRLRRGGQVISHLLYMDDLKLFAHTNSQLKELLKITETFSSAIRMEFGVDKCAVMHVQRGEIVESVGTQLTGSINLRSLSASETYKYLGMSEALGINVTDMKQSLKERFFGRLKKVLNSLLSGGNKVRAFNGWVMPVLMYSFGILKWTQTELDALDQRVRTLLTANRLHHPRSSVMRLYIPRKCGGRGFLNAKTLHNREVCSLREYFLKTDVGMHRDVVAVDKGLTPLSLAKENWRKPVVLETNDRMEVWQSKELHGRFFRALRGPDVDFQASVAWLRYGDLFGETEGFVCAIMDGVMMKNNYRKFIVKDGTVDICRACHRPGESIRHIISGCSRLANGEYLHRHNLVARIIHQQLALKYNLVESEVPYYRYMPDPVLENGHITLYWDRSIITDRTIVANKPDIVMVDRSERRAMIVDITIPHDENLVKAEKDKQIKYLDLAHEVVDMWEVDSAIIVPIVVTANGLIAKSLDQHLRRLSLGGWIKGLIQKAVLLDTARIVRKFLSLEP

SEQ ID NO: 10156 - protein, 966 aa, Sesamia nonagrioides
MFCDNQSVCYLLLLCRYCPRGCTVGMGNIIIIIIIIIAHTRQAACRVAHVKFPSDSRATRPKPVVPAWQHRIERRIGGARALIGKLICFREGNTRPRVMRFVRRAFSGTNTSPLNYMARVTERIDFLKQKVYAWANRIRRYKRRVERYTQNRTFQSNERRVYRDWERPEQGVTDTCLPDDDAMCSFWRSIWSVPVSHTEGDWARDVERACDPIPEMGAITICPQDVAHAVRPLPNWKSPGPDGLHNFWIKWFPRSHARLASQFQTALVSGSLPQFLTTGITHLLHKLGSTAEPKNYRPITCLPTVYKVLTSILKTKINKHIDSNSILSASQNGCRSGSRGTKELLLIDMAISQQVRRSRKDLSTCWIDYKKAYDSVPHTWLMRVLELYKVDATLRTFLMTCMRTWRTVLRYPGCRNIQRNSEPIRIERGIFQGDSLSPLWFCLALNPLSTLLEDSGLGYRLRRGGQVISHLLYMDDLKLFAPNNSQLNELLKITEIFSSSIRMEFGVDKCAVMHVKRGEIMEPVGTQLTSSINLRALSASETYKYLGMSEALGINVTDMKQSLKERFFGRLKKVLNSLLSGGNKVRAFNGWVMPVLMYSFGILKWTQTELDALDQRVRTLLTANRLHHPRSSVMRLYIPRKCGGRGFLNAKTLHNREICSLRDYFLETNVGMHRDVVASDKGLTPLSLAKENWRKPVVLDTNDRMEVWKSKELHGRFFRALHGPDVDFQASVAWLRFGDLFGETEGFVFAIMDEVMMTNNYRRFIVKDGTVDICRACHRPGESIRHIISGCSRLANGEYLHRHNLVARIIHQQLALKYNLVESEVPYYRYMPDPVLENGHITLYWDRSIITDRTIIANKPDIVLVDRSERRAMIVDITIPHDENLVKAEKDKQTKYLDLAHEVVDMWEVDSAIIVPIVVTANGLIAKSLDQHLRRLSLGSWIKGLIQKAVLLDTARIVRKFLSLEP

SEQ ID NO: 10157 - protein, 1197 aa, Sesamia nonagrioides
MLTRSAALRARPPPPDSLLSSASPPPVSSASVSAVTTPAAAVALSSSDEYFSPPTTPPPARRRGGRRPPDRLGPRGPSASDRVPAPGGSVQRMRWTQSINENVMRSYYGATEGGNNLTAYRVRMLSLFQVLEPAVNVSAQRLSDQVRVIQRNHMLDDTVLDRLRNEMQSSRVIAHQSQTAEIPPQSTNYADEGSNDRATNVSTQCNEELINALEAAIREYRYTSAELRPRLPRLPMHNRNRALMAALDAQLSNYFDTCEDLTDTHSILYCAAVAACRVAHVKFPSDSRATRPKPVVPAWQHRIERRIGGARALIGKLICFREGNTRPRVMRFVRRAFAGTNISPQNYMARVTERIDFLKQKVYAWANRIRRYKRRVERYTQNRTFQSNERWVYRDWERPEQGVTDTCLPDDDAMCSFWRSIWSVPVSHTEGDWARDVERACDPIPEMGAITICPQDVACAVRPLPNWKSPGPDGLHNFWIKWFPRSHARLASQFQTALVSGSLPQFLTTGITHLLHKSGSTAEPKNYRPITCLPTVYKVLTSILKTKINKHIDSNSIMSASQNGCKSGSRGTKELLLIDMAISQQVRRSRKDLSTCWIDYRKAYDSVPHTWLMRVLELYKVDATLRTFLMSCMRTWRTVLRYPGCRNIQRNSEPIRIERGIFQGDSLSPLWFCLALNPLSTLLEDSGLGYRLRRGGQVISHLLYMDDLKLFAPNNSQLRELLKITETFSSSIRMEFGVDKCAVMHVKRGEIMESVGTQPTDSINLRALSASETYKYLGMSEALGINVTDMKQSLKERFFGRLKKVLNSLLSGGNKVRAFNGWVMPVLMYSFGILKWTQTELDALDQRVRTLLTANRLHHPRSSVMRLYIPRKCGGRGFLNAKTLHNREVCSLREYFLETDVGMHRDVVAADKGLTPLSLAKENWRKPVVLDTNDRLEVWKSKELHGRFFRALHGPDVDFQASVAWLRFGDLFGETEGFVFAIMDEVMMTNNYRRFIVKDGTVDICRACHRPGESIRHIISGCSRLANGEYLHRHNLVARIIHQQLALKYNLVESEVPYYRYMPDPVLENGHITLYWDRSIITDRTIVANKPDIVLVDRSERRAMIVDITIPHDENLVKAEKDKQIKYLDLAHEVVDMWEVDSAIIVPIVVTANGLIAKSLDQHLRRLSLGSWIKGLIQKAVLLDTARIVRKFLSLEP

SEQ ID NO: 10158 - protein, 868 aa, Apamea monoglypha
MRFVRRAFLGTDIISQDYLSRVTERIDFLKQKVYAWANRIRRYKRRVERYTQNRTFQSDERWVYRGWERPDQDVADTCLPDDDAMCSFWRSIWSAPVSHTEGEWAREVERACDPIPEMEAITICPQDVARAVRPLPNWKSPGPDGLHNFWVKWFTRSHARLASQFQTALESGSLPQFLTTGVTHLLHKSGSTAEPKNYRPITCLPTVYKVLTSILRAKINKHIDTNSIMSASQNGCKNGSRGTKELLLIDMAISQQVRRSRKDLSTCWIDYKKAYDSVPHTWLMRVLDLYKVDATLRTFLMSCMGQWRTVLRYPGCRNIQRNSEPIRIERGIFQGDSLSPLWFCLALNPLSTLLEDSGLGYRLRRGGQVISHLLYMDDLKLFAPNNLQLMELLKVTETFSSDIRMEFGVDKCAVMHVKRGEIVESVGTQLSDSTNLRALSVSETYKYLGMSEALGINVTDMKQSLKERFFGRLKKVLNSLLSGGNKVRAFNSWVMPVLMYSFGILKWTQTELDALDRKVRTLLTANRMHHPRSSVMRLYIPRKCGGRGFLNAKTLHNREICSLREYFLETDVGMHRDVVAVDKGLTPLSLAKENWRKPVVLDTNDRMEVWQSKELHGRFYRALHGPDVDLLASVAWLRFGDLFGETEGFVCAIMDEVMMTNNYRRFIVKDGTVDICRACHRPGESIRHIISGCSRLANGEYLHRHNLVARIIHQQLALKYNLVESEVPYYRYVPDPVLENGNITLYWDRSIITDRTIVANKPDIVVVDRSERRAMIVDITVPHDENLVKAEKDKQIKYLDLAREVVDMWDVDSTVIVPIVVTANGLIAKSLDQHLRRLSLGSWIKGLIQKAVLLDTARIVRRFLSLEP

SEQ ID NO: 10159 - protein, 975 aa, Apamea monoglypha
MSPELRPRLPRLPMHNKNRAVVAVLDAQLSSYFDVCEDLTDTHSILYCAAVAACRVAHVKFASDSRATRPKPAIPPWQCRIERRIGGARALIGKLICFREGNTRPRVMRFVRRAFSGTDISSQDYLSHVTERIDFLKQKVYAWANRIRRYKRRVDRYTQNRTFQSDERWVYRGWERPDQGVADTCLPDDDTMYSFWRSIWSVPVSHTEGDWAREVERACDPIPEMEAITICAQDVARAVRPLPNWKSPGPDGLHNFWIKWFTRSHARLASQFQIALESGSQPQFLTTGVTHLLHKSASTAEPKNYRPITCLPTVYKVLTSILRAKINNHIDTNSIMSASQNGCKNGSRGTKELLLIDMAISQQVRRSRKDLSTCWIDYKKAYDSVPHTWLMRVLELYKVDTTLRTFLMTCMGQWRTVLRYPGCRNIQRNSEPIRIERGIFQGDSLSPLWFCLALNPLSTLLEDSGLGYRLRRGGQVISHLLYMDDLKLFAPNNLQLMELLKITETFSSAIRMEFGVDKCAVMHVKRGEIVESVGTQLSDSTNLRALSASETYKYLGMSEALGINVTDMKQSLKERFFGRLKKVLNSLLSGGNKVRAFNSWVMPVLMYSFGILKWTQTELDALDRRVRTLLTANRMHHPRSSVMRLYIPRKCGGRGFLNAKTLHNREICSLREYFLETDVGMHRDVVAVDKGLTPLSLAKENWRKPVVLDTNDRLEVWQSKELHGRFYRALHGPDVDLLASVAWLRFGDLFGETEGFVCAIMDEVMMTNNYRRFIVKDGTVDICRACHRPGESIRHIISGCSRLANGEYLHRHNLVARIIHQQLALKYSLVESEVPYYRYVPDPVLENGHITLYWDRSIITDRTIVANKPDIVVVDRSERRAMIVDITVPHDENLVKAEKDKQIKYLDLAREVVDMWDVDSAIIVPIVVTANGLIAKSLDQHLRRLSLGSWIKGLIQKAVLLDTARIVRRFLSLEP

SEQ ID NO: 10160 - protein, 975 aa, Apamea monoglypha
MSPELRPRLPRLPMHNKNRALVAVLDAQLSSHFDACEDLTDTHSILYCAAVAACRVAHVKFDSDSRATRPKPAIPAWQCRIERRIGGARALIGKLICFREGNTRPRVMRFVRRAFLGTDISSQDYLSRVTERIDFLKQKVYAWANRIRRYKRRVERYTQNRTFQSDERWVYRGWERPDQSVADTCLPDDDAMCSFWRSIWSAPVSHTEGDWTGKIERACELIPEMGAITICPQDVARAVRPLPNWKSPGPDGLHNFWIKWFQRSHAPLAAQFQSALESGLLPQFIMTGITHLLHKSGSTADPKNYRPITCLPTIYKVLTSILRAKINKHIDSNSIMSVSQNGCRNGSRGTKELLLIDMAISQQVRRSRKDLSTCWIDYKKAYDSVPHTWLMRVLELYKVDTTLRTFLMTCMGQWRTVLRYPGCRNIQRNSEPIRIERGIFQGDSLSPLWFCLALNPLSTLLDDSGLGYRLRRGGQVISHLLYMDDLKLFAPNNLQLMKLLKITETFSSAIRMEFGVDKCAVMHVKRGEIMESVGTQLSDFTNLRALSAAETYKYLGMSEALGINVTDMKQSLKERFFGRLKKVFNSLLSGGNKVRAFNSWVMPVLMYSFGILKWTQTELEALDRRVRTLLTANRMHHPRSSVMRLYIPRKCGGRGFLNAKTLHNREICSLREYFLETDVGMHRDVVAVDKGLTPLSLAKENWRKPVVLDTNDRMEVWQSKELHGRFYRALHGPDVDLLASVAWLRFGDLFGETEGFVCAIMDEVMMTNNYRRYIVKDGTVDICRACHRPGESIRHIISGCSRLANGEYLHRHNLVARIIHQQLALKYSLVESEVPYYRYVPDPVLENGNITLYWDRSIITDRTIVANKPDIVVVDRSERRAMIVDITVPHDENLVKAEKDKQIKYLDLAREVVDMWDVDSAIIVPIVVSANGLIAKSLDQHLRRLSLGSWIKGLIQKAVLLDTARIVRRFLSLEP

SEQ ID NO: 10161 - protein, 1196 aa, Furcula furcula
MLTRNKARLRPPGSLPRSASQSSRLNAEADGMPAAVASSESDEYFSPPTSPPPVCRRRGRPPRDMGRLGQPAPNRVLAPGGVVRRMKWTSSINESVMRAYYEATEGGTNLTAYRNRMLSLFQALEPAVNVSAQRLSDQVRAIQRGHMLDGPVLDRLRSEVQGSRVAPCIPSSQAVAPVVNTALLPRLAANSDDDRDDMTTDVSTNVSTQLRSTLEDVVREYRTMPQSLRPRLPRLPMHRRNRALVCALDSLLSSYFDSSEDLADAHALLYCAAITACRVARVKFPDAATRPKPAVPAWQYRIERRIGEARVLIGKLTCFREGNTRPRVMRFVRRAFSGTGIDPREYLSRVTERIDFLKQKVCAWANRIRRYRARVDRYSQNNMFQRDQRWVYRSWERPSQTVGEVQRPDDDAMIRFWRNIWSVPVAHSEGDWIGDVEEVCEPLPEMGPITIGPQDVADAVRPLPNWKAPGPDGLHNFWLKWLRSSHVCLASLFQSALESGSLPEFMTTGITHLLHKTDSTTNPKNYRPITCLPTVYKTLTSILRAKIYRHVEDNSIMSSSQNGCKSGARGTKELLLIDMAICQQARRNRKDLSTCWIDYKKAFDSVPHTWLMRVLELYKVNTTLRTFLASCMRQWRTVLLYPGSRQTLGNGDPIRIERGIFQGDSLSPLWFCLALNPLSTLLKSSGLGFRLRRGGQVISHLLYMDDLKLFAPTELQLTGLLKVTETFSNSIRMEFGVDKCAVMHVKRGRMVESRSVQLSDSTDLRTLSATETYKYLGMSQALNTNETDMKQSLRERFLGRLRKVLKSLLSGGNKVRAYNGWVMPVLMYSFGILKWTQTELDALDRTVRTLLTTYRMHHPRSSVMRLYIPRKCGGRGFLNAKTLHNREIYNLREYFLHCGGEMHTDVVAVDNGLTPLSLAKGNWRKPVVLTTGDREAVWQSKELHGRFYRALHGPDVDFSASVAWLRFGDLFGETEGFVCAIMDEVVMTNNYRKYILRDGTIDICRACHRPGESLRHIISGCSRLANGEYLHRHNQVARIIHQQLALKYRLVTSEVPYYRYVPEPVLEDGHITLYWDRSIITDRTIVANKPDIVLIDRTERRAMIVDVTVPHDENLVKAEKDKQCKYLDLAHEVVDMWDIDNAIIVPIVVSAHGLMAKSLDKHLKRLTLDGWIKGQMQKAVLLETARIVRKFLSLEP

SEQ ID NO: 10162 - protein, 1082 aa, Furcula furcula
MLSLFQTLEPAVNVSAQRLSDQVRAIQRGHMLDDAVLDRLRSEVQGSRVVPCIPSSQAVAPAVNTAPAPRLAATSGDDRDDMSTNISTNVSTQLRSTLEDVVREYRTMPQGLRPRLPRLPMHKRNRALVCALDSLLSSYFDSSEDLADAHSLLYCAAMTACRVARVKFPNSDAATRPRPAVPAWQCRIERRIGEARVLIGKLTCFREGNTRPRVMRFVRRAFSGTGIDPREYFSCVTERIDFLKQKVCAWANRIRRYRARVDRYSQNNMFQRDQRWVYRSWERPSQIGGEVQRPDDDAMIRFWRNIWSVPVTHSEGDWIRDVEQVCEPIPEMGAITIRPQDVADAVRPLPNWKAPGPDGLHNFWLKWLRSSHACLASLFQSAVESGSLPEFLTTGITHLLHKTNSTADPKNYRPITCLPTVYKTLTSILRAKIYRHVEGNSIMSASQNGCRSGARGTKELLLIDMAICQQARRNRRDLSTCWIDYKKAYDSVPHTWLVRVLELYKVNTTLRTFLASCMRQWRTVLLYPGSRQTLGDGEPIRIERGIFQGDSLSPLWFCLALNPLSTLLKSSGLGYRLRRGGQVISHLLYMDDLKLFAPTEVQLMGLLKVTETFSSSIRMEFGVDKCAVMHVKRGRLVESRSIQLSDSTDLRTLSATETYKYLGMSQALGINETDMKQSLRERFLGRLRKVLKSLLSGGNRVRAYNGWVMPVLMYSFGILKWTQTELDTLDRTVRTLLTAYRMHHPRSSVMRLYIPRKCGGRGFLNAKTLHNREIYNLREYFLHCGGEMHTDVVAVDSGLTPLSLAKGNWRRPVVLTTGDREAVWQSKELHGRFYRALHGPDVDFSASVAWLRFGDLFGETEGSVCAIMDEVVMTNNYRKYILRDGTIDICRACHRPGESLRHIISGCSRLANGEYLHRHNQVARIIHQQLALKYRLVTSEVPYYRYVPEPVLEDGHITLYWDRSIITDRSIVANRPDIVLIDRTERRAMIVDVTVPHDENLVKAEKDKECKYLDLAHEVVDLWDIDKAIIVPIVVSAHGLMAKSLDKHLKRLTLDGWIKGQMQKAVLLETARIVRKFLSLEP

SEQ ID NO: 10163 - protein, 1200 aa, Furcula furcula
MLTRSRNKARLRPPASSPRSAAQSPQLNQEANGTPAPVASSESDEYFSPPTSPPPVRRRRGRPPRELGLLEQPAPNRVLAPGGVVRRMRWTSSINENVMRAYYEATEGGTSLTAYRNRMLSLFQALEPAVNVSAQRLSDQVRAIQRSHMLDGAVLDRLRSEVQGSRVAPCTSSSQAVAPAVNTAPAPRLVAISDDDRDDITTNVSTNISTQLRSTLEDVVREYRTMPCGLRPRLPRLPMHKRNRALVCALDSLLSSYFDSSEDLADAHSLLYCAAMTACRVARVKLQNTDAATRPRPAVPAWQCRIERRIGEARVLIGKLTCCREGNTRPRVMRFVRRAFSGTGIDPREYLSRVTERIDFLKQKVCAWASRIRRYRARAGRYFQSNMFQRDQRWVYRSWERPSQTEGDVRRPDDDAMATFWRNIWSVPVAHSEGDWIGDIEQVCEPLPEMGAITIWPQDVADAVRLLPNWKAPGPDGLHNFWLKSIRSSHICLASLFQSALESGSLPEFMTTGITHLLHKTNSTTDPKNYRPITCLPTVYKTLTSILRTKIYRHVEDNSIMSASQNGCRSGARGTKELLLIDMAICQQARRNRKDLSTCWIDYKKAYDSVPHTWLMRVLELYKVNATLRTFLASCMRQWRTVLRYPGSRQTLGDGEPIRIERGIFQGDSLSPLWFCLALNPLSTLLKSSGLGYRLRRGGQVISHLLYMDDLKLFAPTVLQLMGLLRVTETFSNSIRMEFGVDKCAVMHVKRGRIVESRSVQLSDSTDLKTLSATETYKYLGMSQALGINETDMKQSLRDRFLGRLRKVLKSLLSGGNRVRAYNGWVMPVLMYSFGILKWTQTELDTLDRTVRTLLATYRMHHPRSSVVRLYIPRKCGGRGFLNAKTLHNREIYNLREYFLHCGGEMHTDVVAVDNGLTPLSLAKGNWRKPVVLTTGDREAVWQSKELHGRFYRALHGPDVDFSTSVAWLRFGDLFGETEGFVCAIMDEVVMTNNYRKYILRDGTIDICRACHRPGESLRHIISGCSRLANGEYLHRHNQVARIIHQQLALRYRLVTSEVPYYRYVPEPVLENGHITLYWDRSIITDRTIVANRPDIVLIDRTERRAMIVDVTVPHDENLVKAEKDKECKYLDLAHEVVDMWDIDKAIIVPIVVSAHGLMAKSLDKHLKRLTLDGWIKGQIQKAVLLETARIVRRFLSLEP

SEQ ID NO: 10164 - protein, 1080 aa, Spodoptera exigua
MLSLFQVLEPAVNVSAQRLSDQVRVIQRNRMLDDTVLDRLQTEMGSRASASSSRTVVPATLPLTSHGIVSAVADEESTDTFAHVSTQCIDELRSALECAIREYRYISPELRPRLPRLPMHNKNKALVAALDSQLSNYLDDCEDLGDTHSIMYCAAVAACRVAHVKFPTNDVTTRPKPAVPAWQRRFECRIAGARALMGKLICFREGNTRPRVMRFVRRAFSGTDISPRDYMSRVTERIDFLKQKVYAWANRIRRYRRRVERYTQNRTFRSNERWVYRTWERPDHGVTDRRLPDDDAMCSFWRSIWSVPVSHTEGDWIRDVERACDPIPQMGTINISPQDVARAVRPLPNWKSPGPDGLHNFWIKWFTRAHARLACQFQSAVESGSLPKFLTTGVTHLLHKSGSTAEPKNYRPITCLPTVYKVLTSILRSKINSHIDKNKIMSTAQNGCKNGSRGTKELLLIDMAISQQVRRARKDLSTCWIDYKKAYDSIPHTWIMRVLELYKIDTILRTFLMSCMRQWSTVLRYPGCRHTQRNSEPVRIERGIFQGNSLSPLWFCLALNPLTTLLENSGLGYRLKRGGQVISHLLYMDDLKLFAPNKLQLMELLKLTETFSSAIRMEFGVDKCAIMHVKRGEVVESVGTQLTDSINLRSLSPTETYKYLGMSEALGINVTDMKQSLKERFFGRLKKVFNSFLSGGNKVRAFNGWVIPVLMYSFGVLKWSQTELDALDRQVRTMLTAYRMHHPRSSVMRLYIPRKCGGRGFLNAKTLHNREVCSLREYFLAADVDMHRDVVAVDKGLTPLSLAIENWRKPVVLDTNARREVWQSKELHGRFFRALHGPDVDQVASVAWLRFGDLFGETEGFVCAIMDEVIMTNNYRKFIVKEGTVDICRACHRLGESIRHIISGCSRLANGEYLHRHNLVARIIHQQLALKYSLVESEVPYYRYEPDPVLDNGHITLYWDRSIITDRTIVANKPDIVVVDQKERRAMIVDIAVPHDENLVKAEKDKLIKYIDLAREVVDMWEVDSAIIVPIVVSANGLIAKSLDQHLRRLSLGGWIKGLIQKVVLLDTARIVRRFLSLEP

SEQ ID NO: 10165 - protein, 868 aa, Amphipyra berbera
MRFVRRAFSGTDINPRDYMSRVTERIDFLKQKVYAWANRIRRYKRRVERYTQNHMFHSDERWVYRTWERPDHDVNDTHPPDNDVMNTFWRNIWSMPVTHTEGDWMQEVQRACEPIEEMGDITIVPQDVTSAVRPMANWKSPGPDGLHNFWIKWLRSSHARLASQFQSSLESGSLPEFLTTGVTHLLHKSGSTAEPKNYRPITCLPTVYKLLTSILRAKINSHIINNSIMSVSQNGCKNGSRGTKELLLIDMAISQQVRRSRKDLSTCWIDYKKAYDSVPHTWLMRVLELYKVNTTLCAFLTSCMGQWRTVLHYPGCRQIQGRGEPIRIERGIFQGDSLSPLWFCLALNPLSTLLEGSGLGYRLRRGGQVISHLLYMDDLKLFAPNNLQLMKLLKVTETFSNSIRMEFGVDKCAVMHVKRGGIMESVGTQLSDSIHLRSLSSTETYKYLGMSEALGIHETDMKQSLRERFYGRLKKVLKSLLSGGNKVRAFNGWVMPVLMYSFGILKWTQTELDALDRRVRTLLTAYRMHHPRSSVMRLYIPRKCGGRGFLNAKTLHNREVCSLREYFLQADVGMHRDVVAVDKGFTPLSLAKENWRKPVVLDTNGRREVWQSKELHGRFYRALHGPDVDFLASVAWLRFGDLFGETEGFVCAIMDEVILTNNYRKYIVKDGTVDICRACHCPGESIRHIISGCSRLANGEYLHRHNLVARIIHQQLALKYNLVDAEVPYYKYVPDPVLENGHITLYWDRSIITDRTIVANKPDIVVIDRSERLAMIVDITVPHDENLVKAEKDKEIKYQDLAHEVVDMWEVDSAVIVPIVVTANGLIAKSLDQHLTRLALGSWIKGLMQKAVLLDTARIVRKFLSLRP

SEQ ID NO: 10166 - protein, 1208 aa, Amphipyra berbera
MLTRSRTKTQDTRTRPRPSASSLSSASQPPDSSIVSDVTPAAAVASSSSDEFYSPPTSPPPPPRRGRRGRGRPPACMGPRGPPASDRVPAPGGSVQRMRWTLTMNENCMRAYFGATEGGTNLTAYRGRMLSLFQVLEPTVNVSAQRLSDQVRVIQRDHRLTDAALDRLRSEVQSNRIISLQSQTAAQPQTPTVVPPLPIHADEESDDRVTNVSTQCNEQLRSALELAIREYRFTPPNIRPRIPRLPMHRKNRALMCALDSLLSSYFDNSENLEDTHSILYCAAVAACRVAHAKFDNNDRATRPKPAVPAWQCRIERRINEARALIGKLICFREGNTRPRVMRFVRRAFSGTDINPRDYLSRVTERIDFLKQKVYAWANRIRRYKRRVERYTQNRMFHSDERWVYRTWERSDHDVSDTHLPDNDVMNTFWRNIWSMPVTHAEGDWMQEVQRACEPIEEMGDITIVPQDVTSAVRPMANWKSPGPDGLHNFWLKWLRSSHARLASQFQSSLESGSLPEFLTTGVTHLLHKSGSTAEPKNYRPITCLPTVYKLLTSILRAKINSHIINNSIMSVSQNGCKNGSRGTKELLLIDMAISQQVRRSRKDLSTCWIDYKKAYDSVPHTWLMRVLELYKVNTTLCAFLTSCMGQWRTVLHYPGCRQIQGRGEPIRIERGIFQGDSLNPLWFCLALNPLSTLLEGSGLGYRLRRGGQVISHLLYMDDLKLFAPNNLQLMKLLKVTETFSNSIRMEFGVDKCAVMHVKRGGIMESVGTQLSDSIHLRCLSSTETYKYLGMSEALGINETDMKQSLRERFYGRLKKVLKSLLSGGNKVRAFNGWVMPVLMYSFGILKWTQTELDALDRRVRTLLTAYRMHHPRSSVMRLYIPRKCGGRGFLNAKTLHNREVCSLREYFLQADVGMHRDVVAVDKGFTPLSLAKENWRKPVVLDTNGRREVWQSKELHGRFYRALYGTDVDFLASVAWLRFGDLFGETEGFVCAIMDEVMMTNNYRKYIVKDGTVDICRACHCPGESIRHIISGCSRLANGEYLHRHNLVARIIHQQLALKYNLVDAEVPYYKYVPDPVLENGHITLYWDRSIITDRTIVANKPDIVVIDRSERLTMIVDITVPHDENLVKAEKDKEIKYQDLAHEVVDMWEVDSAVIVPIVVTANGLIAKSLDQHLTRLALGSWVKGLIQKAVLLDTARIVRKFLSLRP

SEQ ID NO: 10167 - protein, 962 aa, Amphipyra berbera
MHRKNRALMCALDSLLSSYFDNSENLEDTHSILYCAAVAACRVAHAKFDNNDRATRPKPTVPAWQCRIERRINEARALIGKLICFREGNTRPRVMRFVRRAFSGTDINPRDYMSRVTERIDFLKQKVYAWANRIRRYKRRVERYTQNRMFHSDERRVYRTWERPDHDVSDTHLPDNDVMNTFWRNIWSMPVTHTEGDWMQEVQRPCEPIEEMGDITIVPQDVTSAVRPMANWKSPGPDGLHNFWLKWLRSSHARLASQFQSSLESGSLPQFLTTGVTHLLHKSGSTAEPKNYRPITCLPTVYKLLTSILRSKISKHIANNSIMSVSQNGCKNGSRGTKELLLIDMAISQQVRRSRKNLSTCWIDYKKAYDSVPHTWLMRVLELYKVNTTLCAFLTSCMGQWRTVLHYPGCRQIQGRGEPIRIERGIFQGDSLSPLWFCLALNPLSTLLEGSGLGYRLRRGGQVISHLLYMDDLKLFAPNNLQLMKLLKVTETFSNSIRMEFGVDKCAVMHVKRGGIMESVGTQLSDSIHLRSLSSTETYKYLGMSEALGINETDMKQSLRERFYGRLKKVLKSLLSGGNKVRAFNGWVMPVLMYSFGILKWTQTELDALDRRVRTLLTAYRMHHPRSSVMRLYIPRKCGGRGFLNAKTLHNREVCSLREYFLQADVGMHRDVVAVDKGFTPLSLAKENWRKPVVLDTNGRREVWQSKELHGRFYRALYGPDVDFLASVAWLRFGDLFGETEGFVCAIMDEVMMTNNYRKYIVKDGTVDICRACHCPGESIRHIISGCSRLANGEYLHRHNLVARIIHQQLALKYNLVDAEVPYYKYVPDPVLENGHITLYWDRSIITDRTIVANKPDIVVIDRSERLAMIVDITVPHDENLVKAEKDKEIKYQDLAHEVVDMWEVDSAVIVPIVVTANGLIAKSLDQHLMRLSLGSWVKGLIQKAVLLDTARIVRKFLSLRP

SEQ ID NO: 10168 - protein, 1206 aa, Amphipyra berbera
MLTRSRAKAIAQNTRPRPSASSLSSASQPPDSSIVSDVTPAAAVASSSSDEYFSPPSTPPPPPRRRGRGRPPASLGPRGPPASDRVPAPGGSVQRMRWTPTMNENCMRAYFGATEGGTNLTAYRGRMLSLFQVLEPAVNVSAQRLSDQVRVIQRDHRLTDDALDRLRSEVQSNCIISLQSQTAAQPQVPPMVPPQPIRADEESDDRVTIVSAQCNEQLRSALELAIREYRFTPPNLRPRIPRLPMNRQNRALMCALDSLLSNYFDNSEGLEDTHSILYCAAVAACRVAHVKFDNNDRATRPKPAVPAWQCRIERRINEARALIGKLICFREGNTRPRVMRFVRRAFSGTDINPREYMSRVTERIDFLKQKIYAWANRIRRYKRRVERYTQNRMFHSDERWVYRTWERPEHDVSDTHLPDNDVMNTFWRNIWSMPVTHTEGDWMQEVQRACEPIEEMGDIIIVPQDVTSAVRPMANWKSPGPDGLHNFWLKWLRSSHARLASQFQSSLESGSLPPFLTTGITHLLHKSGSTAEPKNYRPITCLPTIYKLLTSILRAKINTHIINNSIMSASQNGCKNGSRGTKELLLIDMAISQQVRRSRKDLSTCWIDYKKAYDSVPHTWLMRVLELYKVNTTLCAFLTSCMGQWRTVLHYPGCRQIQGRGEPIRIERGIFQGDSLSPLWFCLALNPLSTLLEGSGLGYRLRRGGQVISHLLYMDDLKLFAPNNLQLMKLLKVTETFSNSIRMEFGVDKCAVMHVKRGGIMESVGTQLSDSIHLRSLSSTETYKYLGMSEALGINETDMKQSLRERFYGRLKKVLKSLLSGGNKVRAFNGWVMPVLMYSFGILKWTQTELDALDRRVRTLLTAYRMHHPRSSVMRLYIPRKCGGRGFLNAKTLHNREVCSLREYFLQADVGMHRDVVAVDKGFTPLSLAKENWRKPVVLDTNGRREVWQSKELHGRFYRALHGPDVDFLASVAWLRFSDLFGETEGFVCAIMDEVMMTNNYRKYIVKDGTVDICRACHCPGESIRHIISGCSRLANGEYLHRHNLVARIIHQQLALKYNLVDAEVPYYKYVPDPVLENGHITLYWDRSIITDRTIVANKPDIVVIDRTERLTMIVDITVPHDENLVKAEKDKEIKYQDLAHEVVDMWEVDSAVIVPIVVTANGLIAKSLDHHLTRLSLGSWVKGLIQKAVLLDTARIVRKFLSLRP

SEQ ID NO: 10169 - protein, 1203 aa, Amphipyra berbera
MLTRARARKQTAHPRSPDSSLSSASQPPESSPPVSAVTPATAVASSSSDEYYSPPSSPPPVRRRGGARPPACLGPRGQPATNRVPAAGGNVSRMRWTQSINENVMRAYYGATEGGINLTAYRERMLFLFQVLEPAINVSAQRLSDQVRVVQRNRRLDDTVLERLRSEARNSQTVTFPVQAAVQMQPLAVPPRPIHVDGEGDGEAINVSNQCSEELRSALDDAILEFQTTPPEIRPRLPRLPMHGKNRALMCALDSLLSNYFDGSEDLADTHSILYCTAIAACRVAHVKFTENERATRPKPAVPAWQSRIERRIGGARVLIGKLICFREGNNRPRVMRFVRRAFSGTDISPRDYMSRVTERIDFLKQKVYAWANRIRRYKRRVERYTQNRIFQSDQRRVYRAWERPDFGGGDVRLPDDDALSSFWRSIWSVPIAHTEDGWMRDIEQACEPIAEMEPITITPQDVADAARPLPNWKSPGPDGLHNFWLKWLRSSHARLASQFQSSLESGSLPQFLTTGVTHLLYKSGSTAEPMNYRPITCLPTVYKLLTSILRVKITTHIDNNCIMSASQNGCRKGSRGTKELLLIDMAISQQVRRSQKDLSTCWIDYKKAYDSVPHSWLMRVLELYKINTTLRTFLMSCMRHWRTVLRYPGCRRIRGSGEQIRIERGIFQGDSLSPLWFCLALNPLSTLLEGTGLGYQLRRGGQVISHLLYMDDLKLFAPTDLQLMELLKVTENFSNSIRMEFGVDKCAVMHVKRGRIAESEGIQLPNSVQLRSLSPTETYKYLGMSEALGISETDMRQSLRERFFGRLNKLLKSFISGGNKVRAFNGWVMPVLMYSFGTLKWTQADLDALDRRVRALLTAHRMHHPRSSVMRLYIPRKCGGRGFLNAKTLHNREVYSLREYFLQAEGVMHRDVVAVDKGFTPLALARENWRKPAVLSTNDREVVWQSKELHGRYYRALHGPDVDFSASVSWLRSGNLFGETEGFVCAIMDEVMMTNNYRKYIVKDGTVDICRACHRPGESIRHIVSGCSRLANGEYLHRHNLVARIIHQQLALKYNLVESEVPYYRYVPDPVLENGHATLYWDRSIITDRTIVANKPDIVVIDRSERRTMIVDITVPHDENLVKAEKDKQIKYLDLAHEVVGMWDVDSAVIVPIVVTANGIIAKSLDIHLMRLSLGGWIKGLIQRAVLLDTARIVRRFLSLEP

SEQ ID NO: 10170 - protein, 1208 aa, Amphipyra berbera
MQTRSRAKATVTQNTRPTTSASSLSSASQPPDSSVVSDVTPAAAVASSSSDEFFSPPTSPPPPPARRRGRGRPPASIGPRGPPASDRVPAPGGSVQRMRWTQSMNENCMRAYFGATEGGTNLTAYRGRMLSLFQVLEPAVNVSAQRLSDQVRVIQRDHRLTDVALDRLRSEVQSNRIISSQSQTAAQPRAPTVVPPPPIHADEESNDRVTNVSTQCNEQLRSALELAIREYRFTPPNLRPRIPRLPMHRKNRALMCALDSLLSSYFDNSENLEDTHSILYCAAVVACRVAHAKFDNNDRATRPKPTVPAWQCRIERRINEARALIGKLICFREGNTRPRVMRFVRRAFSGTDINPRDYMSRVTERIDFLKQKVYAWANRIRRYKRRVERYTQNHMFHSDERRVYRTWERPDHDVSDTHLPDNDVMNTFWRNIWSMPVTHTEGDWMQEVQGACEPIEEMGDITIVPQDVTSAVRPMANWKSPGPDGLHNFWLKWLRSSHARLASQFQSSLESGSLPQFLTTGVTHLLHKSGSTAEPKNYRPITCLPTVYKLLTSILRSKISKHIANNSIMSFSQNGCKNGSRGTKELLLIDMAISQQVRRSRKNLSTCWIDYKKAYDSVPHTWLMRVLELYKVNTTLCAFLTSCMGQWRIVLHYPGCRQIQGRGEPIRIERGIFQGDSLSPLWFCLALNPLSTLLEGSGLGYRLRRGGQVISHLLYMDDLKLFAPNNLQLMKLLKVTETFSNSIRMEFGVDKCAVMHVKRGGIMESVGTQLSDSIHLRSLSSTETYKYLGMSEALGINETDMKQSLRERFYGRLKKVLKSLLSGGNKVRAFNGWVMPVLMYSFGILKWTQTELDALDRRVRTLLTAYRMHHPRSSVMRLYIPRKCGGRGFLNAKTLHNREVCSLREYFLQADVGMHRDVVAVDKGFTPLSLAKENWRKPVVLDTNGRREVWQSKELHGRFYRALYGPDVDFLASVAWLRFGDLFGETEGFVCAIMDEVMMTNNYRKYIVKDGTVDICRACHCPGESIRHIISGCSRLANGEYLHRHNLVARIIHQQLALKYNLVDAEVPYYKYVPDPVLENGHITLYWDRSIITDRTIVANKPDIVVIDRSERLAMIVDITVPHDENLVKAEKDKEIKYQDLAHEVVDMWGVDSAVIVPIVVTANGLIAKSLDQHLMRLSLGSWVKGLIQKAVLLDTARIVRKFLSLRP

SEQ ID NO: 10171 - protein, 1210 aa, Amphipyra berbera
MLTRSRTKTQDTRTRPRPSASSLSSASQPPDSSIVSDVTPAAAVASSSSDEFYSPPTSPPPPPPPRRGRRGRGRPPACMGPRGPPASDRVPAPGGSVQRMRWTLTMNENCMRAYFGATEGGTNLTAYRGRMLSLFQVLEPTVNVSAQRLSDQVRVIQRDHRLTDAALDRLRSEVQSNRIISLQSQTAAQPQTPTMVLRLPIHADEESDDRVTNVSTQCNEQLRSALELAIREYRFTPPNIRPRIPRLPMHRKNRALMCALDSLLSSYFDNSENLEDTHSILYCAAVAACRVAHAKFDNNDRATRPKPTVPAWQCRIERRINEARALIGKLICFREGNTRPRVMRFVRRAFSGTDINPRDYLSRVTERIDFLKQKVYAWANRIRRYKRRVERYTQNRMFHSDERWVYRTWERPDHDVSDTHLPDNDVMNTFWRNIWSMPVTHTEGDWMQEVQRACEPIEEMGDITIVPQDVTSAVRPMANWKSPGPDGLHNFWLKWLRSSHARLASQFQSSLESGSLPEFLTTGVTHLLHKSGSTAEPKNYRPITCLPTVYKLLTSILRAKINSHIINNSIMSVSQNGCKNGSRGTKELLLIDMAISQQVRRSRKDLSTCWIDYKKAYDSVPHTWLMRVLELYKVNTTLCAFLTSCMGQWRTVLHYPGCRQIQGRGEPIRIERGIFQGDSLSPLWFCLALNPLSTLLEGSGLGYRLRRGGQVISHLLYMDDLKLFAPNNLQLMKLLKVTETFSNSIRMEFGVDKCAVMHVKRGGIMESVGTQLSDSIHLRPLSSTETYKYLGMSEALGINETDMKQSLRERFYGRLKKVLKSLLSGGNKVRAFNGWVMPVLMYSFGILKWTQTELDALDRRVRTLLTAYRMHHPRSSVMRLYIPRKCGGRGFLNAKTLHNREVCSLREYFLQADVGMHRDVVAVDKGFTPLSLAKENWRKPVVLDTNGRREVWQSKELHGRFYRALYGPDVDFLASVAWLRFGDLFGETEGFVCAIMDEVMMTNNYRKYIVKDGTVDICRACHCPGESIRHIISGCSRLANGEYLHRHNLVARIIHQQLALKYNLVDAEVPYYKYVPDPVLENGHITLYWDRSIITDRTIVANKPDIVVIDRSERLTMIVDITVPHDENLVKAEKDKEIKYQDLAHEVVDMWEVDSAVIVPIVVTANGLIAKSLDQHLTRLALGSWVKGLIQKAVLLDTARIVRKFLSLRP

SEQ ID NO: 10172 - protein, 1006 aa, Noctua janthe
MVTNVSTQCNEEMRCALEGAIREYQFMQPDLRPRIPCLPMHNKNRVLVAVLDSQLSKYFDNCEDLTDAHSILYCAAVAACRVAHVKFSDDRATRPKTAVPSWQYRIERRIGEGRALIGELICFREGNTRPRVMRFVRRAFSGTDISARDYMSRVTERIDFLTQKVYAWANRIRRYKRRVDRYTQNRTFQRDERWVYRAWERPDQGVADMRLLDDDAMCSFWRSIWSVPVSHTEGELTREVERACDLVPEMGAITISPQDVVRAVRPLPNWKSPGPDGLHNFWIKWFTRSHARLAILFQSALESGSLPEFLTTGITHLLHKSGSTAEPKNYRPITCLLTVYKVLTSILRAKINKHIDDNSVMSASQNGCRNGSRGTKELLLIDMAISQQVRRSRRDLSTCWIDYKKAYDSVPHTWLMRVLELYKVDSTLRIFLMSCMGQWRTVLRYPGCRQIQRNSEPIRIERGIFQGDSLSSLWFCLALNPLSTLLEDSGLSYRLRRGGQVISHLLYMDDLKLVALNDLQLMELLKITETFSSAIRMEFGVDKCAVMHVKRGEIVESVGTQLSDSIDLRSLSATEAYQYLGMSEALGINVADMKQSLKERFFGRLKKVFNSLLSGGNKVRAFNGWVMPVLMYSFGILKWTQTELDALDRRVRTLLTAYRMHHPRSSVMRLYIPRRCGGRGFLNAKTLHNREICSLREYFLETDVGMHRDVVAVDKGLTPLSLAKKNWRKPVVLDTNDRMEVWQSKELHGRFFRALHGPDVDLSASVAWLRSGDLFGETEGFVCAIMDEVMMTNNYRGFIVKDGTVDICRACHRPGESIRHIISGCSRLANGEYLHRHNLVARIIHQQLALKYNLVESEVPYYKYVPDPVLENGSITLYWDRSIVTDRTIVANKPDIVVVDRSERRAMIVDITVPHDFSAFTRFPLVKAEKDKQIKYFDLAHEVVDMWDVDSVIIVPIVVSAHGLIAKSLDQYLRRLSLGSWIKGLIQKAVLLDTARIVRRFLSLEP

SEQ ID NO: 10173 - protein, 1197 aa, Noctua janthe
MLTRSATRRARLSPPDPSLSSASPPPESSPIVSAVTPAVAVASSSSDEYFSPPTTPPPVRRRGGRRPPDGLGPRGPPASDRVPAPGGSVPRMRWTQSINANVMRAYYGATEGGNNLTAYRVRMLSLFQVLEPAVNVSAQRLSDQVRVIQRNGMLDDTVLDRLRTEMQSSHVIATPPQTVVPPQSTIIPTHDNNVSNDMVTNVSTQCNEEMRCALEGAIREYRFMQPDLRPRVPRLPMHNKNKVLVAVLDSQLSNYFDNCENLTDAHSVLYCAAVAACRVAHVKFSDDRATRPKPAVPSWQYRIERRIGEARALIGKLICFREGNTRPRVMRFVRRAFSGTDISARDYMSRVTERIDFLKQKVYAWANRIRRYKRRVDRYTQNRTFQRDERWVYRAWERPDQGVADTHLPDDDAMCSFWRSIWSVPVSHTEGEWTREVERACDLVPAMGAITISPQDVVRAVRPLPNWKSPGPDGLHNFWIKWFTRSHARLAILFQSALESGSLPEFLTTGITHLLHKSGSTAEPKNYRPIACLPTVYKVLTSILRAKINKHIDDNSVMSASQNGCRNGSRGTKELLLIDMAISQQVRRSRRDLSTCWIDYKKAYDSVPHTWLMRVLELYKVDSTLRIFLMSCMGQWRTVLRYPGCRQIQRNSEPIRIERGIFQGDSLSPLWFCLALNPLSTLLEDSGLGYRLRRGGQVISHLLYMDDLKLFAPNDLQLMELLKVTETFSSAIRMEFGVDKCAVMHVKRGEIVESVGTQLSDSINLRSLSATETYKYLGMSEALGINVADMKQSLKERFFGRLKKVFNSLLSGGNKVRAFNGWVMPVLMYSFGILKWTQTELDALDRRVRTLLTTYRMHHPRSSVMRLYIPRRCGGRGFLNAKTLHNREICSLREYFLETDVGMHRDVVAVDKGLTPLSLAKENWRKPVVLDTNDRMEVWQSKELHGRFFRALHGPDVDLPASVAWLRSGDLFGETEGFVCAIMDEVMMTNNYRRFIVKDGTVDICRACHRPGESIRHIISGCSRLANGEYLHRHNLVARIIHQQLALKYNLVESEVPYYKYVPDPVLENGSITLYWDRSIVTDRTIVANKPDIVVVDRSERRAMIVDITVPHDGNLVKAEKDKQIKYLDLAHEVVDMWDVDSAIIVPIVVSAHGLIAKSLDQYLRRLSLGSWIKGLIQKAVLLDTARIVRRFLSLEP

SEQ ID NO: 10174 - protein, 1197 aa, Noctua janthe
MLTRSATRRARLSPPDPSLSSASPPPESSPIVSAVTPAVAVASSSSDEYFSPPTTPPPVRRRGGRRPPDGLGPRGPPASDRVPAPGGSVPRMRWTQSINANVMRAYYGATEGGNNLTAYRVRMLSLFQVLEPAVNVSAQRLSDQVRVIQRNGMLDDTVLDRLRTEMQSSHVIATPPQTVVPPQSTIIPTHDNNVSNDMVTNVSTQCNEEMRCALEGAIREYRFMQPDLRPRVPRLPMHNKNKVLVAVLDSQLSNYFDNCENLTDAHSVLYCAAVAACRVAHVKFSDDRATRPNPAVPSWQYRIERRIGEARALIGKLICFREGNTRPRVMRFVRRAFSGTDISARDYMSRVTERIDFLKQKVYAWANRIRRYKRRVDRYTQNRTFQRDERWVYRAWERPDQGVADTHLPDDDAICSFWRSIWSVPVSHTEGEWTREVERACDLVPEMGAITISPQDVVRAVRPLPNWKSPGPDGLHNFWIKWFTRSHARLAILFQSALESGSLPEFLTTGITHLLHKSGSTAEPKNYRPIACLPTVYKVLTSILRAKINKHIDDNSVMSASQNGCRNGSRGTKELLLIDMAISQQVRRSRRDLSTCWIDYKKAYDSVPHTWLMRVLELYKVDSTLRIFLMSCMGQWRTVLRYPGCRQIQRNSEPIRIERGIFQGDSLSPLWFCLALNPLSTLLEDSGLGYRLRRGGQVISHLLYMDDLKLFAPNDLQLMELLKVTETFSSAIRMEFGVDKCAVMHVKRGEIVESVGTQLSDSINLRSLSATETYKYLGMSEALGINVADMKQSLRERFFGRLKKVFNSLLSGGNKVRAFNGWVMPVLMYSFGILKWTQTELDALDRRVRTLLTAYRMHHPRSSVMRLYIPRRCGGRGFLNAKTLHNREIYSLREYFLETDVGMHRDVVAVDKGLTPLSLAKENWRKPVVLDTNDRMEVWQSKELHGRFFRALHGPDVDLPASVAWLRSGDLFGETEGFVCAIMDEVMMTNNYRRFIVKDGTVDICRACHRPGESIRHIISGCSRLANGEYLHRHNLVARIIHQQLALKYNLVESEVPYYKYVPDPVLENGNITLYWDRSIVTDRTIVANKPDIVVVDRSERRAMIVDITVPHDGNLVKAEKDKQIKYLDLAHEVVDMWDVDSAIIVPIVVSAHGLIAKSLDQYLRRLSLGSWIKGLIQKAVLLDTARIVRRFLSLEP

SEQ ID NO: 10175 - protein, 868 aa, Noctua janthe
MRFVRRAFSGTDISARDYMSRVTERIDFLKQKVYAWANRIRRYKRRVDRYTQNRTFQRDERWVYRAWERPDQGVADTHLPDDDAMCSFWRSIWSVPVSHTEGEWTREVERACDLVPEMGAITISPQDVVRAVRPLPNWKSPGPDGLHNFWIKWFTRSHARLAILFQSALESGSLPEFLTTGITHLLHKSGSTAEPKNYRPIACLPTVYKVLTSILRAKINKHIDDNSVMSASQNGCRNGSRGTKELLLIDMAISQQVRRSRRDLSTCWIDYKKAYDSVPHTWLMRVLELYKVDSTLRIFLMSCMGQWRTVLRYPGCRQIQRNSEPIRIERGIFQGDSLSPLWFCLALNPLSTLLEDSGLGYRLRRGGQVISHLLYMDDLKLFAPNDFQLMELLKVTETFSSAIRMEFGVDKCAVMHVKRGEIVESVGTQLSDSINLRSLSATETYKYLGMSEALGINVADMKQSLKERFFGRLKKVFNSLLSGGNKVRAFNGWVMPVLMYSFGILKWTQTELDALDRRVRTLLTTYRMHHPRSSVMRLYIPRRCGGRGFLNAKTLHNREICSLREYFLETDVGMHRDVVAVDKGLTPLSLAKENWRKPVVLDTNDRMEVWQSKELHGRFFRALHGPDVDLPASVAWLRSGDLFGETEGFVCAIMDEVMMTNNYRRFIVKDGTVDICRACHRPGESIRHIISGCSRLANGEYLHRHNLVARIIHQQLALKYNLVESEVPYYKYVPDPVLENGNITLYWDRSIVTDRTIVANKPDIVVVDRSERRAMIVDITVPHDGNLVKAEKDKQIKYLDLAHEVVDMWDVDSAIIVPIVVSAHGLITKSLDQYLRRLSLGSWIKGLIQKAVLLDTARIVRRFLSLEP

SEQ ID NO: 10176 - protein, 1106 aa, Noctua janthe
MRWTQSINANVMRAYYGATEGGNNLTAYRVRMLSLFQVLEPAVNVSAQRLSDQVRVIQRNGMLDDTVLDRLRTEMQSSHVIATPPQTVVPPQSTIIPTHDNNVSNDMVTNVSTQCNEEMRCALEGAIREYRFMQPDLRPRVPRLPMHNKNRVLVAVLDSQLSNYFDNCEDLTDAHSVLYCAAIAACRVAHVKFSDDRATRPKPAVPSWQYRIERRIGEARALIGKLICFREGNTRPRVMRFVRRAFSGTDISARDYMSRVTERIDFLKQKVYAWANRIRRYKRRVDRYTQNRTFQRDERWVYRAWERPDQGVADTRLPDDDAMCSFWRSIWSVPVSHTEGEWTREVERACDLVPEMGAITISPQDVVRAVRPLPNWKSPGPDGLHNFWIKWFTRSHARLAILFQSALESGSLPEFLTTGITHLLHKSGSTAEPKNYRPITCLPTVYKVLTSILRAKINKHIDDNSVMSASQNGCRNGSRGTKELLLIDMAISQQVRRSRKDLSTCWIDYKKAYDSVPHTWLMRVLELYKIDATLRTFLMSCMGQWRTVLRYPGCRQIQRNSEPIRIERGIFQGDSLSPLWFCLALNPLSTLLEDSGLGYRLRRGGQVISHLLYMDDLKLFAPNDFQLMELLKVTETFSSAIRMEFGVDKCAVMHVKRGEIVESVGTQLSDSINLRSLSATETYKYLGMSEALGINVADMKQSLKERFFGRLKKVFNSLLSGGNKVRAFNGWVMPVLMYSFGILKWTQTELDALDRRVRTLLTAYRMHHPRSSVMRLYIPRRCGGRGFLNAKTLHNREICSLREYFLETDVGMHRDVVAVDKGLTPLSLAKENWRKPVVLDTNDRMEVWQSKELHGRFFRALHGPDVDLSASVAWLRSGDLFGETEGFVCAIMDEVMMTNNYRRFIVKDGTVDICRACHRPGESIRHIISGCSLLANGEYLHRHNLVARIIHQQLALKYNLVESEVPYYKYVPDPVLENGSITLYWDRSIITDRTIVANKPDIVVVDRSERRAMIVDITVPHDENLVKAEKDKQIKYLDLAREVVDMWDVDSAIIVPIVVSAHGLIAKSLDQYLRRLSLGSWIKGLIQKAVLLDTARIVRRFLSLEP

SEQ ID NO: 10177 - protein, 1197 aa, Noctua janthe
MLTRSATRRARLSPPDPSLSSASPPPESSPIVSAVTPAVTVASSSSDEYFSPPTTPPPVRRRGGRRPPDGLGPRGPPASDRVPAPGGSVPRMRWTQSINANVMRAYYGATEGGNNLTAYRVRMLSLFQVLEPAVNVSAQRLSDQVRVIQRNGMLDDTVLERLRTEMQSSHVIATPPQTVVPPQSTIIPTHDNNVSNDMVTNVSTLCNEEMRCALEGAIREYRFMQPDLRPRVPRLPMHNKNKVLVAVLDSQLSNYFDNCENLTDAHSVLYCAAVAACRVAHVKFSDDRATRPKPAVPSWQYRIERRIGEARALIGKLICFREGNTRPRVMRFVRRAFSGTDISARDYMSRVTERIDFLKQKVYAWANRIRRYKRRVDRYTQNRTFQRDERWVYRAWERPDQGVADTHLPDDDAMCSFWRSIWSVPVSHTEGEWTREVERACDLVPEMGAITISPQDVVRAVRPLPNWKSPGPDGLHNFWIKWFTRSHARLAILFQSALESGSLPEFLTTGITHLLHKSGSTAEPKNYRPIACLPTVYKVLTSILRAKINKHIDDNSVMSASQNGCRNGSRGTKELLLIDMAISQQVRRSRRDLSTCWIDYKKAYDSVPHTWLIRVLELYKVDSTLRIFLMSCMGQWRTVLRYPGCRQIQRNSEPIRIERGIFQGDSLSPLWFCLALNPLSTLLEDSGLGYRLRRGGQVISHLLYMDDLKLFAPNDLQLMELLKVTETFSSAIRMEFGVDKCAVMHVKRGEIVESVGTQLSDSINLRSLSATETYKYLGMSEALGINVADMKQSLKERFFGRLKKVFNSLLSGGNKVRAFNGWVMPVLMYSFGILKWTQTELDALDRRVRTLLTTYRMHHPRSSVMRLYIPRRCGGRGFLNAKTLHNREICSLREYFLETDVGMHRDVVAVDKGLTPLSLAKENWRKPVVLDTNDRMEVWQSKELHGRFFRALHGPDVDLPASVAWLRSGDLFGETEGFVCAIMDEVMMTNNYRRFIVKDGTVDICRACHRPGESIRHIISGCSRLANGEYLHRHNLVARIIHQQLALKYNLVESEVPYYKYVPDPVLENGNITLYWDRSIVTDRTIVANKPDIVVVDRSERRAMIVDITVPHDGNLVKAEKDKQIKYLDLAHEVVDMWDVDSAIIVPIVVSAHGLIAKSLDQYLRRLSLGSWIKGLIQKAVLLDTARIVRRFLSLEP

SEQ ID NO: 10178 - protein, 1107 aa, Mythimna ferrago
MRWTQSINENVMRAYFGATEGGNNLTAYRVRMLSLFQVLEPAVNVSAQRLSDQVRVIQRNHMLDDTVLDRLRTEMGSHAVTYSSQTVVPPQVSNHLSINADEEITDMVTHVSTQCNNELRSALECAIREYRNIPPELRPRIPRLPMCNKNRALVAALDSQLSNYFDDCEDLTDTHSIMYCAAVAACRVAHVKFPNTDVATRPKPAVPAWQCRIERRIGGARALICKLICFREGNTRPRVMRFVRRAFSGTDISPRDYMSRVTERIDFLKQKVYAWANRIRRYKRRVERYIQNSTFRSNERRVYRTWERPDQGVTDTHLPDDDAMCSFWRNIWSVPVSHTEGGWTREVERACESITEMGAITISPQDVARAVRPLPNWKSPGPDGLHNFWIKWLQRSHARLASQYQTALESGSLPEFLTTGVTHLLHKSGSTAEPKNYRPITCLPTVYKVLTSILRAKINNHVDNNAIMSASLNGCRNGSRGTKELLLIDMAISQQVRRSRKDLSTCWIDYKKAYDSVPHTWLMRVLELYKVDATLCTFLMSCMRQWRTVLRYPGCRNIQRNSEPVRIERGIFQGDSLSPLWFCLALNPLSTLLENSGLGYRLKRGGQVISHLLYMDDLKLFAPNILQLMELLKVTETFSSAIRMEFGVDKCAVMHIKRGEIVESVGTQLSDSIHLRSLSPTETYKYLGMSEALGINATDMKQSLKERFFGRLKKVLNSLLSGGNKVRAFNGWVMPVLMYAFGVLKWTQTELDALDRKVRTLLTAYRMHHPRSSVMRLYIPRKCGGRGFLNAKTLHNREVCSLREYFLAADVGMHRDVVAVDKGLTPLSLANENWRKPVVLDTNVRKEVWQSKELHGRFFRALHGPDVDQLASVAWLRVGDLFGETEGFVCAIMDEVIMTNNYRRFIVKDGTVDICRACHRPGESIRHIISGCSRLANGEYLHRHNLVARIIHQQLALKYSLVESEVPYYRYVPDPVLDSGDITLYWDRSIITDRTIVANKPDIVVVDRSERCAMIVDISVPHDENLVKAEKDKQIKYIDLAREVVDMWEVDSAIIVPIVVSANGLIAKSLDQHLRRLSLGDWIKGLIQKAVLLDTARIVRRFFSLEP

SEQ ID NO: 10179 - protein, 1096 aa, Mythimna ferrago
MRSYFGATEGGTNLTAYRGRMLSLFQVLEPAVNVSAQRLSDQVRVIQRNRMLDDAVLDRLRLESRNGRVSPVSPPAAVQRQLSVSPRTDHVGEDDDDGAISVSTQCNARLRSALENAFREYRSIPPELRPRLPRLPMHRKNRALVCALDSQLSNCFDSSEDLTDTHSILYCAAAAACRVAHVKIPNSDRATRPAKPAWQCRIERRIGEARALIGKLICFREGNTRPRVMRFVRRAFSGTDISPRDYLPRITERIDFLRQKVYAWANRIRRYKRRVERYTQNRAFQSNERWVYRAWERPDQSVIDTHLPDDDAMYSFWRSIWSVPVNHTEGDWTREVERECELIPEMGAITISPQDVARAVRPLPNWKSPGPEGLHNFWLKWFKSSHARLASQFQSALESGSLPQFLTTGITHLLYKSGSTAEPKNYRPITCLPTVYKVLTSILRAKINSHIETNSIMSASQNGCRNGSRGTKELLLIDVAISQQVRRSRRDLSTCWIDYKKAYDSVPHTWLMRVLELYKIDVTLRTFLMSCMGQWRTVLHYPGCRRVSENSEPLRIERGIFQGDSLSPLWFCLALNPLSTLLEGSGLGYRLRREGQVISHLLYMDDLKLFASNNLQLMELLKVTETFSSAIRMEFGLDKCAVMHVKRGEIMESVGTQLSDSIHLRSLCSTETYKYLGMSEALGINAADVKQSLRERFFGRLNKVLKSLLSGGNKVRAFNGWVMPVLMYSFGILKWTQTELDALDRRVRTLLTANRMHHPRSSVMRLYIPRKCGGRGFLNAKTLHNREVCSLREYFLETDVGMHRDVVAVDKGLTPLSLANENWRKPIVMDTNERKEVWKGKELHGRFYRALHGPDVDLLASVSWLRFGDLFGETEGFVFAIMDEVMMTNNYRKYIVKDGTVDICRACHRPGESIRHIISGCSHLANGDYLHRHNLVARIIHQQLALKYNLVESEVPYYRYVPDPVLENGSVTLYWDRSIITDRTIVANKPDIVVIDRLERRTMIVDIAVPHDENLVKAEKDKQTKYLDLAREVVDMWEVDRAIIVPIVVTANGLIAKSLDQHLRRLSLGSWIKGLIQKAVLLDTARIVRRFLSQEP

SEQ ID NO: 10180 - protein, 960 aa, Mythimna ferrago
MHRKNRALVCALDSQLSNCFDSSEDLSDTHSILYCAAAAACRVAHVKIPNNDRATRPAKPAWQCRIERRIGETRALIGKLICFREGNTRPRVMRFVRRAFSGTDISPRDYLPRITERIDFLKQKVYAWANRIRRYKRRVERYTQNHTFQSNERWVYRAWERPDQSVIDTRLPDDDAMYSFWRSIWSVPVNHTEGDWTREIERECELIPEMGAINISPQDVACAVRPLPNWKSPGPDGLHNFWLKWFQSSHARLASQFQSALESGSLPQFLTTGITHLLHKSGSTAEPKNYRPITCLPTVYKVLTSILRAKINNHIETNSIMSASQNGCRNGSRGTKELLLIDVAISQQVRRSRRDLSTCWIDYKKAYDSVPHTWLMRVLELYKVDATLRAFLMSCMGQWRTVLHYPGCRWVSENSEPLRIERGIFQGDSLSPLWFCLALNPLSTLLEGSGLGYRLRREGQVISHLLYMDDLKLFASNNLQLMELLKVTETFSSAIRMEFGLDKCAVMHVKRGEIMESVGTQLSDSIHLRSLCSTETYKYLGMSEALGINAADVKQSLRERFFGRLNKVLNSLLSGGNKVRAFNGWVMPVLMYSFGILKWTQTELDALDRRVRTLLTANRMHHPRSSVMRLYIPRKCGGRGFLNAKTLHNREVCSLREYFLETDVGMHRDVVAVDKGLTPLSLASENWRKPIVMDTNERKEVWKGKELHGRFYRALHGPDVDLLASVSWLRFGNLFGETEGFVFAIMDEVMMTNNYRKYIVKDGTVDICRACHRPGESIRHIISGCSHLANGDYLHRHNLVARIIHQQLALKYNLVESEVPYYKYVPDPVLENGSVTLYWDRSIITDRTIVANKPDIVVIDRLERRTMIVDIAVPHDENLVKAEKDKQTKYLDLAREVVDMWEVDRAIIVPIVVTANGLIAKSLDQHLRRLSLGSWIKGLIQKAVLLDTARIVRRFLSQEP

SEQ ID NO: 10181 - protein, 1200 aa, Mythimna ferrago
MLTRSRARQQQTHPTSSDSSFSSASQPPGPAPAVSPVIPVAAVASSSSDEYFSPPTTPPPARRRGRGRPPACLGPRGPPASGGVPAAGGSVQRMRWTQSINENVMRSYFGATEGGTNLTAYRGRMLSLFQVLEPAVNVSAQRLSDQVRVIQRNRMLDDAVLDRLRLESRNGRVSPVSPPAAVQLQPSVSPRPDHVGEDDDDGAISVSTQCNARLRSALEDAFREYRSIPPELRPRLPRLPMHRKNRALVCALDSQLSNCFDSSEDLTDTHSILYCAAAAACRVAHVKIPNSDRATRPAKPAWQCRIERRIGEARALIGKLICFREGNTRPRVMRFVRRAFSGTDVSPRDYLPRITERIDFLRQKVYAWANRIRRYKRRVERYTQNRAFQSNERWVYRAWERPDQSVIDTRLPDDDAMYSFWRSIWSVPVSHTEGDWTRGVERECELIPEMGAITISPQDVARAVRPLPNWKSPGPDGLHNFWLKWFKSSHARLASQFQSALESGSLPQFLTTGITHLLHKSGSTAEPKNYRPITCLPTVYKVLTSILRAKINSHIETNSIMSASQNGCRNGSRGTKELLLIDVAISQQVRRSRRDLSTCWIDYKKAYDSVPHTWLMRVLELYKIDVTLRTFLMSCMGQWRTVLHYPGCRRVSENSEPLRIERGIFQGDSLSPLWFCLALNPLSTLLEGSGLGYRLRREGQVISHLLYMDDLKLFASNNLQLMELLKVTETFSSAIRMEFGLDKCAVMHVKRGEIMESVGTQLSDSIHLRSLSSTETYKYLGMSEALGINAADVKQSLRERFFCRLNKVLKSLLSGGNKVRAFNGWVMPVLMYSFGILKWTQTELDALDRRVRTLLTANRMHHPRSSVMRLYIPRKCGGRGFLNAKTLHNREVCSLREYFLKTDVGMHRDVVAVDKGLTPLSLASENWRKPIIMDTNERKEVWKGKELHGRFYRALHGPDVDLLASVSWLRFGNLFGETEGFVFAIMDEVMMTNNYRKYIVKDGTVDICRACHRPGESIRHIISGCSHLANGDYLHRHNLVARIIHQQLALKYNLVESEVPYYRYVPDPVLENGSVTLYWDRSIITDRTIVANKPDIVVIDRLERRTMIVDIAVPHDENLVKAEKDKQTKYLDLAREVVDMWEVDRAIIVPIVVTANGLIAKSLDQHLRRLSLGSWIKGLIQKAVLLDTARIVRRFLSQEP

SEQ ID NO: 10182 - protein, 1221 aa, Mythimna ferrago
MLTRAAARRARPPPPASSLSSASPPSEPSLTESAVTPAVAAASSSSDEYYSPPTTPPPTRRRGGRRPPACLGPRGPPASDRVPAAGGSVPRMRWTQSTNENVMRAYYGATEGGNNLTAFRVRMLSLFQVLEPAVNVSAQRLSDQVRVIQRNHMLDDTVLDRLRTEMSDRVITPPSQPVVPVVVPPSSHISFQTDEVSTDTVTNVSTQCNNELRSALECAIREYRNMPLELRPRLPRLPMRNKNKALVAALDSQLSNYFDDCEDLTDTHSIMYCAAVAACRVAHVKFPNSDVATRPKPAVPAWQCRIERRIGGARALIGKVICFREGNTRPRVMRFVRRAFSGTDISPRDYMSRVTERIDFLKQKVYAWANRIRRYKRRVERYTQNSTFRSNERWVYRAWERPDQGVTDTRLPDDDAMTSFWRNIWSVPVSHTEGGWTREVERACESITEMGAITISPQDVARAVRPLPNWKSPGPDGLHNFWIKWLQRSHARLASQYQAALESGSLPEFLTTGVTHLLHKSGSTAEPKNYRPITCLPTVYKVLTSILRAKINHHVDSNAIMSASQNGCRNGSRGTKQLLLIDMAISQQVRRSRKDLSTCWIDYKKAYDSVPHTWLMRVLELYKVDATLRTFLMSCMRQWRTVLRYPGCRNIHRNSEPVRIERGIFQGDSLSPLWFCLALNPLSTLLENSGLGYRLKRGGQVISHLLYMDDLKLFAPNNLQLMELLKVTETFSSAIRMEFGVDKCAVMHIKRGEIVESVGIQLSDSIHLRSLSPTETYKYLGMSEALGINASDMKQSLRERFFGRLKKVLNSLLSGGNKVRAFNGWVMPVLMYAFGVLKWTQTELDALDRRVRTLLTAYRMHHPRSSVMRLYIPRKCGGRGFLNAKTLHNREVCSLREYFLAADGGMQRDVVAVDKGLTPLSLANENWRKPVVLDTNVRKEVWQSKELHGRFFRVLHGPDVDQLASVAWLRSGDLFGETEGFVCAIMDEVIMTNNYRRFIVKDGTVDICRACHRPGESIRHIISGCSRLANGEYLHRHNLVARIIHQQLALKYSLVESEVPYYRYVPDPVLDSGDITLYWDRSIITDRTIAANKPDIVVVDRRERRAMIVDISVPHDENLVKAEKDKQIKYIDLAREVVDMWDVDSAIIVPIVVSANGLIAKSLDQHLRRLSLSGWIKGLIQKAVLLDTARIVRRFLSLEPPNYTSMLRVCELYVKKLIKEI

SEQ ID NO: 10183 - protein, 1200 aa, Mythimna ferrago
MLTRAAARRARPPPPASSLSSASPPSEPSLTESAVTPAVAAASSSSDEYYSPPTTPPPTRRRGGRRPPACLGPRGPPASDRVPAAGGSVPRMRWTQSTNENVMRAYYGATKGGNNLTAYRVRMLSLFQVLEPAVNVSAQRLSDQVRVIQRNHMLDDTVLDRLRTEMSDRVITAPSQPVVPLVAPPPSHISFHTDEVSTDTVTNVSTQCNNELRSALECAIREYRNMPLEFRPRLPRLPMRNKNKALVAALDSQLSNYFDDCEDLTDTHSIMYCAAVAACRVAHVKFPNSDVATRPKPAVPAWQCRIERRIGGARALIGKLICFREGNTRPRVMRFVRRAFSGTDINPRDYMSRVTERIDFLKQKVYAWANRIRRYKRRVERYTQNSTFRSNERWVYRAWERPDQGVTDTRLPDDDAMCLFWRNIWSVPVSHTEGGWTREVERACESITEMGAITISPQDVARAVRPLPNWKSPGPDGLHNFWIKWLQRSHARLASQYQAALESGSLPEFLTTGVTHLLHKSGSTAEPKNYRPITCLPTVYKVLTSILRAKINHHVDNNAIMSASQNGCRNGSRGTKELLLIDMAISQQVRRSRKDLSTCWIDYKKAYDSVPHTWLMRVLELYKVDATLRTFLMSCMRQWRTVLRYPGCRNIQRNSEPVRIERGIFQGDSLSPLWFCLALNPLSTLLENSGLGYRLKRGGQAISHLLYMDDLKLFAPNNLQLMELLKVTETFSSAIRMEFGVDKCAVMHIKRGEIVESVGIQLSDSIHLRSLSPTETYKYLGMSEALGINATDMKQSLKERFFGRLKKVLNSLLSGGNKVRAFNGWVMPVLMYAFGVLKWTQTELDALDRRVRTLLTAYRMHHPRSSVMRLYIPRKCGGRGFLNAKTLHNREVCSLREYFLAADGGMHRAVVAVDKGLTPLSLANENWRKPVVLDTNVRKEVWQSKELHGRFFRALHGPDVDQLASVAWLRVGDLFGETEGFVCAIMDEVIMTNNYRRFIVKDGTVDICRACHRPGESIRHIISGCSRLANGEYLHRHNLVARIIHQQLALKYSLVESEVPYYRYVPDPVLDSGDITLYWDRSIITDRTIVANKPDIVVVDRRERRAMIVDISVPHDENLVKAEKDKQIKYIDLAREVVDMWNVDSAIIVPIVVSANGLIAKSLDQHLRRLSLSGWIKGLIQKAVLLDTARIVRRFLSLEP

SEQ ID NO: 10184 - protein, 1200 aa, Mythimna ferrago
MLTRSRARSQIAQPTSSGSSLSSASQPPGPAPAVSPEIPVAAVASSSSDEYFSPPTTPSPARRRGRGRPPACLGPRGPPASDRVLAAGGSVQRMRWTQSINENVMRSYFGATEGGTNLTAYRGRMLSLFQVLEPAVNVSAQRLSDQVRVIQRNRMLDDAVLDRLRLESRNGRVSPISPPAAVQRQPSVSPRPDHVGEDDDDEAISVSTQCNARLRSALEDAFREYRSIPPELRPRLPRLPMHRKNRALVCALDSQLSNCFDSSEDLSDTHSILYCAAAAACRVAHIKIPNNDRATRPAKPAWQCRIERRIGEARALIGKLICFREGNTRPRVMRFVRRAFSGTDISPRDYLPRITERIDFLKQKVYAWANRIRRYKRRVERYTQNHTFQSNERWVYRAWERPDQSVIDTRLPDDDAMYSFWRSIWSVPVNHTEGDWTREIERECELIPEMGAINISPQDVARAVRPLPNWKSPGPDGLHNFWLKWFQSSHARLASQFQSTLESGSLPQFLTTGITHLLHKSGSTAEPKNYRPITCLPTVYKVLTSILRAKINNHIETNSIMSASQNGCRNGSRGTKELLLIDVAISQQVHRSRRDLSTCWIDYKKAYDSVPHTWLMRVLELYKVDATLRAFLMSCMGQWRTVLHYPGCRRVSENSEPLRIERGIFQGDSLSPLWFCLALNPLSTLLEGSGLGYRLRREGQVISHLLYMDDLKLFASNNLQLMELLKVTETFSSAIRMEFGLDKCAVMHVKRGEIMESVGTQLSDSIHLRSLCSTETYKYLGMSEALGINAADVKQSLRERFFGRLNKVLNSLLSGGNKVRAFNGWVMPVLMYSFGILKWTQTELDALDRRVRTLLTANRMHHPRSSVMRLYIPRKCGGRGFLNAKTLHNREVCSLREYFLETDVGMHRDVVAVDKGLTPLSLASENWRKPIVMDTNERKEVWKGKELHGRFYRALHGPDVDLLASVSWLRFGNLFGETEGFVFAIMDEVMMTNNYRKYIVKDGTVDICRACHRPGESIRHIISGCSHLANGDYLHRHNLVARIIHQQLALKYNLVESEVPYYKYVPDPVLENGSVTLYWDRSIITDRTIVANKPDIVVIDRLERRTMIVDIAVPHDENLVKAEKDKQTKYLDLAREVVDMWEVDRAIIVPIVVTANGLIAKSLDQHLRRLSLGSWIKGLIQKAVLLDTARIVRRFLSQEP

SEQ ID NO: 10185 - protein, 1200 aa, Mythimna ferrago
MLTRSRAQQLNTHLTTSGSSLSSASQPPGPAPAVSPEIPVAAVASSSSDEYFSPPTTPPPTRRRGRGRPPACLGPQGPPASDRVPAAGGSVQRMRWTQSINENVMRSYFGATEGGTNLTAYRGRMLSLFQVLEPAVNVSAQRLSDQVRVIQRNRMLDDAVLDRLRLESRNGRVSPVSPPAAVQRQLSVSPRPDHVGEDDDDGAISVSTQCNARLRSALEDAFREYRSIPPELRPRLPRLPMHRKNRALVCALDSQLSNCFDSSEDLTDTHSILYCAAAAACRVAHVKIPNSDRATRPAKPAWQCRIERRIGEARALIGKLICFREGNTRPRVMRFVRRAFSGTDISPRDYLPRITERIDFLRQKVYAWANRIRRYKRRVERYTQNRAFQSNERWVYRAWERPDQSVIDTHLPDDDAMYSFWRSIWSVPVNHTEGDWTREVERECELIPEMGAITISPQDVARAVRPLPNWKSPGPEGLHNFWLKWFKSSHARLASQFQSALESGSLPQFLTTGITHLLYKSGSTAEPKNYRPITCLPTVYKVLTSILRAKINSHIETNSIMSASQNGCRNGSRGTKELLLIDVAISQQVRRSRRDLSICWIDYKKAYDSVPHTWLMRVLELYKIDVTLRTFLMSCMGQWRTVLHYPGCRRVSENSEPLRIERGIFQGDSLSPLWFCLALNPLSTLLEGSGLGYRLRREGQVISHLLYMDDLKLFASKNLQLMELLKVTETFSSAIRMEFGLDKCAVMHVKRGEIMESVGTQLSDSIHLRSLCSTETYKYLGMSEALGINAADVKQSLRERFFGRLNKVLKSLLSGGNKVRAFNDWVMPVLMYSFGILKWTQTELDALDRRVRTLLTANRMHHPRSSVMRLYIPRKCGGRGFLNAKTLHNREVCSLREYFLETDVGMHRDVVAVDKGLTPLSLANENWRKPIVMDTNERKEVWKGKELHGRFYRALHGPDVDLLASVSWLRFGDLFGETEGFVFAIMDEVMMTNNYRKYIVKDGTVDICRACHRPGESIRHIISGCSHLANGDYLHRHNLVARIIHQQLALKYNLVESEVPYYRYVPDPVLENGSVTLYWDRSIITDRTIVANKPDIVVIDRLERRTMIVDIAVPHDENLVKAEKDKQTKYLDLAREVVDMWEVDRAIIVPIVVTANGLIAKSLDQHLRRLSLGSWIKGLIQKAVLLDTARIVRRFLSQEP

SEQ ID NO: 10186 - protein, 1200 aa, Mythimna ferrago
MLTRAAARRARPPPPASSLSSASPPPEPSPIVSAVTPAVAAASSSSDEYYSPPTTPPPTRRRGGRRPPDCLGPRGPPASDRVPAPGGSVQRMRWTQSINENVMRSYYGATEGGNNLTAYRVLMLSLFQVLEPAVNVSAQRLSDQVRVILRNHMLDDTVLDRLRTEMSDRVITPPSQPVVPAVVPPSNYISFHTDEVSSDTVTNVSNQCNSELRSALECAIREYRNIPPELRPRISRLPMCNKNRALVAALDSQLSNYFDDCEDLTDTHSIMYCAAVAACRVAHVKFPNSDVATRPKPAVPAWQCRIERRIGGARALIGKLICFREGNTRPRVMRFVRRAFSGTDISPRDYMSRVTERIDFLKQKVYAWANRIRRYKRRVERYTQNRTFRSNERWVYRAWERPDQGVTDARLPDDDAMSSFWRSIWSVPVSHTEGDWTREVERACDPIPQMGAIDISPQDVARAVRPLPNWKSPGPDGLHNFWIKWFTRSHARLAYQFQSALESGSLPQFLTTGITHLLHKSGSTAEPKNYRPITCLPTVYKVLTSILRSKINSHIDENSIMSPSQNGCRNGSRGTKELLLIDMTISQQVRRSRKDLSTCWIDYRKAYDSVPHTWLMRVLELYKIDTTLRTFLMSCMRQWSTVLRYPGCRNIQRNSEPVRIERGIFQGDSLSPLWFCLALNPLSTLLENSGLGYRLKRGGQVISHLLYMDDLKLFAPNNLQLMELLKVTEIFSSAIKMEFGVDKCAVMHVKRGEVVESVSTQLTDSINLRSLSPTETYKYLGMSEALGISITGMKQSLRERFFGRLKRVFNSLLSGGNKVRAFNGWVMPVLMYSFGVLKWTQTELDALDRRVRTLLTAYRMHHPRSSVMRLYIPRKCGGRGFLNAKTLHNREVCSLREYFLAADVGMHRDVVAVDKGLTPLSLANENWRKPIVLDTNDRREVWQSKELHGRFFRALHGPDVDQLASVAWLRFGDLFGETEGFVCAIMDEVIMTNNYRRFIVKDGTVDICRACHRPGESIRHIISGCSRLANGEYLHRHNLVARIIHQQLALKYSLVESEVPYYRYEPDPVLDNGHITLYWDRPIITDRTIVANKPDIVVVDRSERRAMIVDISVPHDENLVKAEKDKQIKYIDMAREVVDMWEVDSAVIVPIVVSANGLIAKSLDQHLRRLSLGDWIKGLIQKAVLLDTARIVRRFLSLEP

SEQ ID NO: 10187 - protein, 962 aa, Acronicta aceris
MNNKNLALVCALDSLLSDYFDSSEDLADTHSILYCAAVAACRVAHVKFPESDRATRPKPMIPAWQSRIEQRIGEARALIGKLICFREGNTRPRVMRFVRRAFSGTNIDPRDYASCVTERIDFLKQKVYAWANCIRRYKRRAERYSLNRAFQGDQRWVYRPWDRLDNGVSDVCRPNDDAMSLFWRNIWSVPVNHTEDDWICDVERACESLPAMEEINISPQDVACAVHSVPNWKAPGPDGLHNFWIKWLRSSHARLASQFQSSLESGTLPQFLTTGITHLLHKSGDTADPKNYRPITCLPTVYKLLTSILRAKICYHIDESSIISASQNGCRNGSRGTKELLLIDMTISQQVRRLRKNLSTCWIDYKKAYDSVPHTWLMRVLELYKVDVSLRTFLRSCMGQWRTVLHYPGCRQIQRISEPIRIERGIFQGDSLSPLWFCLALNPLSTLLEESRLGYRLRRGGQVISHLLYMDDLKLFASSDLHLMELLKITENFSNSIRMEFGVEKCAVMHVKRGGIVESVGIQLSDSTQLRSLASTETYKYLGMAEALGINVADMKQLLQVRFFGRLTKVLKSLLSGGNKVRAFNGWVMPVLMYSFGVLKWTQTELETLDRKVRTLLTAYRMHHPRSSVMRLYIPRKCGGRGFLNAKNLHNREVCSLREHFLKTEMGMHRDVVAVDNGLTPLSMAKENWRKPVVLSTNDRRNVWQGKELHGRYYRALHEPGVDTLASVSWLRFGDLFGETEGFVCAIMDEVMMTNNYRKFIVKDGTVDICRACHRPGESIRHIISGCSRLANGEYLHRHNLVARIIHQQLALKYNLVESEVPYYKYVPDPVLENGHATLYWDRSIITDRTIIANKPDIVVIDRLERRAMIVDITVPHDENLFKAEKEKEIKYLDLAHEVVDMWGVDAAIIVPIVVSANGLIAKSLDRHLKRLSLGGWIKGLIQKAVLLDTAPIVRRFLSLGP

SEQ ID NO: 10188 - protein, 975 aa, Eilema sororculum
MPIHVRPRLPRLPIHRRNIALVSALDSLLPKYLENSENLGDTHSILYCTAVAACRMAGAKFPIKDPAIRPKPAIPAWQCRIERRVAEARVLIGKLICFRSGNTRPRVMRYVTRAFAGTNISPQDYMSRVTERIDFLKQKVCAWANRIRRYKKRVDRYTVNRMFQRDQRWVYRSWERTDESVDDLRRPDAEATNAFWRSIWSVPVSHTEGDWMREVERACETIPEMEEIYIDVTDVDCAVRSLSNWKSPGPDGLHNFWLKWLRSSHVVLASQFQSAIESGTLPAFMTTGVTHLLHKTGSTLEPNNYRPITCLPTVYKLLTSILRAKINNHINNNSIMCTSQNGCRNGARGTKELLLIDMTISQQARRNRKDLVACWIDYKKAFDSVPHTWLLRVLELYKVNTTLCTFLRSCMGQWRTVLLYPGCRQALGSGEPITIERGIFQGDSLSPLWFCLALNPLSTLLVNSGLGYRLRREGQMVSHLFYMDDLKLFAHTNPQLIALLKVTETFSNSIKMAFGVDKCAVIHVKRGRVVESEGIQLSDSTNLRSLLVTETYKYLGMSQALCINEVGMKQMLQERFFGRLKKVLNSLLSGGNKVRACNSWVMPLLMYSFGILKWTQTELDTIDRKVRTQLTAFRMHHPRSSVMRLYIPRKCGGRGFLNAKTLHNREVCNLRDYFLKSNVDMHRDVVNVDTGLTPLGLAKENWRRPTIVGTDSRREVWQSKELHGRFYRALHRPEVDLLASVSWLRFSDLFGETEGFVCAIADEVIKTNNYRKYIMRDGTIDICRACHQPGESLRHITSGCSRLANGEYLHRHNQVARIIHQRLALKYNLVEVEVPYYRYVPEPVLENSHITLYWDRSIITDRTVVANKPDIVVIDRSERRALIVDVTIPHDENLVKAEKDKQVKYLDLAHEVVDMWNVDSAIIVPIVVSVNGLIAKSLDQHLKRLGLDGWVKGQMQKAVLLDTARIVRKFLSLEP

SEQ ID NO: 10189 - protein, 1192 aa, Eilema sororculum
MLTRAQANRNRSAPTTSPDSSLSSAAQPPAVEPAASSSSSSDEFFSPPTSPTPVRRPGRGRPPTCLGPRRPPASNRAPATGGDVHRMRWTTSINENVMRAYFAATEGGTHLSAYRTRMLPLFQALEPSINVSAQRLSDQVRVIQRNRMLNETVLETLRLECLRNICVTPAPAPAPASTVEINDDTCVAPDDTPIPVSIQYNEEIKEALECALREYRSMPVHVRPRLPRLPIHRRNIALVSALDSLLPRYLENSENLGDTHSILYCTAVAACRMAGAKFPNKDPAIRLKSAIPAWQCRIERRVAEARVLIGKLICFRSGNTRPRVMRYVTRAFAGTDISPQDYTSRVTERIDFLKQKVYAWANRIRRYKKRVDRYTVNRMFQRDQRWVYRSWERTEESVDDVRRPDAEATNAFWRSIWSVPVNHTEGDWMREVERACETIPEMEKINIDAIDVDCAVRSLSNWKSPGPDGLHNFWLKWLRSSHVVLASQFQSAVESGTLPAFMMTGVTHLLHKTGSTLEPNNYRPITCLPTVYKLLTSILRAKINNHINNNSIMCASQNGCRNGARGTKELLLIDMAISQQARRNRKDLTACWIDYKKAFDSVPHTWLLRVLELYKVNTTLCTFLRSCMGQWRTVLFYPGCRQALGSGEPITIERGIFQGDSLSPLWFCLALNPLSTLLVNSGLGYRLRREGQMVSHLFYMDDLKLFAHTNPQLIALLKVTETFSNSIKMAFGVDKCAVIHVKRGRVVESEGIQLSDSTNLRSLLVTETYKYLGMSQALCINEVDMKQMLQERFFGRLKKVLNSLLSGGNKVRACNSWVMPLLMYSFGILKWTQTELDTIDRKVRTQLTAFRMHHPRSSVMRLYIPRKCGGRGFLNAKTLHNREVCNLRDYFLTSNVDMHRDVVNVDTGLTPLGLAKENWRRPTIVSTDSRREVWQSKELHGRFYRALHRPEVDLLASVAWLRFSDLFGETEGFVCAIADEVIKTNNYRKYIMRDGTIDICRACHQPGESLRHITSGCSRLANGEYLHRHNQVARIIHQRLALKYNLVEVEVPYYKYVPEPVLENSHITLYWDRSIITDRTVVANKPDIVVIDRSERRALIVDVTIPHDENLVKAEKDKQVKYLDLAHEVVDMWNVGSAIIVPIVVSVNGLIAKSLDQHLKRLGLDGWVKGQMQKAVLLDTARIVRKFLSLEP

SEQ ID NO: 10190 - protein, 1192 aa, Eilema sororculum
MLTRAQANRNRSAPTTSPDSSLSSAAQPPAVEPAASSSSSSDEFFSPPTSPTAVRRPGRGRPPTCLGPRRPPASNRAPATGGDVHRMRWTTSINENVMRAYFAATEGGTNLSAYRTRMLPLFQALEPSINVSAQRLSDQVRVIQRNRMLNETVLETLRLECLRNICVTPAPAPAPASTVEINDDTCVAPDDTPIPVSIQYNEEIKEALECALREYRSMPVHVRPRLPRLPIHRRNIALVSALDSLLPRYLENSENLGDTHSILYCTAVAACRMAGAKFPNKDPAIRLKSAIPAWQCRIERRVAEARVLIGKLICFRSGNTRPRVMRYVTRAFAGTDISPQDYTSRVTERIDFLKQKVYAWANRIRRYKKRVDRYTVNRMFQRDQRWVYRSWERTEESVDDVRRPDAEATNAFWRSIWSVPVNHTEGDWMREVERACETIPEMEKINIDAIDVDCAVRSLSNWKSPGPDGLHNFWLKWLRSSHVVLASQFQSAVESGTLPAFMMTGVTHLLHKTGSTLEPNNYRPITCLPTVYKLLTSILRAKINNHINNNSIMCASQNGCRNGARGTKELLLIDMAISQQARRNRKDLTACWIDYKKAFDSVPHTWLLRVLELYKVNTTLCTFLRSCMGQWRTVLFYPGCRQALGSGEPITIERGIFQGDSLSPLWFCLALNPLSTLLVNSGLGYRLRREGQMVSHLFYMDDLKLFAHTNPQLIALLKVTETFSNSIKMAFGVDKCAVIHVKRGRVVESEGIQLSDSTNLRSLLVTETYKYLGMSQVLCINEVDMKQMLQERFFGRLKKVLNSLLSGGNKVRACNSWVMPLLMYSFGILKWTQTELDTIDRKVRTQLTAFRMHHPRSSVMRLYIPRKCGGRGFLNAKTLHNREVCNLRDYFLTSNVDMHRDVVNVDTGLTPLGLAKENWRRPTIVSTDSRREVWQSKELHGRFYRALHRPEVDLLASVAWLRFSDLFGETEGFVCAIADEVIKTNNYRKYIMRDGTIDICRACHQPGESLRHITSGCSRLANGEYLHRHNQVARIIHQRLALKYNLVEVEVPYYKYVPEPVLENSHITLYWDRSIITDRTVVANKPDIVVIDRSERRALIVDVTIPHDENLVKAEKDKQVKYLDLAHEVVDMWNVGSAIIVPIVVSVNGLIAKSLDQHLKRLGLDGWVKGQMQKAVLLDTARIVRKFLSLEP

SEQ ID NO: 10191 - protein, 1192 aa, Eilema sororculum
MLTRAQAKRNRSAPITSPDSSLSSAAQPPAVEPAASSSSSSDEFFSPPTSPTPVRRPGRGRPPTCLGPRRPPASNGAPATGGYVHRMRWTNSINENVMRAYFAATEGGTNLSAYRTRMLPLFQALEPSINVSAQRLSDQVRVIQRNRMLNETVLETLRLECLRNICVTPAPVPVPASTVELNDDTCVAPDDTPIPVSIQYNEEIKEALECALREYRSMPVHVRPRLPRLPIHRRNIALVSALDSLLPRYLENSENLGDTHSILYCTAVAACRMAGAKFPIKDPAIRPKSAIPAWQCRIERRVTEARVLIGKLICFRSGNTRPRVMRYVTRAFAGTDISPQDYTSRVTERIDFLKQKVYAWANRIRRYKKRVDRYTVNRMFQRDQRWVYRSWERTEESVDDVRRPDAEVTNAFWRSIWSVPVSHTEGDWMHEVERACETIPEMEEINIDAIDVDCAVRSLSNWKSPGPDGLHNFWLKWLRSSHVVLASQFQSAVESGTLPAFMTTGVTHLLHKTGSTLEPNNYRPITCLPTVYKLLTSILRAKINNHINNNSIMCASQNGCRNGARGTKELLLIDVAISQQARRNRKDLTACWIDYKKAFDSVPHTWLLRVLELYKVNTTLCTFLRSCMGQWRTVLFYPGCRQALDGGVPITIERGIFQGDSLSPLWFCLALNPLSTLLVNSGLGYRLRREGQMVSHLFYMDDLKLFAHTNPQLIALLKITETFSNSIKMAFGVDKCAVIHVKRGRVVESEGIQLSDSTNLRSLLVTETYKYLGMSQALCINEVDMKQMLQERFFGRLKKVLNSLLSGGNKVRACNSWVIPLLMYSFGILKWTQTELDTIDRKVRTQLTAFRMHHPRSSVMRLYIPRKCGGRGFLNAKTLHNREVCNLRDYFLKSNVDMHRDVVNVDTGLTPLGLAKENWRRPTIVSTDSRREVWQSKELHGRFYRALHRPEVDLLASVSWLRFSDLFGETEGFVCAIADEVIKTNNYRKYIMRDGTIDICRACHQPGESLRHITSGCSRLANGEYLHRHNQVARIIHQRLALKYNLVEFEVPYYRYVPEPVLENSHITLYWDRSIITDRTVVANKPDIVVIDRSERRALIVDVTIPHDENLVKAEKDKQVKYLDLAHEVVDMWNVDSAIIVPIVVSVNGLIAKSLDQHLKRLGLDGWVKGQMQKAVLLDTARIVRKFLSLEP

SEQ ID NO: 10192 - protein, 1212 aa, Ptilodon capucinus
MTDAPRRNPRRQCRQRSAVRHYAQSTPPDQSPRSASPLPASIIRASVTAVASSESDEYFSPPTSPPPVRRQRGRPPGHLGLLGQPAPNRVLVPSGVVRRMRWTSSMNENVMRAYYEATEGGTNLTAYRDRMLPLFQSLEPAVNVSAQRLSDQVRVIQRGNMLADTVLDRLRSEVQSRRVVPVASSQPAAQPVARATVTSRLAADSDVDRDNAPIDVSTQYNNLLRSTLEDVVREYRSMPNHLRPRIPRLPMHKGNRALVGALDSLLSIYFDSSDDLVDTHSILYCAAITVCRVARVKVFNTDTTTRPKPAVPAWQCRIERRISEARALIGKLSCFREGNTRPRVMRFVKRAFAGTDVSPREYISRVTERIDFLKQKIYAWANRIRRYKARVDRYSQNSMFQRDQRWVYRSWERPNEPVSELQRPDDNAMTTFWRDIWSVPVTHYEGNWIGDVERMCEPIKEMEAISIGPLDVANAVRSLPNWKAPGPDGLHNFWLKWLRSSHVRLASQFQSALQSGSLPEFITTGVTHLLHKTGSTTDPKNYRPITCLPTIYKTLTSILRAKIARHVEDNSIMSASQNGCRSGSRGTKELLLIDMAICQQARRNRKDLSTCWIDYKKAYDSVPHTWLVRVLELYKIDTTLRTFLESCMRQWKTVLLCPGSRQILGNGEPIRIERGIFQGDSLSPLWFCLALNPLSTLLEESGFGFRLRRGGQVISHLLYMDDLKLFAPTALQLSGLLKVTETFSNSIRMEFGVDKCAVMHAKQGRMVESEGIQLSDSIQLRSLAATETYKYLGMSQGLGISETDMKQLLRDRFLGRLKKVLKSLLSGGNKVRAYNGWVMPVLMYSFGILKWTQTELDALDRTVRTTLTAYRMHHPRSSVMRLYIPRKCGGRGFLNVKTLHNREICSLREYFLRADGEMHVDVVAVDNGLTPLSLAKENWRKPVVLTTDDRRVVWQGKELHGRYYRALHGPDVDLAASVAWLRFGDLFGETEGFVCAIMDEVVMTNNYRRYILRDGTIDICRACHRPGESLRHIISGCSRLANGQYLHRHNQVARIVHQQLALKYRLVTSEVPYYRYEPQPVLEEGHITLYWDRSIITDRTIVANKPDIVLIDRQERRAMIIDITVPHDENLVKAEKDKESKYLDLAHEVVDMWDIDAAIIVPIVVSAHGLLAKSLDKHLKRLALGSWIKGQIQKAVLLGTARIVRKFLSLEP

SEQ ID NO: 10193 - protein, 1212 aa, Ptilodon capucinus
MTDAPRRNPRRQCRQRSAVRHYAQSTPPDQSPRSASPSPASIIRTSVTAVASSESDEYFSPPTSPPPVRRQRGRPPGHLGLLGQPAPNRVLVPSGVVRRMRWTSSMNENVMRAYYEATEGGTNLTAYRDRMLPLFQSLEPAVNVSAQRLSDQVRVIQRGNMLADTVLDRLRSEVQSRRVVPVASSQPAAQPVARATVTSRLAADSDVDRDNAPIDVSTQYNNLLRSTLEDVVREYRSMPNHLRPRIPRLPMHKGNRALVGALDSLLSIYFDSSDDLVDTHSILYCAAITVCRVARVKVFNTDTTTRPKPAVPAWQCRIERRISEARALIGKLSCFREGNTRPRVMRFVKRAFAGTDVSPREYISRVTERIDFLKQKIYAWANRIRRYKARVDRYSQNSMFQRDQRWVYRSWERPNEPVSELQRPDDNAMTTFWRDIWSVPVTHYEGNWIGDVERMCEPIKEMEAISIGPLDVANAVRSLPNWKAPGPDGLHNFWLKWLRSSHVRLASQFQSALQSGSLPEFITTGVTHLLHKTGSTTDPKNYRPITCLPTIYKTLTSILRAKIARHVENNSIISASQNGCRSGSRGTKELLLIDMTICQQARRNRKDLSTCWIDYKKAYDSVPHTWLVRVLELYKIDTTLRTFLESCMRQWKTVLLCPGSRQILGNGEPIRIERGIFQGDSLSPLWFCLALNPLSTLLEESGFGFRLRRGGQVISHLLYMDDLKLFAPTALQLSGLLKVTEAFSNSIRMEFGVDKCAVMHAKQGRMVESEGIQLSDSIQLRSLAATETYKYLGMSQGLGISETDMKQLLRDRFLGRLKKVLKSLLSGGNKVRAYNGWVMPVLMYSFGILKWTQTELDALDRTVRTTLTAYRMHHPRSSVMRLYIPRKCGGRGFLNVKTLHNREICSLREYFLRADGEMHVDVVAVDNGLTPLSLAKENWRKPVVLTTDDRRVVWQGKELHGRYYRALHGPDVDLAASVAWLRFGDLFGETEGFVCAIMDEVVMTNNYRRYILRDGTIDICRACHRPGESLRHIISGCSRLANGQYLHRHNQVARIVHQQLALKYRLVTSEVPYYRYEPQPVLEEGHITLYWDRSIITDRTIVANKPDIVLIDRQERRAMIIDITVPHDENLVKAEKDKESKYLDLAHEVVDMWDIDAAIIVPIVVSAHGLLAKSLDKHLKRLALGSWIKGQIQKAVLLETARIVRKFLSLEP

SEQ ID NO: 10194 - protein, 1207 aa, Ptilodon capucinus
MTDAPRRNPRRLCRQRTVNEPNAQSTPPDPSPRSASPSPASIIRTSVTAVASSESDEYFSPPTSPPPVRQQRGRPPGHLGLLGQPAPNSVLVPSGVVRRMRWTSSINENVMRAYYEATEGGTNLTAYRNRMLPLFQSLEPAVNVSAQRLSDQVRVIQRGNMLADTVLDRLRSEMQSRRVVPVASSQPAAQPVASATVTSRLAADSDVDRDNAPIDVSNQYNELLRSTLEDVVRVYRSMPNHLRPRIPRLPMHKGNRALVGALDSLLSIYFDSSDNLADTHSILYCAAITVCRVARVKVFNTDTATRPKPAVPAWQCRIERRISEARALIGKLSCFREGNTRPRVMRFVKRAFAGTDVSPREYISRVTERIDFLKQKMYAWANRIRRYKARVDRYSQNSMFQRDQRWVYRSWERPNEPVSELQRPDDNATTTFWRDIWSVPVTHYEGDWIGDVERMCEPIKEMEAISIGPLDVANAVRSLPNWKAPGPDGLHNFWLKWLRSSHVRLASQFQSALQSGSLPEFITTGVTHLLHKTGSTTDPKNYRPITCLPTIYKTLTSILRAKIARHVEDNSIMSASQNGCRSGSRGTKELLLIDMTICQQARRNRKDLSTCWIDYKKAYDSVPHTWLVRVLELYKIDTTLRTFLESCMRQWKTVLLCPGSRQILGNGEPIRIERGIFQGDSLSPLWFCLALNPLSTLLEESGFGFRLRRGGQVISHLLYMVDLKLFAPTALQLTGLLKVTETFSNSIRMEFGVDKCAVMHAKQGRLVESEGIQLSDSIQLRTLAATETYKYLGMSQGLGISETDMKQLLRDRFLGRLKKVLKSLLSGGNKVRAYNGWVMPVLMYSFGILKWTQTELDTLDRTVRTTLTSYRMHHPRSSVMRLYIPRKCGGRSFLNVKTLHNREICSLRESFLRADGEMHVDVVAVDNGLTPLSLAKENWRKPVVLTTDDRRLVWQGKELHGRYYRALHGPDVDLAASVAWLRFGDLFGETEGFVCAIMDEVVMTNNYRKYILRDGTIDICRACHRPGESLRHIISGCSRLANGQYLHRHNQVARIIHQQLALKYRLVTSEVPYYRYEPQPVLEEGHISLYWDRSIITDRTIVANKPDIVLIDRQERRAIIVDITVPHDENLVKAEKDKESKYLYLAHEVVDMWDIDAAIIVPIGLLAKSLDKHLKRLALGGWIKGQIQKAVLLETARIVRKFLSLEP

SEQ ID NO: 10195 - protein, 1113 aa, Ptilodon capucinus
MRWTSSMNENVMRAYYEATEGGTNLTAYRNRMLPLFQSLEPAVNVSAQRLSDQMRVIQRGNMLADTVLDRLRSEVQSRRVVPVASSQPAAQPVASATVTSRLAADSDVDRDNAPIDVSTQYNDLLRSTLEDVVREYRSMPNHLRPRIPRLPMHNGNRALVGALDSLLSIYFDSSDDLVDTHSILYCAAITVCRVARVKVFNTDTATRPKPAVPAWQCRIERRISEARALIGKLSCFREGNTRPRVMRFVKRAFAGTDVSPREYISRVTERIDFLKQKIYAWANRIRRYKARVDRYSQNSMFQRDQRWVYRSWERPNEPVSELQRPDDNAMTTFWRDIWSVPVTHYEGNWIGDVERMCEPIKEMEAISIGPLDVANAVRSLPNWKAPGPDGLHNFWLKWLRSSHVRLASQFQSALQSGSLPEFITTGVTHLLHKTGSTTDPKNYRPITCLPTIYKTLTSILRVKIARHVEDNSIMSASQNGCRSGSRGTKELLLIDMTICQQARRNRKDLSTCWIDYKKAYDSVPHTWLVRVLELYKIDTTLRTFLESCMRQWKTVLLCPGSRQILGNGEPIRIERGIFQGDSLSPLWFCLALNPLSALLEESGFGFRLRRGGQVISHLLYMDDLKLFAPTALQLSGLLKVTETFSNSIRMEFGVDKCAVMHAKQGRMVESEGIQLSDSIQLRSLAATETYKYLGMSQGLGISETDMKQLLRDRFLGRLKKVLKSLLSGGNKVRAYNGWVMPVLMYSFGILKWTQTELDTLDRTVRTTLTAYRMHHPRSSVMRLYIPRKCGGRGFLNVKTLHNREICSLREYFLRADGEMHVDVVAVDNGLTPLSLAKENWRKPVVLTTDDRRVVWQGKELHGRYYRALHGPDVDLAASVAWLRFGDLFGETEGFVCAIMDEVVMTNNYRRYILRDGTIDICRACHRPGESLRHIISGCSRLANGQYLHRHNQVARIVHQQLALKYRLVTSEVPYYRYEPQPVLEEGHITLYWDRSIITDRTIVANKPDIVLIDRQELRAMIIDITVPHDENLVKAEKDKESKYLDLAHEVVDMWAIDAAIIVPIVVSAHGLLAKSLDKHLKRLALGSWIKGQIQKAVLLETARIVRKFLSLEP

SEQ ID NO: 10196 - protein, 1203 aa, Agrochola circellaris
MLTRSATRRARPPPPDSSLSSALPPPVSSPIISAVTTPVAVVASSSSDEYFSPPTSPTPVRRQGRGRPPRSLGLRGQPAPNRVPAAGGCVRRMRWTQNVNENVMRAYFGATEGGSNLTAYRGRMLSLFQVLEPAVDVSAQRLSDQVRVIQRNHMLDDAVLDRLRLESRNNRVTPASPLVAVQLQNSPSATPRADHVGEEDDDGVISVSSQCNARLRNALEDAFRDYRSTPPGLRPRLPRLPMHKKNKALVCTLDSLLSNYFDGSKDLADTHSILYCAAVAACRVAHVKFPSSDRAPRPKPAVPAWQCRIERRIGEARVLIGKLICFREGNTRPRVMRFVKRAFSGTDTSSRDYLARVTERIDFLKQKICAWANRIRRYRRRVERYTQNRTFQSDERWVYRAWERLDQGVIDTRLPDDEAMCSFWRSIWSAPVNHTEGDWTGKIERACERIPEMGAITISPQDVACAVRPLPNWKSPGPDGLHNFWIKWFQRSHARLASQFQSALESGSLPQFLTTGITHLLHKSGSTAEPKNYRPITCLPTVYKVFTSILRTKINKHIDTNSIMSASQNGCKNGSRGTKELLLIDMAISQQVRRSRRDLSTCWIDYKKAYDSVPHTWLMRVLELYKVDATLRTFLISCMGQWRTVLRYPGCRQIQRNSEPIRIERGIFQGDSLSPLWFCLALNPLSTLLEDSGLGYRLRRGGQVISHLLYMDDLKLFAPNNLQLVELLKVTETFSSAIRMEFGVDKCAVMHVKRGGIVESGGTQLSDSIHLRSLSSIETYKYLGMSEALGISTADMKQSLRERFFNRLNKVLNSLLSGGNKVRAFNGWVMPVLMYSFGILKWTQTELDALDRRVRTLLTVNRMHHPRSSVMRLYIPRKCGGRGSLNAKTLHNREVCSLREYFLEADVGMHRDVVSVDKGLTPLSLANENWRKPIVLDTKDRREVWQSKELHGRFYRALHGPDVDLLASVSWLRFGDLFGETEGFVFAIMDEVMMTNNYRKYIVKDGTVDICRACHRPGESIRHIISGCSRLANGDYLHRHNLVARIIHQQLALKYSLVESEVPYYRYMPDPVLENGNITLYWDRSIITDRTIVANKPDIVVIDRLERRTMIIDIAVPHDENLVKAEKDKQIKYLDLAREVVDMWDVDTAVIVPIVVTANGIIAKSLDQHLRRLSLGSWIKGLIQKAVLLDTARIVRRFLSQEP

SEQ ID NO: 10197 - protein, 1201 aa, Hydraecia micacea
MLTRSAAARRARIPPPDSSLSSASPPAPLVSSPTVSAVMTPAAAVASSSSDEYFSPPTTPPPARRRGGRRPPDGLGPRGPPASDRVPAPGGSVQRMRWTRSINENVMRSYYGATEGGSNLTAYRVRMLSLFQVLEPAVNVSAQRLSDQVRVIQRNHMLDDTVLDRLRNEIQSSHAIAPQSQTAVILPQSNTSHADEGSNDRATNVSTQCNEELRSALEDAIQEYRSMSPELRPRLPRLPMHNKNRALVAVLNSQLSKYFDDCEDLTDTHSILYCAAVAACRVAHVKFTNDSRATRPKPAVPAWQCRIERRIGGARALIGKLICFREGNTRPRVMRFVRRAFLGTDISPQAYTSCVTERIDFLKQKVYAWANRIRRYKRRVERYAQNRTFQSDERWVYRDWERPDQSVADTCLPDDDAMCSFWRSIWSVPVSHTEGDWARDVERACDPIPEMEAITICPQDVARAVRPLPNWKSPGPDGLHNFWIKWFSRSHARLASQFQTALESGSLPQFLTTGITHLLHKSGSTAEPKNYRPITCLPTVYKVLTSILRAKINKHIDTNFIMSASQNGCRNGSRGTKELLLIDMTISQQVRRFRKDLSTCWIDYKKAYDSVPHTWLMRVLELYKVDTTLRTFLMSCMGQWRTVLRYPGCRNIQRNSEPIRIERGIFQGDSLSPLWFCLALNPLSTLLEDSGLGYRLRRGGQVISHLLYMDDLKLFAPNNLQLMELLKVTQTFSNAIRMEFGVDKCAVMHVKRGEIVESVGNQLSDSTNLRALSASETYKYLGMSEALGINVTDMKQSLKERFFGRLKKVLNSLLSGGNKVRAFNGWVMPVLMYSFGILKWTQTELDALDRRVRTLLTANRMHHPRSSVMRLYIPRKCGGRGFLNSKTLHNREICSLREYFLETDVGMHRDVVMVDKGLTPLSLAKENWRKPVVLDTNDRMEVWQSKELHGRFFRALHGPDVDLLASVAWLRFGDLFGETEGFVCAIMDEVMMTNNYRRFIVKDGTVDICRACHRPGESIRHIISGCSRLANGEYLHRHNLVARIIHQQLALKYSLVESEVPYYRYVPDPVLENGNITLYWDRSIITDRTIIANKPDIVVVDRSERRAMIVDITVPHDENLVKAEKDKQIKYLDLAREVVDMWDVDSAIIVPIVVTANGLIAKSLDQHLRRLSLGSWIKGLIQKAVLLDTARIVRRFLSLEP

SEQ ID NO: 10198 - protein, 1203 aa, Hydraecia micacea
MLTRSRARRLPTTHPTSSGSSLSSASQLPEPAPDVSPVSPAAAVASSSSDEYFSPPTTPPPVCRRGRGRLPASLGLRGPPASERVPAPGGSVQRMRWTQTVNENVMRAYFGATEGGSNLTAYRGRMLSLFQVLEPAVNVSAQRLSDQVRVIQRNHMLDNVVLDRLRLESWNSHVTPASSLVAVQLQPSVPLRPDCVDVEDDDEAISVSSQCNARLRSALEDAFREYRSIPPGLRPRLPRLPMHKKNKALVCALDSQLSNCFNDSKDLADTHSILYCAAVAACRVAHVKFPNSDRAPRPKPAVPAWQCRIECRIGEARALIGKLICFREGNTRPRVMRFVRRAFSGTDISSRDYLSRVTERIDFLKQKICAWANRIRRYRRRVERYTQNRRFQSDERWVYRAWERLDQGVTDTRLPDDDAMCSFWRNIWSVPVSHTEGDWTGKIERACDLIPEMEALIISPQDVARAVRPLPNWKSPGPDGLHNFWIKWLKRSHDRLASQFQSALESGSLPQFLTTGITHLLYKSGSTADPKNYRPITCLPTVYKVLTSILRTKINKHIDTNSIMSVSQNGCKNGSRGTKELLLIDMTINQQVRRSRKDLSTCWIDYKKAYDSVPHTWLMRVLELYKVDTTLCTFLMSCMGQWRTVLRYPGCRNIQRNSEPIRIERGIFQGDSLSPLWFCLALNPLSTLLEDSGLGYRLRRGGQVISHLLYMDDLKLFAPNNLQLMELLKITETFSSAIRMEFGVDKCAVMHVKRGEIVESVGNQLSDSTNLRALSASDTYKYLGMSEALGINVTDMKQSLKERFFGRLKKVFNSLLSGGNRVRAFNDWVMPVLMYSFGILKWTQTELDALDRKVRTLLTANRMHHPRSSVMRLYIPRKCGGRGFLNAKTLHNREICSLREYFLETDVGMHRDVVVVDNGLTPLSLGKENWRKPVVLDTNDRMEVWQSKELHGRFFRALHGPDVDLLASVAWLRFGDLFGETEGFVCAIMDEVMMTNNYRRFIVKDGTVDICRACHRPGESIRHIISGCSRLANGEYLHRHNLVARIIHQQLALKYSLVESEVPYYRYVPDPVLENGNITLYWDRSIITDRTIVANKPDIVVMDRLERRAMIVDITIPHDENLVKAEKDKQIKYLDLAREVVDMWDVDSAIIVPIVVTANGLIAKSLDQHLRRLSLASWIKGLIQKAVLLDTARIVRRFLSLEP

SEQ ID NO: 10199 - protein, 1110 aa, Amphipyra tragopoginis
MRWTQSINENVMRAYYGATEGGINLTAYRDRMLSLFQVLEPAINVSTQRLSDQVRVIQRNRRLDDAVLERLRSEEQNNRAVTPPVQAAEQPQLLAVAPRPIHVDGESDGAVINVSSQCSDELRSALEGAILEYRATPPELKPRLPRLPMHKKNRALVCALDSLLSNYFDGSEDLGDTHSILYCAAIAACRVAHVKLTQNERATRPKPAVPAWQCRIERRIDGARALIGKLICFREGNTRPRVMRFVRRAFSGTDISPRDYMSRVTERIDFLKQKVYAWANRIRRYKRRVERYTQNRTFQSDQRRVYRTWERPVPGVSDMRLPDDDAMSSFWRSIWSVPVAHTEGDWMRDIERACETIPEMGEIVISPQDVATAARPLPNWKSPGPDGLHNFWIKWLRSSHACLASQFQSSLESGSLPQFLTTGVTHLLYKSGSTAEPKNYRPITCLPTVYKLFTSILRVKISNHIDNNYILSPSQNGCRSGSRGTKELLLIDMAISQQVRRSRKDLSTCWIDYKKAYDSVPHTWLMRVMELYKINTTLRTLLMSCMRQWRTVLRYPGCREILGRGEPIRIERGIFQGDSLSPLWFCLALNPLSTLLEGTRLGYRLRREGQVISHLLYMDDLKLFAPTDLQLMELLKVTENFSNSIRMEFGVDKCAVMHVKRGGIVESEGIQLSNSIQLRSLSPTETYKYLGMSEALGISEADMRQSLRERFFGRLNKVLKGLLSGGNKVRAFNGWVMPVLMYSFGILKWTQTDLDALDRRVRALLTVHRMHHPRSSVMRLYIPRKCGGRGFLNAKTLHNREVYSLREYFLQAEGEMHRDVVAVDRGLTPLALAKENWRKPVVLSTNDCEEVWQSKELHGRFYRALHGPDVDFLASVSWLRFGDLFGETEGFVCAIMDEVMMTNNYRKYIVKDGTVDICRACHRPGESIRHIISGCSRLANGEYLHRHNLVARIIHQQLALKYNLVESEVPYYRYVPDPVLENGHATLYWDRSIITDRTIVANKPDIVVIDRSERRTMIVDITVPHDENLVKAEKDKQLKYLDLAHEVVAMWDVDSAVIVPIVVTANGLIAKSLDQHLKRLSLDGWIKGLIQKAVLLDTARIVRRFLSLEP

SEQ ID NO: 10200 - protein, 1207 aa, Amphipyra tragopoginis
MLTRSRAKARAQTTQPPPPASSLSSASQPPESSPNVSAVTPAAAVASSSSDEYFSPPTSPPPARRRGGRRPPDRLGPRGPQASDGVPAPGGSVSRMRWTQTINENAMRAYFGATEGGTNLTAYRSRMLSLFQVLEPTVNVSAQRLSDQVRAIQRGHMLDDTVLDRLRSEIQCSPVISSSSQAPGLISRNVPVASPRLQHVDEEDDDRATAVSIQCNEQLRRALEDAMREYRSTRPELRPRLPRLPMHRRNRALMCALDSLLSNYFDSSEDLGDTHSILYCAAVAACRVAHVKFINNERATRPKNAVPAWQCRIERRIAEARALIGKLICFGEGNTRPRVMRFVRRAFSGTDVSPREYMSRVTERIDFLKQKVYAWANRIRRYRRRVDRYNQNRMFRSDERWVYRNWERPDQSVGAAHLPDDDAMNSFWRSIWSVPVTHTEGDWMRDVERMCEPILDMGAIIISPQDVASAVRPLPNWKSPGPDGLHNFWLKWLRSSHARLASQFQSSLETGTLPQFLTTGVTHLLHKSGSTAEPKNYRPITCLPSVYKVLTSILRTKINNHIDNNSIMSASQNGCRNGSRGTKELLLIDMAISQQVRRSRKDLSTCWIDYKKAYDSVPHTWLMRVLELYKVNTTLCAFLTSCMRQWRTVLRYPGCRQIQGIGEPIRIERGIFQGDSLSPLWFCLALNPLSTLLEGSGLGYRLRRGGQVISHLLYMDDLKLFAPNKLQLLELLKVTETFSNSIRMEFGVDKCAVMHVKRGRIMESVGTQLTDSIHLRSLSSTETYKYLGMSEALGINETDMKQSLRERFYGRLKKVLNSLLSGGNKVRAFNGWVMPVLMYSFGILKWTQTELDALDRRVRSLLTANRMHHPRSSVMRLYIPRKCGGRGFLNAKTLHNREVCSLREYFSQADVGMHRDVVAVDKGFTPLSLAKENWRKPVIFDTNDRREVWRSKELHGRFYRALHGPDVDFLASVAWLRFGDLFGETEGFVCAIMDEVMMTNNYRKYIVKDGTVDICRACHCPGESIRHIVSGCSRLANGEYLHRHNLVARIIHQQLALKYNLVDAEVPYYKYVPDPVLENGHVTLYWDRSIITDRTIVANKPDIVVIDRSERLTMIIDITVPHDENLVKAEKDKEIKYQDLAHEVVDMWDVDSAVVVPIVVTANGLIAKSLDQHLKRLSLGGWIKGLIQKAVLLDTARIVRRFLSLRP

SEQ ID NO: 10201 - protein, 1205 aa, Amphipyra tragopoginis
MLTRSRAKTQQSTHPPPSASSLSSASQPPEPASIVSDVTPAAAVASSSSDEYYSPATTPPPARRRGRGRPPTCLGPRGPPASDRVPAPGGSVQRMRWTQSMNENCMRAYFGATEGGTNLTAYRGRMLSLFQALEPAVNVSAQRLSDQVRVIQRDHRLDDAALDRLRNEMQNSHVTPLPAQIRTQPLVPTAVPLEPNRVDEEEEDRAISAGTQYSELVRSALEDALREFRSTPPELRPRLPRLPMHNKNRALVCALDSLLSNVFESSEDLGDTHSILYCAAVAACRVAHVKFPNDNRATRPKSAVPAWQSRIERRVDEARVLIGKLTCFREGNRRPRVMRFVRRAFSGTDIGPGEYVSRITERIDFLKQKVYAWANRIRRYRRRVDRYTQNRNFQSDQRWVYRTWERPDQDVSDTHLPDIDVMNAFWRNIWSVPVTHTEGDWMQEVQRACEPIQEMGAVTIGPQDVASAVRPMPNWKSPGPDGLHNFWIKWLRSSHARLASQFQSSLESGSLPSFLTTGVTHLLFKSGSTAEPKNYRPITCLPTVYKLLTSILRAKLNHHIDSNGIMCATQNGCKNGSRGTKELLLIDMAISQQVRRSRKDLSTCWIDYKKAYDSVPHTWLMRVLELYKINATLRTFLMSCMGQWRTVLHYPGCRQIQGSGELIRIERGIFQGDSLSPLWFCLALNPLSTLLEGSGLGYRLRRGGQVISHLLYMDDLKLFAPNNLQLLELLKVTETFSNSIRMEFGVDKCAVMHVKRGRIMESVGTQLSDSIHLRSLSSTETYKYLGMSEALGINEADMRQSLKERFFGRLIKVLKSLLSGGNKVRAFNGWVMPVLMYSFGILRWTQTELDALDRRVRTLLTAYRMHHPRSSVMRLYIPRKCGGRGFLNAKTLHNREVCSLREYFSQADVGVHRDVVAVDKGLTPLSLAKENWRKPVVLDTHGRREVWRSKELHGRFYRALHGPDVDFLASVAWLRFGNLFGETEGFVCAIMDEVMMTNNYRKYIVKDGTVDICRACHCPGESIRHIVSGCSRLANGEYLHRHNLVARIIHQQLALKYNLVDTEVPYYRYVPDPVLENDHVTLYWDRSIITDRTIVANKPDIVVIDRLERRTMIVDITVPHDENLVKAENDKKIKYLDLAHEVVDMWDVDSAVIVPIVVTANGLIAKSLDQHLMRLSLGSWIKGLIQKAVLLDTARIVRKFLSLEP

SEQ ID NO: 10202 - protein, 1204 aa, Amphipyra tragopoginis
MITRSRAKTQSTQPPPSASSLSSASQSPEPASIVSDVTPAAAVASSSSDEYYSPPTSPPPARRRGRGRPPACLGPRGPPASDRVPASGGSVQRMRWTQSMNENCMRAYFGATEGGTNLTAYRGRMLSLFQALEPAVNVSAQRLSDQVRVIQRDHRLDGAALDRLRSEMRSSHVVPLQSQTAVQSQVPSVVAPRSIPADEESDDRVTNVSTQSNEQLRSALELAFREYRSTLPDLRPRLPRLPMNNKNKALMCALDSLLSSYFDGSEDLADAHSILYCAAVAACRVAHVKVDNNDRATRPKPAVPAWQCRIERRIGEARALIGKLICFREGNTRPRVMRFVRRAFSGTDTSPRDYMSRVAERIDFLKQKVYAWANRIRRYKRRVERYTQNRMFQRDQRWVYRAWERPDQGVRDVHLPDDDAMNSFWRSIWSVPVSHAEGDWMRDVERVCEPILDMGAISISPQDVASAARPLPNWKSPGPDGLHNFWLKWLRSSHARLASQFQSSLETGTLPQFLTTGVTHLLHKSGSTAEPKNYRPITCLPTVYKLLTSILRRKISSHIENNSIMSASQNGCRNGSRGTKELLLIDMAISQQVRRSRKDLSTCWIDYKKAYDSVPHTWLLRVLELYKVNTTLCAFLTSCMGQWRTVLRYPGCRQIQGIGEPIRIERGIFQGDSLSPLWFCLALNPLSTLLEGSGLGYRLRRGGQVISHLLYMDDLKLFAPNNLQLLDLLKVTETFSNSIRMEFGVDKCAVMHVKRGRIMESVGTQLSDSIQLRSLSSTETYKYLGMSEALGINEADMKQSLRERFYGRLKKVLKSLLSGGNKVRAFNGWVMPVLMYSFGILKWTQTELDALDRRVRTLLTAYRMHHPRSSVMRLYIPRKCGGRGFLNAKTLHNREVCSLREYFSQADVGMHRDVVAVDKGLTPLSLAKENWRKPAVLDTNGRKDVWRSKELHGRFYRALHGPDVDFLASVAWLRFGDLFGETEGFVCAIMDEVMMTNNYRKYVVKDGTVDICRACHCPGESIRHIVSGCSRLANGEYLHRHNLVARIIHQQLALKYNLVDAEVPYYRYVPDPVLENGHITLYWDRSVITDRTIVANKPDIVVIDRSERRAVIVDITVPHDENLVKAENDKKIKYLDLAHEVVDMWEIDSAVIVPIVVTANGLIAKSLDQHLMRLSLGSWIKGLIQKAVLLDTARIVRKFLSLEP

SEQ ID NO: 10203 - protein, 868 aa, Amphipyra tragopoginis
MRFVRRAFSGTDTSPRDYMSRVAERIDFLKQKVYAWANRIRRYRRRVERYTQNRMFQRDQRWVYRAWERPDQGVRDVHLPDDDAMNSFWRSIWSVPVSHAEGDWMRDVERVCEPILDMGAISISPQDVASAVRPLPNWKSPGPDGLHNFWLKWLRSSHARLASQFQSSLETGTLPQFLTTGVTHLLHKSGSTAEPKNYRPITCLPTVYKLLTSILRCKISSHIENNSIMSASQNGCRNGSRGTKELLLIDMAISQQVRRSRKDLSTCWIDYKKAYDSVPHTWLLRVLELYKVNATLCAFLTSCMGQWRTVLRYPGCRQIQGRGEPIRIERGIFQGDSLSPLWFCLALNPLSTLLEGSGLGYRLRRGGQVISHLLYMDDLKLFAPNNLQLMELLKVTETFSNSIRIEFGLDKCAVMHVKRGGIMESVGTELSDSIHLRSLSSTETYKYLGMSEALGINEADMKQSLRERFYGRLKKVLKSLLSGGNKVRAFNGWVMPALMYSFGILKWTQTELDALDRRVRTLLTAYRMHHPRSSVMRLYISRKCGGRGFLNAKTLHNREVCSLREYFSQADVGMHRDVVAVDKGLTPLSLAKENWRMPVVLDTNGRRDVWRSKELHGRFYRALHGPVVDFQASVAWLRFGDLFGETEGFVCAIMDEVMMTSNYRRYVVKDGTVDICRACHCPGESIRHIVSGCSRLANGEYLHRHNLVARIIHQQLALKYNLVAAEVPYYKYVPDPVLENGHVTLYWDRSIITDRTIVANKPDIVVIDRSERRAMIVDITVPHDENLVKAENDKKIKYLDLAHEVVDMWNVDSAVIVPIVVSANGLIPKSLNQHLMRLSLGSWIKGLIQKAVLLDTARIVRKFLSLEP

SEQ ID NO: 10204 - protein, 1204 aa, Amphipyra tragopoginis
MLTRSRAKTQQSTHLPPSAPSLSSASQPPEPASIVSDVTPAAAVASSSSDEYFSPATTPPPARRRGRGRPPACLGPRGPPASDRVPAPGGSVQRMRWTQSMNENCMRAYFGATEGGTNLTAYRGRMLSLFRALEPAVNVSAQRLSDQVRVIQRDHRLDDAALDRLRNEMQNSHVTPLPAQIRRQPLVPPAVPLEPNHGDEEEDRAISAGTQYSELMRSALEDALREFRSTPPELRPRLPRLPMHNKNRALVCALDLLLSNVFESSEDLGDTHSILYCAAVAACRVAHVKFPNDNRATRPKSAVPAWQCRIERRIEEARVLIGKLTCFREGNRRPRVMRFVRRAFSGTDIGPGEYVSRITERIDFLKQKVYAWANRIRRYRRRVDRYTQNRIFQSDQRWVYRTWERPDQGVSDAHLPDNDVMNAFWRNIWSVPVTHTEGDWMQEVQRACEPIQEMGAVTIGPQDVASAVRPMPNWKSPGPDGLHNFWIKWLRSSHARLASQFQSSLESGSLPSFLTTGVTHLLFKSGSTAEPKNYRPITCLPTVYKLLTSILRAKLNHHIESNAIMCATQNGCKNGSRGTKELLLIDMAISQQVRRSRKDLSTCWIDYKKAYDSVPHTWLMRVLELYKINATLRTFLMSCMGQWRTVLHYPGCRQIQGNGELIRIERGIFQGDSLSPLWFCLALNPLSTLLEGSGLGYRLRRGGQVISHLLYMDDLKLFAPNNLQLLELLKVTETFSNSIRMEFGVDKCAVMHVKRGRIMESVGTQLSDFIHLRSLSSTETYKYLGMSEALGINEVDMKQSLRERFFGRLIKVLKSLLSGGNKVRAFNGWVMPVLMYSFGILRWTQTELDALDRRVRTLLTAYRMHHPRSSVMRLYIPRKCGGRGFLNAKTLHNREVCSLREYFSQADVGMHRDVVAVDKGLTPLSLAKENWRKPVVLDTNGRRDVWRSKELHGRFYRALHGPDVDFLASVAWLRFGDLFGETEGFVCAIMDEVMMTNNYRKYIVKDGTVDICRACHCPGESIRHIVSGCSRLANGEYLHRHNLVARIIHQQLALKYNLVDTEVPYYKYVPDPVLENGHVTLYWDRSIITDRTIVANKPDIVVIDRLERRTMIVDITVPHDENLVKAENDKKIKYLDLAHEVVDMWDVDSAVIVPIVVTANGLIAKSLDQHLMRLSLGSWIKGLIQKAVLLDTARIVRKFLSLGP

SEQ ID NO: 10205 - protein, 1206 aa, Amphipyra tragopoginis
MLTRSRAKAQNTRPPSSASSLSSASQPPEPASIVSDVTPAAAVASSSSDEYFSPATSPSPPPARRRGRGRPPTCLGPRGPPASDRVPAPGGSVQRMRWTQSMNENCMRAYFGATEGGTNLTAYRGRMLSLFQALEPAVNVSAQRLSDQVRVIQRDHRLDDAALDRLRSEMQNSHAAPLPSQIRTQTLVPPAVPLESNYADEEGEDRAISAGTQYSEIMRSALEDALREFRSTPPELRPRLPRLPMHNKNRALVCALDSLLPNVFESSEDLGDTQSILYCAAVAACRVAHVKFPNYNRATRPKSAVPAWQCRIERRIDEARVLIGKLTCFREGNRRPRVMRFVRRAFSGTDIGPGEYASRVTERIDFLKQKVYAWANRIRRYRRRVDRYTQNRIFQSDQRWVYRTWERPDQGVSDTHLPDNDVMNAFWRNIWSVPVTHTEGDWMQEVQRACEPIQEMGAVTIGPQDVTSAVRPMPNWKSPGPDGLHNFWIKWLRSSHARLASQFQSSLESGSLPAFLTTGITHLLFKSGSTAEPKNYRPITCLPTVYKLLTSILRAKLNHHIVSNAIMCATQNGCKNGSRGTKELLLIDMAISQQVRRSRKDLSTCWIDYKKAYDSVPHTWLMRVMELYKVNATLRTFLMSCMGQWRTVLHYPGCRQIQGNGELIRIERGIFQGDSLSPLWFCLALNPLSTLLEGSGLGYRLRRGGQVISHLLYMDDLKLFAPNNLQLVELLKVTETFSNSIRMEFGVDKCAVMHVKRGRIMESVGTQLSDSIHLRSLSSTETYKYLGMSEALGINEADMKQSLRERFFGRLIKVLKSLLSGGNKVRAFNGWVMPVLMYSFGILRWTQTELDALDRRVRTLLTAYRMHHPRSSVMRLYIPRKCGGRGFLNAKTLHNREVCSLREYFSQADVGMHRDVVAVDKGLTPLSLAKENWRKPVVLDAKGRMEVWRSKELHGRFYRALHGPDVDFLASVAWLRFGDLFGETEGFVCAIMDEVMMTNNYRKYIVKDGTVDICRACHCPGESIRHIVSGCSRLANGEYLHRHNLVARIIHQQLALKYNLVDTEVPYYKYVPDPVLENGHVTLYWDRSIITDRTIVANKPDIVVIDRLERRTMIVDITVPHDENLVKAENDKKIKYLDLAHEVVDMWDVDSAVIVPIVVTANGLIAKSLDQHLMRLSLGSWIKGLIQKAVLLDTARIVRKFLSLEP

SEQ ID NO: 10206 - protein, 1079 aa, Amphipyra tragopoginis
MLLLFQVLEPAINVSTQRLSDQVRVIQRNRRLDDTVLERLRSEVQNNRAVTPPVQAVVQAQLPAVPSRPSHGDGEGDGEVIEVSNQCSDELRSALEGAILEYRATPPELRPRLPRLPMHKKNRALVCALDSLLSNYFDGSEDLADTHSILYCAAIAACRVAHVKFTDNERATRPKPAVPAWQCRIERRIGGARALIGKLICFREGNTRPRVMRFVRRAFSGTGISPRDYMSRITERIDFLKQKVYAWANRIRRYKRRVERYTLNRTFQSDQRRVYRTWERPDPCGSDVRLPDDEAMSSFWRSIWSVPVAHTEGGWMRDIERACESIPEMGAIIISPQDVAGAARPLPNWKSPGPDGLHNFWLKWLRSSHACLASQFQSSLESGSLPQFLTTGATHLLYKSGSTAEPKNYRPITCLPTVYKLLTSILRVKISNHIDNNSIMSASQNGCRNGSRGTKELLLIDMTISQQVRRSRKDLSTCWIDYKKAYDSVPHTWLMRVLELYKINATLRTFLMSCMRQWRTVLRYPGCREIRGRGEPVRIERGIFQGDSLSPLWFCLALNPLSTLLEGTRLGYRLRREGQVISHLLYMDDLKLFAPTDLRLMELLKLTENFSSSIRMEFGVDKCAVMHVKRGRIVESEETQLSNSIQLRSLSPTETYKYLGMSEALGISEADMRQSLRERFFGRLNKVLRSLLSGGNKVRAFNGWVMPVLMYSFGILKWTQTDLDALDRRVRALLTTHRMHHPRSSVMRLYIPRKCGGRGFLNAKTLHNREVCSLREYFLQAEGEMHRDVVAVDKGLTPLALAKENWRKPAVLSTNDREEVWQSKELHGRFYRALHGPDVDFPASVSWLRFGDLFGETEGFVCAIMDEVMMTNNYRRYIVKDGTVDICRACHRPGESIRHIVSSCSRLANGEYLHRHNLVARIIHQQLALKYNLVESEVPYYRYVPDPVLENGHVTLYWDRSIITDRTIVANKPDIVVIDRSERRTMIVDITVPHDENLVKAEKDKQIKYLDLAHEVVGMWDVDSAVVVPIVVTANGLIAKSLDQHLKRLSLGGWIKGLIQKAVLLDTARIVRRFLSLEP

SEQ ID NO: 10207 - protein, 1092 aa, Noctua pronuba
MNENVMRAYYGATEGGINLTAYRCRMLSLFQALEPTVNVSAQRLSDQVRVIQNNHRLDDATLDRLRSELRISPASNLLPSQNVTHVPAALPLQANQHAEEEDDRAVSAENLCNVELRSALEGAIREYRFMSPDLRPRLPCLPMNKKNRALVCALDALLPNFIESSANLCDTHSILYCTAVAACRVANVKFPNTDSATRPKSAVPVWQCRIERRINEARALIGKLICFREGNTRPRVMRFVRRAFSGTDISPREYMSRVTERIDFLKQKIYAWANRIRRYRRRVDRYTQNRMFQSDERWVYRTWERPVTIQGVTDAHLPENDAMSAFWRSIWSVPVSHTEGDWMRVVEQACDSIPEMEAISISPLDVARAVRPLPNWKSPGPDGLHNFWIKWLQRSHACLASQFQSSLETGSLPSFFTTGVTHLLHKSGSTAEPKNYRPITCLPTVYKVLTSILRAKIVRHIDSNSIMSVSQNGCRNGSRGTKELLLIDMAISQQVRRSRRDLSTCWIDYKKAYDSVPHTWLRRVLELYKIDATLRTFLVSCMGQWSTVLLYPGCRQVLGNDEPIRIERGIFQGDSLSPLWFCLALNPLSTLLEDSGLGYRLRRGGQVISHLLYMDDLKIFAPSNLQLMELLKVTETFSSAIRMEFGVDKCAVMHVKRGEIMESVGTQLSDSIYLRSLSSTETYKYLGMSEALGINAADMKQSLKERFFGRLSKVLKSLLSGGNKVRAFNGWVMPVLMYSYGILKWTQTELDALDRKVRTLLTANRMHHPRSSVMRLYIPRKCGGRGFLNAKTLHNREVCSLREYFLETDVGMHRDVVSVDKGLTPLSLANENWRKPVVLDTNDRKEVWQSKELHGRFFRALHGPDVDLLASVSWLRFGDLFGETEGFVCAIMDEVIMTNNYRKYIVKDGTVDICRACHRPGESIRHIVSGCSRLANGEYLHRHNLVARIIHQQLALQYNLVGTEVPYYKYVPDPVLENGHATLYWDRSIITDRTILANKPDIVVIDRRERRAMIVDITVPHDENLVKAENDKKIKYLDLAHEVVDMWDVDSAIIVPIVVTVNGLIAKSLDQHLRRLSLRGWVKGLIQKATYS

SEQ ID NO: 10208 - protein, 1204 aa, Noctua pronuba
MITRSRAKQQKAHPPSPGSSLSSASQPPGRATSVSSVSPVAAVASSSSDEFFSPPSTPSPPRRRGRGRPPAGLGPRGQQAPNRVPAAGGNVSRMRWTQSINENVMRAYYGATEGGSNLTAYRGRMLSLFQVLEPGVSVSAQRLSDQVRVIQRNHMLDDTVLDRLRFDSRSNLVTPASPMIAVQLQNVSCAPPRSDHDGEEDDDEVISVSTQCNAQLRSALEGAFREYRSIPPELRPRLPRLPMHKKNKALVCALDSQLSTCFDSSKDLADTHSILYCGAVAACRVAHVKFPNNDRATRPKLAVPAWQRRIERRIGEARALIGKLICFREGNTRPRVMRFVRRAFSGTGISFRDYLARVTERIDFLKQKICAWANRIRRYKRRVERYTQNRTFQSDERWVYRAWERPDQGVTDTRLPDADAMCLFWRSIWSVPVSHTEGDWTREVEQACDPIPEMGAIIISPQDVACAVRPLPNWKSPGPDGLHNFWIKWFQRSHARLASQFQSALESGSLPQFLTTGITHLLHKSGSTAEPKNYRPITCLPTVYKVLTSILRAKINHHIDSNSIMSASQNGCRNGSRGTKELLLIDMAISQQVRRSRRDLSTCWIDYKKAYDSVPHTWLMRVLELYKVDATLRTFLKSCMGHWRTVLRYPGCRQIQGNSEPIRIERGIFQGDSLSPLWFCLALNPLSTLLEGSGLGYRLRRGGQVISHLLYMDDLKLFAPNNLQLMKLLKVTETFSSAIRMEFGVDKCAVMHVKRGEIMESVGTQLSDSIHLRSLSSTETYKYLGMSEALGINTTDMKQSLRERFFGRLNKVLGSLLSGGNKVRAFNGWVMPVLMYSFGILKWTQTELDALDRRVRALLTANRMHHPRSSVMRLYIPRKCGGRGFLNAKTLHNREVCSLREYFLEADVGMHRDVVSVDKGLTPLSLANENWRKPRVLDTNDRKEVWQGKELHGRFYRALHGPDVDFLASVSWLRFGDLFGETEGFVCAIMDEVMMTNNYRKYIVKDGTVDICRACHRPGESIRHIISGCSRLANGEYLHRHNLVARIIHQQLALKYNLVESEVPYYKYAPDPVLDDGNITLYWDRSIITDRTIVANKPDIVVIDRLERRAMIVDITVPHDENLVKAEKDKQFKYLDLAREVVDMWDVSTAVIVPIVVSANGLIAKSLDQHLRRLSLGSWIKRLIQKAVLLDTARIVRRFLSQEP

SEQ ID NO: 10209 - protein, 1200 aa, Tinea trinotella
MNFTVYNNNKSAQLTSSGSSLSSASQPPGSTPTVSQVISVAAVASSSSDECFSPPTTPPSARRRGGGRPPASLEPRGPSASGGVPATSGRVQRMRWTQSINENVMRSYFGATEGGSSLTAYRGRMLTLFRVLEPAVNVSAQRLSDQVRVIQRNRMLDDVVLDRLRLESRSSHVSPVSPPVAVQLQPSALPRPNNIEENDDDVTISVSNQYNEQLRSALEDAFREYRSTPPGLRPRIPRLPMHKKNRALVCALDSQLVNHFKSSKDLADTHSILYCAAVAVCRVAHVKFPNNDRAARLAVPAWQCRIERRIGEARALIGKLIRFREGNTRPRVMRFVRRAFSGTDISSRDYQTRVTERIDFLKQKIYAWANRIRRYKRRVERYTQNRTFQSNERWVYRAWERPDQDVSDMCLPDDDAMSLFWRNIWSVPVGHTEGEWTREVERACDFIPEMGAIIISPQDVACAVRPLSNWKSPGLDGLHNFWIKCFQRSHARLAAQFQSALELGSLPQFLTTGITHLLHKSGSTAEPKNYRPITCLPTVYKVLTSILRAKIDKHIDTNCIMSASQNGCRSGSRGTKELLLIDVAISQQVRRSRRDLSTCWIDYKKAYDSVPHTWLMRVLELYKVDAALRTFLVSCMGQWRTVLHYPGCRRILGNGEPIKIERGIFQGDSLSPLWFCLALNPLSTLLDGSGQGYRLRRDGQVISHLLYMDDLKLFAPNNLQLMKLLKVTETFSSAISMEFGVDKCAIMHVKRGEIMESVGTQLSDSIHLRSLCSTETYTYLGMSEALGINAVDVKQSLRDRFFGRLNKVLNSLLSGGNKVRAFNGWVMPVLMYSFGILKWTQTELNALDRRVRTLLTANRMHHPRSSVMRLYIPRKCGGRGFLNAKTLHNREVCSLREYFLKTDVGMHRDVVAVDKGLTSLSLANENWRKPVVLDANDRREVWQSKELHGRFYRALHGPDVDFLASVSWLRFGDLFGETEGFVCAIMDEVMMTNNYRKYIVKDGTVDICRACHRPGESIRHIISGCSRLANGDYLHRHNLVARIIHQQLALKYNLVESEVPYYRYVPDPVLENGNITLYWDRSIITDRTIVANKPDIVVIDRLERRTIIVDVAVPHDENLVKAEKDKQIKYLDLAREVVDMWEVDTAIIVPIVVTANGLIAKSLDEHLKRLSLGSWIKRLIQKAVLLDTARIVRRFLSQEP

SEQ ID NO: 10210 - protein, 1207 aa, Ochropleura plecta
MLTRRRAQEQQALPSSPGSSLSSASQPPGRATRVSAVSPVTAVASSSSDEFFSPPSSPPPPPTRQRRGRGRPPAGLGSRGQQAPIRVPAAGGNVSRMRWTSFINANVMRAYYGSTEGGTNLTAYRVRMLSLFQDLEPTINVSAQRLSDQVRVIQRNHLLDDAALDRLRSEVLSNRVILTTPQTAVQASAIDVTQPRSNPAVVEEDDRVATVSSQCNDRLRSALEDALRDYRSTPAELRPRLPRLPMHKKNRALVCALDSQLKNLFESSEDLVDTHSILYCGAVAVCRLANVKLPNCDVATRPKPSVPAWQCRIERRIDEARALIGKLYCFREGNTRPRVMRFVRRAFSGTGISPQEYMSRTTERIDFLKQKVYAWANRIQRYKRRVDRYSQNRMFRSDERWVYRAWERPEQSVTDVCRPDDVATSSFWHSIWSVRVCHTEAGWMRDVERVCETIPEMEPILITSLDIASAVRPLPNWKSPGPDGLHNFWPKWLSSSHTRLASQFQSCLESGSLPQFLTTGVTHLLYKSGSPAEPKNYRPITCLSTVYKLLTSILRAKINSHIVKNSIISASQNGCRNGSRGTKELLLIDMAISQQVRRSRKDLSTCWIDYKKAYDSVPHTWLKRVLELYKIDTTLRTFLESCMGQWRTVLRYPGCRQIQGNDEPVWIKRGIFQGDSLSPLWFCLALNPLSTLLEDSGLGYRLRRGGQVISHLFYMDDLKLFAPNKLRLMELLKVTETFSNAIRMEFGVDKCAVMYVKRGVFMESEGIHLSDSIHLRSLSSSESYKYLGMSEALGINVADMKQLLRERFFGRLKKVLKSLLSGGNKVRAFNSWVMPVLMYSFGILKWTQTELDALDRRVRTLLTANRMHHPRSSVMRLYIPRKCGGRGFLNAKTLHNREVCSLREYFLKTDVGMHRDVVAVDKGLTPLSMAKENWRKPVVLTTDYRKEVWQGKELHGRFYKALHGPDVDFLASVSWLRFGDLFGETEGFVCAIMDEVMLTNNYRKYIMKDGTVDVCRACHRPGESIRHIISGCSRLANGEYLHRHNQVARIIHQQLALKYNLVESEVPYYKYVPDPVLEKDHVTLYWDRSIITDRTIVANKPDIVVIDRSARRVMIIDVTIPHDENLVKAEKEKQLKYLDLAHEVVDMWNVNSAIIVPIVITANGLIAKSLDEHLSKLSLGGWIKGLIQKAVLLNTARIVRRFLSLEP

SEQ ID NO: 10211 - protein, 1103 aa, Hecatera dysodea
MRWTQTINENVMRSYYGATEGGTNLTAYRGRMLSLFQVLEPADNVSAQRLSDQVRVIQRNRMLDDSVLDRLRTEICSHVIVPSPQTVAPPQLTQIPCHADEENNDRVTNVSTQCNDELRSALESAIREYRYVSPELRPRIPRLPMHNKNRALVAALDSQLSNYFDNCEDLTDAHSIMYCAAVAACRVAHVIMPSDRVTRPKVAAWQCRIERRIGGARALIGKLICFREGNTRPRVMRFVRRAFSGTDISPSDYLSRVTERIDFLKQKVYAWANRIRRYKRRVERYTQNRTFRSNERWVYKAWERPDQDVTNMHPPDDDAMCSFWRNIWSVPVSHTEGDWIREVERACDPLPEMGAIIISPQDVARAVRPLPNWKSPGPDGLHNFWIKWFKGSHAFLASRYQAALESGSLPEFFMTGVTHLLHKSGSTAEPKNYRPITCLPTVYKVLTSILRDKINQHINSNNIMSASQNGCRNGSRGTKELLLIDMVISQQVRRSQKDLSTCWIDYKKAYDSVPHSWLMRVLELYKMDTTLRTFLMSCMGQWRTVLRYPGCRNIQRNSEPVRIERGIFQGDSLSPLWFCLALNPLSTLLENSGLGYRLRRGGQVISHLLYMDDLKLFAPTNLQLMELLKVTETFSNAIRMEFGVDKCAVMHVKRGEIMESVGTQLSESINLRSLSSTETYKYLGMSEALGINVTDMKQSLRERFFGRLKKVLNSLLSGGNKVRAFNGWVMPVLMYSFGVLKWTQTELDALDRRVRTLLTAYRMHHPRSSVMRLYIPRKCGGRGFLNAKTLHNREICSLREYFLAVDVGMHRDVVAVDKGLTPLSLANENWRKPAVLDTNDRRAVWQSKELHGRFFRALHGPDVDQLASVAWLRFGDLFGETEGFVCAIMDEVIMTRNYRRFIVKDGTVDICRACHRPGESIRHIVSGCSSLANGEYLHRHNLVARIIHQQLALKYSLVESEVPYYRYVPDPVLDNGNITLYWDRSIITDRTIVANKPDIVVVDRIVRRAMIVDITVPHDENLVKAEKDKQIKYLDLAREVVDMWDVDSAIIVPIVVSVNGLIAKSLDQHLRRLTLGGWIKGLIQKAVLLDTARIVRRFLSLGP

SEQ ID NO: 10212 - protein, 931 aa, Hecatera dysodea
MHKKNRALLCALDSQLSIYFDSSENLTDTHSILYCGAAAACRVAHVKFPNSDRVARPAVPAWQCRIERRIGEARALIGKLICFREGNTRRRVMRFVRRAFSETDISPRDYLTRVTERIDFLKQKVYAWANRIRRYKRRVERYTQNRTFQGNERWVYRAWERPDQGVTDTRLPDDVAMLSFWRNIWSVPVSHTEGDWTREVERACDPIPEMGAINISPQDVARAVRPLPNWKSPGPDGLHNFWIKWFKGSHARLASQFQSALGSGSLPKFLTTGITHLLHKSGSTAEPKNYRPITCLPTVYKVLTSILRAKINNRIDSNSIMSASQNGCRNGSRGTKELLLIDVAISQQVRRSRRDLSTCWIDYKKAYDSVPHTWLMRVLELYKVDAVLRTFLMSCMGQWSTVLHYPGCRQTQANSEPIRIERGIFQGDSLSPLWFCLALNPLSTLLEGSGQGYRLRRGGQVISHLLYMDDLKLFAPNNLQLMKLLKVTETFSSDISMEFGVDKCAVMHVKRGEIMESVGTQLSDSILLRSLCSTETYKYLGMSEALGINATGVKQSLKERFFGRLNKVLNSLLPGGNKVRAFNGWVMPVLMYSFGILKWTQTELDALDRRVRSLLTANRMHHPRSSVMRLYIPRKCGGRGFLNAKTLHNREICSLREYFLEADVGMHRDVVAVDKGLTPLSLANENWRKPVVLDTNDRRVVWQSKELHGRFYRVLHGPDVDFLASVAWLRFGDLFGETEGFIYAITDEVMMTNNYRKYIVKDGTIDICRACHRPGESIRHIISGCSSLANGDYLHRHNLVARIIHQQLALKYNLVESEVPYYRYAPDPVLENGNCTLYWDRSIITDRTIIANKPDIVVIDRLERRAMIVDIAVPHDENLVKAEKDKQSKYLDLAREVVDMWNVNTAVIVPIVVTANGIIAKSLDQHLKRLS

SEQ ID NO: 10213 - protein, 1196 aa, Hecatera dysodea
MLTRAAARRARLPPPASSLSSASPPPEPSPTVSAATPAVAVASSSSDEYFSPPTSPPPARRRRGRRPPDGLGPRGPPVSDRVPAPGGSVQRMRWTQTINENVMRSYYGATEGGTNLTAYRGRMLSLFQVLEPAVNVSAQRLSDQVRVIQRNRMLDDSVLDRLRTEICSHVIVPSPQTVAPPQLTQIPCHADEENNDRVMNVSTQCNDELRSALESAIREYRYVSPELRPRIPRLPMHNKNRALVAALDSQLSNYFDNCEDLTDAHSIMYCAAVAACRVAHVKMPSDRVTRPKVAVPAWQCRIERRIGGARALIGKLICFREGNTRPRVMRFVRRAFSGTDISPSDYLSRVTERIDFLKQKVYAWANRIRRYKRRVERYTQNRTFRSNERWVYKAWERPDQDVTDMHPPDDDAMCSFWRNIWSVPVSHTEGDWIREVERACDPLPEMGAIIISPQDVARAVRPLPNWKSPGPDGLHNFWIKWFKGSHACLASRYQAALESGSLPEFFMTGVTHLLHKSGSTAEPKNYRPITCLPTVYKVLTSILRDKINQHINSNNIMSASQNGCRNGSRGTKELLLIDMVISQQVRRSRKDLSTCWIDYKKAYDSVPHSWLMRVLELYKIDTTLRTFLMSCMGQWRTVLRYPGCRNIQRNSEPVRIERGIFQGDSLSPLWFCLALNPLSTLLENSGLGYRLRRGGQVISHLLYMDDLKLFAPTNLQLMELLKVTETFSNAIRMEFGVDKCAVMHVKRGEIMESVGTQLSDSINLRSLSSTETYKYLGMSEALGINVTDMKQSLRERFFGRLKKVLNSLLSGGNKVRAFNGWVMPVLMYSFGVLKWTQTELDALDRRVRTLLTAYRMHHPRSSVMRLYIPRKCGGRGFLNAKTLHNREICSLREYFLAVDVGMHRDVVAVDKGLTPLSLANENWRKPAVLDTNDRRAVWQSKELHGRFFRALHGPDVDQLASVAWLRFGDLFGETEGFVCAIMDEVIMTRNYRKFIVKDGTVDICRACHRPGESIRHIVSGCSSLANGEYLHRHNLVARIIHQQLALKYSLVESEVPYYRYVPDPVLDNGNITLYWDRSIITDRTIVANKPDIVVVDRIVRRAMIVDITVPHDENLVKAEKDKQIKYLDLAREVVDMWDVDSAIIVPIVVSVNGLIAKSLDQHLRRLTLGGWIKGLIQKAVLLDTARIVRRFLSLEP

SEQ ID NO: 10214 - protein, 1200 aa, Hecatera dysodea
MLTRSRTRAQTTQSTSSGSSLSSASQPPGPTPAVSPEIPVAAVASSSSDEYFSPPTTPPPARRRGRGRPPTSLGPRGPPASDRVPAIGGSVQRMRWTQSINENVMRSYFGATEGGTNLTAYRGRMLSLFQVLEPAVNVSAQRLSDQVRVIQRNRMLDDAVLDRLRLESRSSRVSPASPPAAVQIQPSISPRPDHVSEDVDDGAITVSTQCNERLRSALEDAFREYRSTPPELRPRLPRLPMHNKNRALVCALDSQLENCFNSSKDLADTHSILYCAAAAACRVAHVKFPNSDRATRPAVPAWQCRIERRIGEARALIGKLICFREGNTRRRVMRFVRRAFSGTDISPRDYLTRVTERIDFLKQKVYAWASRIRRYKRRVERYTQNRTFQSNERWVYRAWERPDQVVTDTHLPDDDAMCSFWRSIWSVPVSHTEGDWTREVERTCDPIPEMGAITISPQDVARAVRPLPNWKSPGPDGLHNFWIKWFTRSHVRLASQFQSALESRSLPQFLTTGITHLLHKSGSTAEPKNYRPITCLPTVYKVLTSILRAKINDHIESNSIMSTSQNGCRNGARGTKELLLIDVAISQQVRRSRKDLSTCWIDYKKAYDSVPHTWLMRVLELYKVDAVLRAFLMSCMGQWRTVLHYPGCRQTQANSEPIRIERGIFQGDSLSPLWFCLALNPLSTLLEGSGQGYRLRRGGQVISHLLYMDDLKLFAPNNLQLMKLLKVTETFSSDISMEFGVDKCAVMHVKRGEIMESVGTQLSDSIHLRSLCSTETYKYLGMSEALGINATSVKQSLKERFFGRLNKVLNSLLSGGNKVRAFNGWVMPVLMYSFGILKWTQTELDALDRKVRSLLTANRMHHPRSSVMRLYIPRKCGGRGFLNAKTLHNREVCSLREYFLEADVGMHRDVVAVDKGLTPLSLANENWRKPVVLDTNDRREVWQSKELHGRFYRVLHGPDVDFLASVAWLRFGDLFGETEGFICAITDEVMMTNNYRKYIVKDCTVDICRACHRPGESIRHIISGCSSLANGDYLHRHNLVARIIHQQLALKYNLVESEVPYYRYVPDPVLENGNCTLYWDRSIITDRTIVANKPDIVVIDRLERRAMIVDIAVPHDENLVKAEKDKQSKYLDLAREVVDMWNVNTAVIVPIVVTANGIIAKSLDQHLKRLSLGSWIKGLIQKAVLLDTARIVRRFLSREP

SEQ ID NO: 10215 - protein, 1200 aa, Mythimna impura
MLTRSRAQKLHTHPTSSGSSLSSASQPPGPAPTVSPEIPVAAVASSSSDEYFSPPTTPPPARRRGRGRPPASLGPRGPPASDRVPAAGGSVQRMRWTSSINENVMRSYFGATEGGINLTAYRSRMLSLFQVLEPAVNVSVQRLSDQVRVIQRNRMLDDAVLDRLRLESQSSRVSPATTPAAVQRLPTASPRPVQVGDADDDAAISVSTQCNDRLRGALEDAFREYRSTPPGLRPRLPRLPMHKRNRALVCALDSQLSNCFDSSKDLTDTHSILYCAAVAACRVAHVKFPNCDRATRPAVPAWHCRIEHRIVEARALIGKLICFREGNTRPRVMRFVRRAFSGTDISPRDYLPCVTERIDFLKQKIYAWANRIRRYKRRVERYTRNRTFQSNERWVYRDWERSDQGVTDTRLPDDDAMCSFWRSIWSAPVSHTEGDWIREVERACDLLPEMGAITISPQDVARAVRPLPNWKSPGPDGLHNFWVKWFQRSLARLASQFQSALESGSLPQFLTTGITHLLHKSGSTAEPKNYRPITCLPTVYKVLTSILRAKINSHIETNSIMSASQNGCRNGSRGTKELLLIDIAISQQVRRSRKNLSACWIDYKKAYDSVPHTWLMRVLELYKVDATLRTFLMSCMGQWRTVLHYPGCRQIQENNEPIRIERGIFQGDSLSPLWFCLALNPLSTLLEGSGLGYRLKRGGQVISHLLYMDDLKLFAPNNLQLVELLKVTETFSSAIRMEFGVDKCAVIHVKRGEIMESVGIQLSDSIHLRSLCSTETYKYLGTSESLGINTDDVKQSLKERFFGRLNKVLNSLLSGGNKVRAFNGWVMPVLMYSFGILKWTQTELDALDRRVRTLLTANRMHHPRSSVMRLYIPRKCGGRGFLNAKTLHNREVCSLREYFLKTDVSMHRDVVAVDKGLTPLSLANENWRKPIVLDTNDRREVWQSKELHGRFYRALHGPDVDLLASVSWLCFGDLFGETEGFVFAVMDEVMTTNNYRKYIVKDGTVDICRACHRPGESIRHIISGCSHLANGDYLHRHNLVARIIHQQLALKYNLVESEVPYYRYVPDPVLDNGNITLYWDRSIITDRTIVANKPDIVVIDRLERRTMIVDIAVPHDENLVKAEKDKQTKYLDLAREVVDMWEVDKAIIVPIVVTANGLIAKSLEQHLRRLSLGSWIKGLIQKAVLLDTARIVRRFLSLEP

SEQ ID NO: 10216 - protein, 1200 aa, Mythimna impura
MLTRSRAKKANTHPTSSGSSLSSASQPPGPAPTVSPEIPVAAVASSSSDEYFSPPTTPPPARRRGRGRPPASLGSRGPPASDRVLAAGGSVQRMRWTQSINENVMRSYFGATEGGSNLTAYRGRMLSLFQVLEPAVNVSAQRLSDQVRVIQRNRMLDDAVLDRLRLESRSSRVSPASPQAAVQLQSNVSLRPDHVGEDDDDGAISVSNQCNVRLRSALEDAFREYRFTPAELRPRLPRLSMHKKNRALVCALDSQLSNCFDSSEDLTDTHSILYCAAVAACRVARVKFPNSDRVTRPAVPAWQCRIERRIGEARALIGKLICFREGNTRPRVMRFVRRAFSGTDISPRDYLPHITERIDFLKQKVYAWANRIRRYKRRVERYTQNRTFQRNERWVYRAWERPDQGVIDTRLPDDDAMCSFWRSIWSVPVSHTEGDWIREIERTCDLIPEMGAITISPQDVARAVRPLPNWKSPGPDGLHNFWLKWFQRSHARLASQFQSALESGSLPQFLTTGITHLLHKSGSTAEPKNYRPITCLPTVYKVLTSILRAKINSHIETNSIMSASQNGCRNGSRGTKELLLIDVAISQQVRRSRRDLSTCWIDYKKAYDSVPHTWLMRVLELYKVDATLRTFLMSCMRQWRTALHYPGCRQIRESSEPIRIERGIFQGDSLSPLWFCLALNPLSTLLEGSGLGYRLRRGGHVISHLLYMDDLKLFASNNLQLMELLKVTETFSSAIRMEFGLDKCAVMHVKRGEIMESVGTQLSDSIYIRSLCSTETYKYLGMSEALGINAADMKQSLRERFFGRLNKVLNSLLSGGNKVRAFNGWVMPVLMYSFGILKWTQTELDALDRRVRSLLTANRMHHPRSSVMRLYIPRKCGGRGFLNAKTLHNREICSLREYFLKTDVGMHRDVVAVDKGLTPLSLVNENWRKPTVMDTNERRAVWQGKELHGRFYRALHGPDVDLLASVSWLRFGDLFGETEGFVFAIMDEVMMTNNYRKYIVKDGTVDICRACHRPGESIRHIISGCSHLANGDYLHRHNLVARIIHQQLALKYNLVESEVPYYRYVPDPVLENGGVTLYWDRSIITDRTIVANKPDIVVIDRLERRTMIVDIAVPHDENLVKAEKDKQTKYLDLAREVVDMWEVDRAIIVPIVVTANGLIAKSLEQHLRRLSLGSWIKGLIQKAVLLDTARIVRRFLSQEP

SEQ ID NO: 10217 - protein, 1200 aa, Mythimna impura
MLTRSRAKKANTHPTSSGSSLSSASQPPGPAPTVSPEIPVAAVASSSSDEYFSPPTTPPPARRRGRGRPPASLGSRGPPASDRVPAAGGSVQRMRWTQSINENVMRSYFGATEGGSNLTAYRGRMLSLFQVLEPAVNVSAQRLSDQVRVIQRNRMLDDAVLDRLRLESRSSRVSPASPQAAVQLQSNVSLRPDHVGQDDDDGAISVSNQCNVRLRSALEDAFREYRFTPAGLRPRLPRLPMHKKNRALVCALDSQLSNCFDSSEDLTDTHSILYCAAVAACRVARVKFPNSDRVTRPAVPAWQCRIERRIGEARALIGKLICFREGNTRPRVMRFVRRAFSGTDISPRDYLPHITERIDFLKQKVYAWANRIRRYKRRVERYTQNRTFQRNERWVYRAWERPDQGVIDTRLPDDDAMCSFWRSILSVPVSHTEGDWIREIERTCALIPEMGAITISPQDVARAVRPLPNWKSPGPDGLHNFWLKWFQRSHARLASQFQSALESGSLPQFLTTGITHLLHKSGSTAEPKNYRPITCLPTVYKVLTSILRAKINSHIETNSIMSASQNGCRNGSRGTKELLLIDVAISQQVRRSRRDLSTCWIDYKKAYDSVPHTWLMRVLELYKVDATLRTFLMSCMWQWRTALHYPGCRQIRESSEPIRIERGIFQGDSLSPLWFCLALNPLSTLLEGSGLGYRLRRGGHVISHLLYMDDLKLFASNNLQLMELLKVTETFSSAIRMEFGLDKCAVMHVKRGEIMESVGTQLSDSIYIRSLCSTETYKYLGMSEALGINAADMKQSLRERFFGRLNKVLNSLLSGGNKVRAFNGWVMPVLMYSFGIHKWTQTELDALDRRVRSLLTANRMHHPRSSVMRLYIPRKCGGRGFLNAKTLHNREIYSLREYFLKTDVGMHRDVVAVDKGLTPLSLVNENWRKPTVMDTNERRAVWQGKELHGRFYRALHGPDVDLLASVSWLRFGDLFGETEGFVFAIMDEVMMTNNYRKYIVKDGTVDICRACHRPGESIRHIISGCSHLANGDYLHRHNLVARIIHQQLALKYNLVESEVPYYRYVPDPVLENGGVTLYWDRSIITDRTIVANKPDIVVIDRLERRTMIVDIAVPHDENLVKAEKDKQTKYLDLAREVVDMWEVDRAIIVPIVVTANGLIAKSLEQHLRRLSLGSWIKGLIQKAVLLDTARIVRRFLSQEP

SEQ ID NO: 10218 - protein, 1159 aa, Mythimna impura
MSSSSDEYFSPPTSPPPARRRRGRRPPSGLGPRGPPASDRVPAPGGSVQRMRWTQSINENVMRAYYGATEGGNNLTAYRVRMLSLFQVLEPAVNVSAQRLSDQVRVIQRNHMLDDTVLDRLRTEMSNHAIAPSSQPVVPVMVPPSYHLSDHADEEITDMVTHVSTQCNNELRSALECAIREYRNMPLELRPRLPRLPMHNKNKALVAALDLQLSNYFDDCEDLTDAHSIMYCAAVAACRVAHVKFPSCDVSTRPKPAVPAWQCRIERRIGGARALIGKLICFREGNTRPRVMRFVRRAFSGTDISPRDYMSRVTERIDFLKQKVYAWANRIRRYKRRVERYTQNRTFRSNERWVYRAWERPDQGVTDTRLPDDDAMSSFWRSIWSVPVSHTEGDWTREVERACDPIPQMGAIDISPQDVARAVRPLPNWKSPGPDGLHNFWIKWFTRSHARLAYQFQSALESGSLPQFLTTGITHLLHKSGSTAEPKNYRPITCLPTVYKVLTSILRSKINSHIDKNLIMSPSQNGCRNGSRGTKELLLIDMTISQQVRRFRKDLSTCWIDYKKAYDSVPHTWLMRVLELYKIDTTLRTFLMSCMRQWSTVLRYPGCRHIQRNSEPVRIERGIFQGDSLSPLWFCLALNPLSTLLENSGLGYRLKRGGQVISHLLYMDDLKLFAPNNLQLMELLKVTETFSSAIRMEFGVDKCAVMHVKRGEVVESVGTQLTDSINLRSLSPTETYKYLGMSEALGINITDMKQSLKERFFGRLKKVFNSLLSGGNKVRAFNGWVMPVLMYSFGVLKWTQTELDALDRRVRTLLTAYRMHHPRSSVMRLYIPRKCGGRGFLNAKTLHNREVCSLREYVLATDVGMHRDVVTVDKGLTPLSLANENWRKPVVLDTNDRREVWQSKELHGRFFRAFHGPDVDQLASVAWLRFGDLFGETEGFVCAIMDEVIMTNNYRRFIVKDGTVDICRACHRPGESIRHIISGCSRLANGEYLHRHNLVARIVHQQLALKYSLVESEVPYYRYEPDPVLDNGHITLYWDRSIITDRTIVANKPDIVVVDRSERRAMIVDISVPHDENLVKAEKDKQIKYIDLAREVVDMWDVDSAIIVPIVVSANGLIAKSLDQHLRRLALGGWIKALIQKAVLLDTARIVRRFLSLEP

SEQ ID NO: 10219 - protein, 1200 aa, Mythimna impura
MLTRSRAREQETHPTSSGSSLSSASQPPGPAPAVSPVIPAAAVASSSSDEYFSPPTTPPPARRRGRGRPPASLRPRGPPASDRVPAAGGSVQRMRWTQSINENVMRSYFGATEGGSNLTAYRGRMLSLFQVLEPTVNVSAQRLSDQVRVIQRNRMLDDAVLDRLRLESQRSRASSATPPAAVQLQPSALPRPDHVGDADDDAAISVSTQCNERLRSALEDAFREYRSTPPGLRPRLPRLPMHKRNRALVCALDSQLSNCFDSSKDLADTHSILYCAAAAACRVAHVKFPNCDRATRPAVPAWQRRIERRIGEARALIGKLICFREGNTRPRVMRFVRRAFLGTDISPQNYLPCVTERIDFLKQKVYAWASRIRRYKRRVERYTQNRTFQSNERWVYRTWERPDQDVTDTRLPDDDAMCSFWRRIWSVPVSHIEGDWIREVERTCDLLPEMGAITISPQDVARAVRPLPNWKSPGPDGLHNFWIKWFQGSHVRLASQFQSALESGSLPEFLTTGITHLLHKSGSTADPKNYRPITCLPTVYKVLTSILRAKINTHIETNSIISASQNGCRNGSRGTKELLLIDMAISQQVRRSRKDLSTCWIDYKKAYDSVPHTWLMRVLELYKVDTTLRTFLMSCMRQWRTVLHYPGCRQIRENSEPIRIERGIFQGDSLSPLWFCLALNPLSTLLEGSGLGYRLKRGGQVISHLLYMDDLKLFAPSNLHLMELLKVTEIFSNAIRMEFGVDKCAVMHVKRGEIMESVGTQLSDSIYLRSLCSTETYKYLGMSEALGINAADVKQSLKERFFGRLNRVLKSLLSGGNKVRAFNGWVMPVLMYSFGILKWTQTELDALDRRVRTLLTANRMHHPRSSVMRLYIPRKCGGRGFLNAKTLHNREVCSLREYFLETDVGMHRDVVAVDKGLTPLSLANGNWRKPIILDTNDRREVWQSKELHGRFYRALHGPDVDLIASVSWLRFGDLFGETEGFVCAIMDEVVMTNNYRKYIVKDGTADICRACHRPGESIRHIISGCSHLANGDYLHRHNLVAKIIHQQLALKYNLVESEVPYYKYVPDPVLDNGSITLYWDRSIITDRTIVANKPDIVVIDRLERRTVIVDIAVPHDDNLVKAEKDKQTKYLDLAREVVDMWEVDTAVIVPIVVTANGLISKSLDQHLRRLSLGSWIKGLIQKAVLLDTARIVRRFLSQEP

SEQ ID NO: 10220 - protein, 1048 aa, Mythimna impura
MLDDTVLDRLRTEMGSHAIASSSQTAVPSQVSPSNHLPNHADEESTDMVTHVSTQCSNELRSALECAIREYRNMPLELRPRLPRLPMCNKNKALVAALDSQLSNYFDDCEDLTDTHSIMYCAAVAACRVAHVKFPNSDVATRPKPAVPAWQCRIERRIGGARALIGKLICFREGNTRPRVMRFVRRAFSGTDISPRDYMSCVTERIDFLKQKVYAWANRIRRYKRRVERYTQNRTFRSNERWVYRAWEQPDQSVTDTRLLDDDAMSSFWRNIWSVPVSHTEGGWTREVERACEPIPEMGAITISPQDVARAVRPLPNWKSPGPDGLHNFWIKWLQRSHARLASQYQTALESGSLPEFLTTGVTHLLHKSGSTAEPKNYRPITCLPTVYKVLTSILRAKINHHVDNNAIMSASQNGCRNGSRGTKELLLIDMAISQQVRRSQKDLSTCWIDYKKAYDSVPHTWLMRVLELYKIDTTLRTFLMSCMRQWRTVLRYPGCRHIQRNSEPVRIERGIFQGDSLSPLWFCLALNPLSTLLENSGLGYRLKRGGQVISHLLYMDDLKLFASNNLQLMELLKVTETFSSAIRMEFGVDKCAVMHVKRGEIVESVGTQLSDSINLRSLSPTETYKYLGMSEALGINATDMKQTLRERFFGRLKKVFNSLLSGGKKVRAFNGWVMPVLMYSFGVLKWTQTELDALDRRVRTLLTAYRMHHPRSSVMRLYIPRKCGGRGFLNAKTLHNREVCSLREYFLAADVGMHRDVVAVDKGLTPLSLANESWRKPVVLDTNDRREVWQSKELHGRFFRALHGSDVDQLASVAWLRVGDLFGETEGFVCAIMDEVIMTNNYRRFIVKDGTVDICRACHRPGESIRHIISGCSRLANGEYLHRHNLVARIIHQQLALKYSLVESEVPYYRYMPDPVLDNGDITLYWDRSIITDRTIVANKPDIVVVDRRERRTMIVDISVPHDENLVKAEKDKQIKYIDLAREVVDMWDVDSAIIVPIVVSANGLIAKSLDQHLRRLALGGWIKGLIQKAVLLDTARIVRRFLSLEP

SEQ ID NO: 10221 - protein, 1004 aa, Mythimna impura
MLDVTVLDRLRTEMGSHAIASSSQTVVPSQVSPPNNLSNHADEESTDMVTHVSTQCSNELRSALECAIREYRNMTLELRPRLPRLPMCNKNKALVAALDSQLSNYFNDCEDLTDTHSIMYCAAVAACRVAHVKFPNSDVATRPKPAVPAWQCRIERRIGGARALIGKLICFREGNTRPRVMRFVRRAFSGTDISPRDYMSCVTERIDFLKQKVYAWANRIRRYKRRVERYTQNRTFRSNERWVYRAWEQPDQGVADTRLPDDDAMSSFWRNIWSVPVSHTEGGWTREVERACEPIPEMGAITISPQDVARAVRPLPNWKPPGPDGLHNFWIKWLQRSHARLASQYQTALESGSLPEFLTTGVTHLLHKSGSTAEPKNYRPITCLPTVYKVLTSILRAKINHHVDNNAIMSASQNGCRNGSRGTKELLLIDMAISQQVRRSRKDLSTCWIDYKKAYDSVPHTWLMRVLELYKIDATLRTFLMSCMRQWRTVLRYPGCRHIQRNSEPVRIERGIFQGDSLSPLWFCLALNPLSTLLENSGLGYRLKRGGQVISHLLYMNDLKLFAPNNLQLMELLKVTETFSSAIRMEFGVDKCAVMHVKRGEIVESVGTQLSDSINLRSLSPTETYKYLGMSEALGINATDMKQTLRERFFGRLKKVFNSLLSGGNKVRAFNGWVMPVLMYSFGVLKWTQTELDALDRRVRTLLTAYRMHHPRSSFMRLYIPRKCGGRGFLNAKTLHNREVCSLREYFLTADVGMHRDVVAVDKGLTPLSLANESWRKPVVLDTNDRREVWQSKELHGRFFRALHGPDVDQLASVAWLRVGDLFGETEGFVCAIMDEVIMTNNYRRFIVKDGTVDICRACHRPGESIRHIISGCSRLANGEYLHRHNLVARIIHQQLALNYSLVESEVPYYRYMPDPVLDNGDIMLHWDRSIITDRTIVANKSDIVVVDRRERRTMIVDISVPHDENLVKAEKDKQIKYIDLAREVVHKWDVDSAIIVPIVGGSR

SEQ ID NO: 10222 - protein, 1200 aa, Mythimna impura
MLTRAAARRARPPPPASSLSSASPPPEPCLTANAVTPAVAAASSSSDEYYSPPTTPPPTRRRGERRPPACLGSRGPPASDRVPATGGCVSRMRWTQSINENVMRAYYGATEGGNNLTAYRVRMLSLFQVLEPAVNVSAQRLSDQVRVIQRNHMLDDTVLDRLRTEMGSHAIASSSQTVVPSQVSPPNHLPNHADEESTDMVTHVSTQCSNELRSALECAIREYRNMPLELRPRLPRLPMCNKNKALVAALDSQLSNYFDDCEDLTDTHSIMYCAAVAACRVAHVKFPNSDVATRPKPAVPAWQCRIERRIGGARALIGKLICFREGNTRPRVMRFVRRAFSGTDISPQDYMSCVTERIDFLKQKVYAWANRIRRYKRRVERYTQNRTFRSNERWVYRAWEQPDQGVADMRLPDDDAMSSFWRSIWSVPVSHTEGGWTREVERACEPIPEMGAITISPQDVARAVRPLPNWKSPGPDGLHNFWIKWLQRSHARLASQYQTALESGSLPEFLTTGVTHLLHKSGSTSEPKNYRPITCLPTVYKVLTSILRAKINHHVDNNAIMSASQNGCRNGSRGTKELLLIDMAISQQVRRSRKDLSTCWIDYKKAYDSVPHTWLMRVLELYKIDATLRTFLMSCMRQWRTVLRYPGCRHIQRNSEPVRIERGIFQGDSLSPLWFCLALNPLSTLLENSGLGYRLKRGGQVISHLLYMDDLKLFAPNNLQLMELLKVTETFSSAIRMEFGVDKCAVMHVKRGEIVESVGTQLSDSINLRSISPTETYKYLGMSEALGINATDMKQTLRERFFGRLKKVLNSLLSGGNKVRAFNGWVMPVLMYSFGVLKWTQTELDALDRRVRTLLTAYRMHHPRSSVMRLYIPRKCGGRGFLNAKTLHNREVCSLREYFLTADVGMHRDVVAVDKGLTPLSLANESWRKPVVLDTNDRREVWQSKELHGRFFRALHGPDVDQLASVAWLRVGDLFGETEGFVCAIMDEVIMTNNYRRFIVKDGTVDICRACHRPGESIRHIISGCSRLANGEYLHRHNLVARIIHQQLALNYSLVESEVPYYRYVPDPVLDNGDITLYWDRSIITDRTIVANKPDIVVVDRRERRTMIVDISVPHDENLVKAEKDKQIKYIDLAREVVDMWDVDSAIIVPIVVSANGLIAKSLDQHLRRLALGGWIKGLIQKAVLLDTARIVRRFLSLEP

SEQ ID NO: 10223 - protein, 1200 aa, Mythimna impura
MLTRAAARRARLPPPASSLSSASPPPEPSPTVSAVTPAVAVASSSSDEYFSPPTSPPPARRRRGRRPPSGLGPRGPPASDRVPAPGGSVQRMRWTQSINENVMRAYYGATEGGNNLTAYRVRMLSLFQVLEPAVNVSAQRLSDQVRVIQRNHMLDDTVLDRLRTEMSNHAIAPSSQSVVPVMVPPSYHLAGHVDEEITDMVTHVSTQCNNELRSALECAIREYRNMPLELRPRLPRLPMHNKNKALVAALDLQLSNYFDDCKDLTDTHSIMYCAAVAACRLAHVKFPNCDVATRPKPAVPAWQCRIERRIGGARALIGKLICFREGNTRPRVMRFVRRTFSGTDISPRDYMSRVTERIDFLKQKVYAWANRIRRYKRRVDRYTQNRTFRSNERWVYRAWERPDQGVTDACLPDDDAMSSFWRSIWSVPVSHTEGDWTREVERACDPIPQMGAIDISPQDVARAVRPLPNWKSPGPDGLHNFWIKWFTRSHARLAYQFQSALESGSLPQFLTTGITHLLHKSGSTAEPKNYRPITCLPTVYKVLASILRSKINSHIDKNLIMSPSQNGCRNGSRGTKELLLIDMTISQQVRRSRKDLSTCWIDYKKAYDSVPHTWLMRVLELYKIDTTLRTFLMSCMRQWSTVLRYPGCRHTQRNSEPVRIERGIFQGDSLSPLWFCLALNPLSTLLENSGLGYRLKRGGQVISHLLYMDDLKLFAPNNLQLMELLKVTETFSSAIRMEFGVDKCAVMHVKRGEVVESVGTQLTDFINLRSLSPTETYKYLGMSEALGINITDMKQSLKERFFGRLKKVFNSLLSGGNKVRAFNGWVMPVLMYSFGVLKWTQTELDALDRKVRTLLTAYQMHHPRSSVMRLYIPRKCGGRGFLNAKTLHNREVCSLREYFLAADVGMHRDVVTVDKGLTPLSLANENWRKPVVLDTNDRREVWQSKELHGRFFRALHGPDVDQLASVAWLRSGDLFGVTEGFVCAIMDEVIMTNNYRRFIVKDGTVDICRACHRPGESIRHIISGCSRLANGEYLHRHNLVARIIHQQLALKYSLVESEVPYYRYEPDPVLDNGHITLYWDRSIITDRTIVANKPDIVVVDRSERRAMIVDISVPHDENLVKAEKDKQIKYIDLAREVVDMWDVDSAIIVPIVVSGNGLIAKSLDQHLRRLALGDWIKGLIQKAVLLDTARIVRRFLSLEP

SEQ ID NO: 10224 - protein, 1078 aa, Phlogophora meticulosa
MLSLFQVLEPAVNVSAQRLSDQVRVIQRNHMLDDTVLDRLRLNSRSNRVMPASSLVAVQLPSLPIVSPRPEYVGEEDDDAAISVSSQCNVRLRSALEDAFREYRSTPPELGQRLPRLPMHKKNKALMCALDSLLSNSFDNSKDLADTHSILYCAAAAACRVANVKFPNSKKATRPAVPAWQCRIERRIGEARVLIGKLICFREGNTRPRVMRFVRRAFSGTDISSRDYLSRVTERIDFLKQKICAWANRIRRYKRRVERYTQNRTFRSDERWVYRAWERPDQGVIDTCLPDDKAMYSFWRSIWSVPVRHTEGDWTREVERACEPLPVMGTINISPQDVACAVRPVPNWKSPGPDGLHNFWIKWLKSSHARLATQFQSALESGSLPQFLTTGITHLLHKSGSTAEPKNYRPITCLPTVYKVLTSILRSKINNHIETSSIMSVSQNGCKNGSRGTKELLLIDMTISQQVRRSRKDLSTCWIDYKKAYDSVPHTWLMRVLELYKIDATLRTFLTSCMRQWRTVLHYPGCRQFRENSEPIRIERGIFQGDSFSPLWFCLALNPLSTLLEGSGLGYRLRRGTQVISHLLYMDDLKLFAPNNLQLMELLKVTETFSSAIRMDFGVDKCAVMHVKRGGIVESAGTQLSDSIYLRSLSSTETYKYLGMSEALGINAADMKQSLKERFFCRLNKVLNSLLSGGNKVRAFNGWVMPVLMYSFGILKWTQTELDALDRRVRTLLTANRMHHPRSSVMRLYISRKCGGRGFLNAKTLHNREVCSLREYFLEADVGMHRDVVAVDKGLTPLSLANENWRKPIVLDTTDRMEIWKSKELHGRFYRVLHGSDVDLLASISWLRFGDLFGETEGFVCAIMDEVIMTNNYRKYIVKDGTVDICRACHRPGESIRHIISGCSRLANGEYLHRHNLVARIIHQQLALKYNLVELEVPYYKYVPDPVLENGNITLYWDRSIITDRTIVANKPDIVVIDRSERRTMIVDITVPHDENLVKAEKEKQMKYLDLAREVVDMWDVNTAVIVPIVVTANGIIAKSLDQHLRRLSLGSWIKGLIQKAVLLETARIVRRFLSQEP

SEQ ID NO: 10225 - protein, 1198 aa, Phlogophora meticulosa
MLTRSAARRARPPPPASSLSSASSPPKPSTIVSTVKPAVPVASSSSDEYFSPPTSPPPARRRRGRRPPDGLGPRGPPASDRVPAPGGSVQRMRWTQSINENVMRSYYGATEGGSNLTAYRVRMLSLFQVLEPAVNVSAQRLSDQVRVIQRNHMLDDVVLDRLRTEMQSSRVITSPSHTVVPPQYNIVLSSFADGEGSDKVTNVSTQYNEELRSALEGAIREYRFMLPALRPRLPRLPMHNKNRALVAALDSQLSNYFDNCDDLTDAHSILYCAAVAACRVAHVKFPYDIATRPKPAVPAWQCRIERRIAGARALIGKLVCYREGNTRPRVMRYVRRAFLGTDISPRDYMSRVTERIDFLKQKVYAWASRIRRYKRRVERYTQNRTFQSNERWVYRAWERPVQGVTDTHLPDDDVMCSFWRNIWSVPVSHTEGDWTREVERACDPIPQMGAITISPQDVARAVRPLPNWKSPGPDGLHNFWIKWLQKSHARLASQFQSALETGSLPQFLTTGITHLLHKSGSTAEPKNYRPITCLPTVYKVLTSILRVKINNHIDSNSIMSASQNGCRNGSRGTKELLLIDTAISQQVRRSRKDLSTCWIDYKKAYDSVPHTWLKRVLELYKVDATLRTFLTSCMGQWRTVLRYPGCRQIQRNSEPIRIERGIFQGDSLSPLWFCIALNPLSTLLADSGLGYRLKRGGQVVSHLLYMDDLKLFAPSDLQLMELLTVTKTFSSAIRMEFGVDKCAVMHVKRGKIVESVGTQLPDFINFRALSPIETYKYLGMSEALGINAADMKQSLKERFFGRLKKVCNSLLSGGNKVRAFNGWVMPVLMYSFGILKWTQTELDALDRRVRTFLTASRMHHPRSSVMRLYIPRKCGGRGFLNAKTLHNREICSLRDYFLETDVGMHRDVVAVDQGLTPLSLAKENWRKPVVLDTNDRKEVWQSKELHGRFFQALHGPDVDQLASVSWLRFGDLFGETEGFVCAIMDEVIMTNNYRRFIVKDGTVDICRACHRPGESIRHIISGCSRLANEEYLHRHNLVARIIHQQLALKYSLVESEVPYYKYVPDPVLENGSVTLYWDRSIITDRTIVANKPDIVVMDRIERRATIIDVTVPHDGNLVKAEKDKQIKYLDLAREVVDMWDVDSAIVVPIVVSANGLIAKSLDQHLRRLALGSWIKGLIQKAVLLDTARIVRRFLSLEP

SEQ ID NO: 10226 - protein, 1198 aa, Phlogophora meticulosa
MLTRSAARRARPPPPASSLSSASSPPKPSTIVSTVKPAVPVASSSSDEYFSPPTSPPPARRRRGRRPPDGLGPRGPPASDRVPAPGGSVQRMRWTQSINENVMRSYYGATEGGSNLTAYRVRMLSLFQVLEPAVNVSAQRLSDQVRVIQRNHMLDDVVLDRLRTEMQSSRVITSPSHTVVPPQYNIVLSSFADGEGSDKVTNVSTQYNEELRSALEGAIREYRFMLPALRPRLPRLPMHNKNRALVAALDSQLSNYFDNCDDLTDAHSILYCAAVAACRVAHVKFPYDIATRPKPAVPAWQCRIERRIAGARALIGKLVCYREGNTRPRVMRYVRRAFLGTDISPRDYMSRVTERIDFLKQKVYAWASRIRRYKRRVERYTQNRTFQSNERWVYRAWERPVQGVTDTHLPDDDVMCSFWRNIWSVPVSHTEGDWTREVERACDPIPQMGAITISPQDVARAVRPLPNWKSPGPDGLHNFWIKWLQKSHARLASQFQSALETGSLPQFLTTGITHLLHKSGSTAEPKNYRPITCLPTVYKVLTSILRVKINNHIDSNSIMSASQNGCRNGSRGTKELLLIDTAISQQVRRSRKDLSTCWIDYKKAYDSVPHTWLKRVLELYKVDATLRTFLTSCMGQWRTVLRYPGCRQIQRNSEPIRIERGIFQGDSLSPLWFCLALNPLSTLLEDSGLGYRLKRGGQVVSHLLYMDDLKLFAPSDLQLMELLTVTKTFSSAIRMEFGVDKCAVMHVKRGKIVESVGTQLPDFINFRALSPIETYKYLGMSEALGINAADMKQSLKERFFGRLKKVCNSLLSGGNKVRAFNGWVMPVLMYSFGILKWTQTELDALDRRVRTFLTASRMHHPRSSVMRLYIPRKCGGRGFLNAKTLHNREICSLRDYLLETDVGMHRDVVAVDQGLTPLSLAKENWRKPVVLDTNDRKEVWQSKELHGRFFQALHGPDVDQLASVSWLRFGDLFGETEGFVCAIMDEVIMTNNYRRFIVKDGTVDICRACHRPGESIRHIISGCSRLANEEYLHRHNLVARIIHQQLALKYSLVESEVPYYKYVPDPVLENGSVTLYWDRSIITDRTIVANKPDIVVMDRIERRATIIDVTVPHDGNLVKAEKDKQIKYLDLAREVVDMWDVDSAIVVPIVVSANGLIAKSLDQHLRRLALGSWIKGLIQKAVLLDTARIVRRFLSLEP

SEQ ID NO: 10227 - protein, 1198 aa, Phlogophora meticulosa
MLTRSAARRARPPPPASSLSSASSPPKPSTIVSTVKPAVPVASSSSDEYFSPPTSPPPARRRRGRRPPDGLGPRGPPASDRVPAPGGSVQRMRWTQSINENVMRSYYGATEGGSNLTAYRVRMLSLFQVLEPAVNVSAQRLSDQVRVIQRNHMLDDVVLDRLRTEMQSSRVITSPSHTVVPPQYNIVLSSFADGEGSDKVTNVSTQYNEELRSALEGAIREYRFMLPALRPRLPRLPMHNKNRALVAALDSQLSNYFDNCDDLTDAHSILYCAAVAACRVAHVKFPNDIATRPKPAVPAWQCRIERRIAGARALIGKLVCYREGNTRPRVMRYVRRAFLGTDISPRDYMSRVTERIDFLKQKVYAWASRIRRYKRRVERYTQNRTFQSNERWVYRAWERPVQGVTDTHLPDDDVMCSFWRNIWSVPVSHTEGDWTREVERACDPIPQMGAITISPQDVARAVRPLPNWKSPGPDGLHNFWIKWLQKSHARLASQFQSALETGSLPQFLTTGITHLLYKSGSTAEPKNYRPITCLPTVYKVLTSILRVKINNHIDSNSIMSASQNGCRNGSRGTKELLLIDTAISQQVRRSRKDLSTCWIDYKKAYDSVPHTWLKRVLELYKVDATLRTFLTSCMGQWRTVLRYPGCRQIQRNSEPIRIERGIFQGDSLSPLWFCLALNPLSTLLEDSGLGYRLKRGGQVVSHLLYMDDLKLFAPSDLQLMELLTVTKTFSSAIRMEFGVDKCAVMHVKRGKIVESVGTQLPDFINFRALSPIETYKYLGMSEALGINAADMKQSLKERFFGRLKKVCNSLLSGGNKVRAFNGWVMPVLMYSYGILKWTQTELDALDRRVRTFLTASRMHHPRSSVMRLYIPRKCGGRGFLNAKTLHNREICSLRDYFLETDVGMHRDVVAVDQGLTPLSLAKENWRKPVVLDTNDRKEVWQSKELHGRFFQALHGPDVDQLASVSWLRFGDLFGETEGFVCAIMDEVIMTNNYRRFIVKDGTVDICRACHRPGESIRHIISGCSRLANEEYLHRHNLVARIIHQQLALKYSLVESEVPYYKYVPDPVLENGSVTLYWDRSIITDRTIVANKPDIVVMDRIERRATIIDVTVPHDGNLVKAEKDKQIKYLDLAREVVDMWDVDSAIVVPIVVSVNGLIAKSLDQHLRRLALGSWIKGLIQKAVLLDTARIVRRFLSLEP

SEQ ID NO: 10228 - protein, 1199 aa, Laspeyria flexula
MITRSQTRNAPTTSPDSSLSTASQPSDPVPTTPLTAEAGSSSSSDEYFSPPSSPTPVPRRGRGRPPASLGPRGPPAVNRAPAAGGNVQRMRWSTSVNENVMRAYFAATEGGINLTAYRSRMLALFQDLEPTTSVTAQRLSDQVRAIQRCRMLDDTVLDRLRLECLQNNPTVPLQVNNLNNIISNAITIQADHNLEEVDGISSVDTQCNNEVRVALERALREYRFTSLQCRPRLPRLPMHKKNLALVITLDSLLSDYLDNSENLGDTHSILYCAAVAACRLAGVKFLGIEPPFHEWPSTPAWQCRIERRIAGARILIGKLISFRTGNTRPRVMRFVNQAFSGTDVSPNEYLSRVTERIDFLKQKVYAWANRICRFKKRVDRYTVNRLFQRDQRWVYRNWERPTQEVSDARLPDATATNEFWSSIWSEPVLHSEGTWIWDVERACERIPHMESVVISAEDIASAVRPMANWKSPGPDGLHNFWLRWLRSSHSRLASQFQSALESGSLPEFLTTGCTHLLHKSGSVTEPGNYRPITCLPSVYKLLTSVLRAKITKHIDDNRTMSISQNGCRRGSRGTKELLLVDMTISQQVRRSRKDLATCWIDYKKAFDSVPHSWLLRVLELYKVDITLRTFLESCMRQWRTVLTYPGCRLIRGNGEPVRIKRGIFQGDSLSPLWFCLALNPLSTLLESSGLGYRLRRGGHVISHLLYMDDLKLIAPTDLQLKDLLKVTEDFSKSIKMDFGVDKCAIMHVKRGEIVESEGIQLSDSINFRSLLVTDTYKYLGMSQALGIKEMDMKQSLQERFFGRLKKVLNSLLSGGNKVRACNGWVMPLLMYSFGILKWTQTELDALDRRVRTMLTAYRMHHPRSSVMRLYIPRKCGGRGFLNTKTLHNREVYNLREYFMGKVEGMHRDVVAVDSGLTPLSLAKDNWRRPIVLSTDDRRQVWQSKELHGRFYKALHGPDVDRVASVAWLRFGDLFGETEGFVCAIADEVIKTNNYRKYILRDGTVDICRACHRPGESLRHIVSGCSRLANGEYLHRHNQVARIIHQQLALRYKLVDVEVPYYRYAPEPVLENSHATLYWDRSIITDRTVIANKPDIVILDRSKRLAVVVDITVPHDENLVKAEKDKQTKYLDLAHEIVDMWDVNSAIIVPIVVTVNGLVAKSLDQHLKRLELGSWIKGLMQKAVLLDTARIVRRFLSLEP

SEQ ID NO: 10229 - protein, 1198 aa, Xestia xanthographa
MLTRSAAARRARLPPPDSSLSSASPPPEPSPIVSAVTPAVAVASSSSDEYFSPPTTPPPARRRGGRRPPDGLGPRGPPASDRVPAPGGSVQRMRWTQSINANVMRAYYGATEGGNNLTAYRVRMLSLFQVLEPAVNVSAQRLSDQVRVIQRNRMLDDTVLDRLRTEIQSNHVIATPSQAVVPPQSSIIPNCDNDVSNDMVTNVSTQCNVEMRSALEGAIREYRFMQPDLRPRIPRLPMHNKNRALVAVLDSQLSNYFDNCEDLTDVHSILYCAAVATCRVAHVKFPSDRATRPKPAVPAWQYRIERRIGGARALIGKLVCFREGNTRPRVMRFVRQAFSGTDISPRDYMSRVTERIDFLKQKVYAWANRIRRYKRRVDRYTQNRTFQKDERWVYRAWERPDQGVADTRLPDDDAMCSFWRSIWSVPVSHAEGEWTRVIERACDPISEMGAITISPQDVARAVRPLPNWKSPGPDGLHNFWIKWFTRSHARLATLFQSALESGSLPEFLTTGITHLLHKSGSTAEPKNYRPITCLPTVYKVLTSILRTKISKHIDDNSVMSASQNGCRNGSRGTKELLLIDMAISHQVRRSRKDLSTCWIDYKKAYDSVPHTWLMRVLQLYKVDATLRTFLMSCMGQWRTVLHYPGCRQIQRNSEPIRIERGIFQGDSLSPLWFCLALNPLSTLLEDSGLGYRLRKDGQVISHLLYMDDLKLFAPNDLRLMELLKVTETFSNAIRMEFGVDKCAVMHVKRGEIVESVGTQLSDSITLRSLSATETYKYLGMSEALGVNVADMKQSLKERFFGRLKKVLNSLLSGGNKVRAFNGWVMPVLMYSFGILKWTQTELDALDTKVRKLLTAYRMHHPRSSVMRLYIPRKCGGRGFLNAKTLHNREICSLREYFLGTDVGMHRDVVTMDKGLTPLSLAKENWRKPPVLDTNDRREVWQSKELHGRFFRALHGPDVDLSASVAWLRSGDLFGETEGFVCAIMDEVMMTNNYRRFIVKDGTVDICRACHRPGESIRHIISGCSRLANGEYLHRHNLVARIIHQQLALKYNLVESEVPYYRYVPDPVLDNGCITLYWDQSIITDRTIVANKPDIVVVDRSERRAMIVDITVPHDENLVKAEKDKQIKYLDLAREVVDMWEVDSAIIVPIVVSAHGLIAKSLDQYLRRLSLGSWIKGLIQKAVLLDTARIVRRFLSLEP

SEQ ID NO: 10230 - protein, 1196 aa, Xestia xanthographa
MLTRSAAARRARLPPPDSSLSSASPPPESSPIVNAVTPAVAVASSSSDEYFSPPTTPPPARRRGGRRPPDGLGPRGPPASNRVPAPGGSVQRMRWTQSINENVMRAYYGATEGGNNLTAYRVRMLSLFQVLEPAVNVSAQRLSDQVRVIQRNRMLDDTVLDRLRTEIQSSHVIATPPPSQAVVPPIPNCDNDVSNDMVTNVSTQCNVEMRSALEGAIREYRFMQPDLRPRIPRLPMHNKNRALVAVLDSQLSNYFDNCEDLTDVHSILYCAAVAVCRVAHVKFPSDRATRLKPAVPAWQYRIERRIGGARALIGKLDCFREGNTRPRVMRFVRQAFSGTDISPRDYMSRVTERIDFLKQKVYAWANRIRRYKRRVDRYTQNRTFQKDERWVYRAWERPDQGVADTHLPDDDAICSFWRSIWSVPVSHAEGEWTRVIERACDPVSDMGAITISPQDVARAVRPLPNWKSPGPDGLHNFWIKWFTRSHARLATLFQSALESGSLPEFLTTGITHLLHKSGSTAEPQNYRPITCLPTVYKVLTSILRTKISKHIDDNFVMSASQNGCRNGSRGTKELLLIDMAISHQVRRFQKDLSTCWIDYKKAYDSVPHTWLMRVLELYKVDATLRTFLMSCMGQWRTVLRYPGCRQIQRNSEPIRIERGIFQGDSLSPLWFCLALNPLSTLLEDSGLGYRLRKDGQVISHLLYMDDLKLFAPNDLRLMELLKVTETFSSAIRMEFGVDKCAVMHVKRGEIVESVGTQLSDSITLRSLSATETYKYLGMSEALGVNVADMKQSLKERFFGRLKKVLNSLLSGGNKVRAFNGWVMPVLMYSFGILKWTQTELDALDTKVRKLLTAYRMHHPRSSVMRLYIPRKCGGRGFLNAKTLHNREICSLREYFLGTDVGMHRDVVTMDKGLTPLSLAKENWRKPPVLDTNDRREVWQSKELHGRFFRALHGPDVDLSASVAWLRSGDLFGETEGFVCAIMDEVMMTNNYRRFIVKDGTVDICRACHRPGESIRHIISGCSRLANGEYLHRHNLVARIIHQQLALKYNLVESEVPYYRYVPDPVLDNGCITLYWDQSIITDRTIVANKPDIVVVDRSERRAMIVDITVPHDENLVKAEKDKQIKYLDLAREVVDMWEVDSAIIVPIVVSAHGLIAKSLDQYLRRLSLGSWIKGLIQKAVLLDTARIVRRFLSLEP

SEQ ID NO: 10231 - protein, 1204 aa, Cosmia trapezina
MMQTRAKTRIQAHPPSPDSSLSSASQPVRASTVSAVSPVAAVASSSSDEFFSPPSSPTPPRRRGRGRPPAGLGPRGQPAPNRVPAAGGNVSRMRWTQSINENVMRAYYGATEGGINLTAYRGRMLSLFQVLEPAVNVSAQRLSDQVRVIQHNHRLDNATLDRLRSEMQSSSASNPPPSQNVMHVPAEIPLRANQRDEEENARAISADNLCNVEIRSALEDAIREYRFTSPDLRPRLPRLPMNKKNRALVCALDALLPNFIESSADLCDTHSILYCTAVAACRVACVKFPNTDRATRPKPAAPAWQCRIERRINEARVLIGKLICFREGNTRPRVMRFVRRAFSGTNVSPQEYVSRVTERIDFLKQKVYAWANRIRRYRRRVDRYSQNRMFQSDERWVYRAWERPIPTQGVTDVRPPDNETMSAFWRSIWSVPVSHTEGDWMRIVEQACDSIPNMDAVTISPLDVACAVRPLPNWKSPGPDGLHNFWIKWLQRSHACLASQFQSSLETGSLPLLFTTGVTHLLHKSGSTAEPKNYRPITCLPTVYKVLTSILRAKIAHHIYNNSIMSVSQNGCRNGSRGTKELLLIDMTISQQVRRSRKDLSTCWIDYKKAYDSVPHTWLIRVLELYKIDATLRTFLMSCMGQWKTVLLYPGCRRIPGIDEPIRIERGIFQGDSLSPLWFCLALNPLSTLLEDSGLGYRLRRGGQVISHLLYMDDLKLFAPNNLRLMELLKVTENFSSAIRMEFGVDKCAVMHVMRGEIMESVGTQLSDSIHLRSLSSTETYKYLGMSEALGINVADMKQSLKERFFGRLKKVFNSLLSGGNKVRAFNGWVMPVLMYSFGVLKWTQTELDALDRRVRTLLTAYRMHHPRSSVMRLYIPRKCGGRGFLNAKTLHNREICSLREYFLEADVGMHRDVVAVDKGLTPLSLAKENWRKPAVLDTNDRREVWQGKELHGRFFRALHGPDVDFLASVSWLRFGDLFGETEGFVCAIMDEVIMTNNYRKYIVKDGTVDICRACHHPGESIRHIVSGCSRLANGEYLHRHNLVARIIHQQLALQYNLVESEVPYYRYVPDPVLENGQATLYWDRSIITDRTIVANKPDIVVIDRRERRAIIVDIAVPHDENLVKAEKDKKIKYLDLAHEVVDMWDVDSAIIVPIIVTVNGLIAQSLDQHLRRLSLRGWIKGLIQKAVLLDTARIVRRFLSLEP

SEQ ID NO: 10232 - protein, 1205 aa, Cosmia trapezina
MLTRSRAQHLRNTHPTSSGSSLSSASQLPEPAPDVSQVIPAAAVASSSSDEYFSPLTTPPPVRRRGRGRPPASLGPRGPPASDRVPAPGGSVQRMRWTQTVNENVMRAYFGATEGGSNLTAYRGRMLSLFQVLEPAVNVSAQRLSDQVRVIQRNHMLDDVVLDRLRLESRNSRVTSDSPMVAVQLQNLPSASPRPDRVGEEDDSGAISVSSQCNVQLRSALEDAFREYRSTPPGLRPRLPRLPMHKKNKALVCALDSQLSNCFDGSKDLADTHSILYCAAVAACRVAHVKFHNNDRVTRPKPAVPTWQCRIERRIGEARALIGKLICFREGNTRPRVMRFVRRAFSGMDISPRDYLTCVTERIDFLKQKICAWANRIRRYRRRVERYTQNRTFQSDERWVYRAWERPDQGMADTQLPDDDAMCSFWRSIWSVPVSHTEGDWTREVERACDHIPQMGALTISPQDVARAVRPLPNWKSPGPDGLHNFWIKWFQRSHARLASQFQSALQSGSLPQFLTTGITHLLHKSGSTAEPRNYRPITCLPTVYKVLTSILRAKINKHIDTNSIMSASQNGCGNGSRGTKELLLIDMTISQQVRRSRKDLSTCWIDYKKAYDSVPHTWLMMVLELYKIDATLRTFLMSCMGQWRTVLRYPGCRNIQRNSEPIRIERGIFQGDSLSPLWFCLALNPLSTLLEDSGLGYRLRRGGQVISHLLYMDDLKLFAPNNLQLMELLKVTETFSSAIRMEFGVDKCAVMHVKRGEIVESVRTQLSDSIHLRSLSSLETYKYLGMSEALGINAADMKQSLRERFFGRLNKVLNSLLSGGNKVRAFNGWVMPVLMYSFGILKWTQTELDALDRRVRTLLTANRMHHPRSSVMRLYIPRKCGGRGFLNAKTLHNREVCSLREYFLEADVGMHREVVSVDKGLTPLSLANENWRKPIVLDTNDRREVWQSKELHGRFYRVLHGPDVDFLASVSWLRFGDLFGETEGFVFAIMDEVMMTNNYRKYIVKDGTVDICRACHRPGESIRHIISGCSRLANGDYLHRHNLVARIIHQQLALKYSLVESEVPYYRYVPDPVLENGNITLYWDRSIITDRTIVANKPDIVVIDRLERRTVIVDIAVPHDENLVEAEKDKQIKYLDLAREVVDMWDVDTAIIVPIVVTANGIIAKSLDQHLRRLSLGGWIKGLIQKAVLLDTARIVRRFLSQQP

SEQ ID NO: 10233 - protein, 1193 aa, Cosmia trapezina
MSNNNNNNNNSLSSASPPPLPSLTVSAVSTPATVVASSSSDEYFSPPTTPPPVRRRGGRRPPDGLGPRGPPASDRVPAPGGSVQRMRWTRAINENVMRSYYGATEGGNNLTAYRVRMHSLFQVLEPALNVSAQRLSDQVRVIQRNHMLDDTVLDRLRSEMQSSRVIAPLSQTIVAPPPPQCNTNQADEGSDDTAANVSTQCNEELRSALEGAIQEYRFVSPELRPRLPRLPMHNKNRALVAALDSQLSNYFDDCEDLTDTHSILYCAAVAACRVAHVKFANDSRATRPKPAVPAWQCRIERRIGGARALIGKLICFREGNTRPRVMRFVRRAFSGTDVSPQDYMSRVTERIDFLRQKVYAWANRIRRYKRRVDRYTQNRTFQSDERWVYRGWERPDQGVTDTRLPDDDAMCSFWRSIWSVPVGHTEGDWAREVERACDPIPEMGAITICPQDVARAVRPLPNWKSPGPDGLHNFWIKWFPGSHARLAAQYQSALQSGSLPQFLTTGITHLLHKSGSTAEPKNYRPITCLPTVYKVLTSILRAKINEHIDTNSIMSVSQNGSRNGSRGTKELLLIDMAISQQVRRSRKDLSTCWIDYKKAYDSVPHTWLMRVLELYKVDATLRTFLMSCMGQWRTVLRYPGCRNIQRNSEPIRIERGIFQGDSLSPLWFCLALNPLSTLLEDSGLGYRLRRGGQVISHLLYMDDLKLFAPNNLQLMELLKVTETFSSAIRMEFGVDKCAVMHVKRGEIVESVGTQLSDSINLRTLSAAETYKYLGMSEALGINVTDMKQSLKERFFGRLKKVFNSLLSGGNKVRAFNGWVMPVLMYSFGILKWTQTELDALDRRVRTLLTAYRMHHPRSSVMRLYIPRKCGGRGFLNAKTLHNREICSLREYFLEADVGMHRDVVAVDKGFTPLSLAKENWRKPVVLDTNDRMEVWQGKELHGRFFRALHGPDVDLLASVAWLRSGDLFGETEGFVCAIMDEVIMTNNYRRFIVKDGTVDICRACHRPGESIRHIISGCSRLANEEYLHRHNLVARIIHQQLALKYSLVESEVPYYRYVPDPVLENGNITLYWDRSIITDRTIVANKPDIVVVDRTERRAMVVDITVPHDGNLVKAEKDKQIKYLDLAREVVDMWDVDSAIIVPIVVSANGLIAKSLDQHLRRLSLGSWIKGLIQKAVLLDTARIVRRFLSLEP

SEQ ID NO: 10234 - protein, 1037 aa, Cosmia trapezina
MKLRCVTSVSPMVAVQLQNLPSASPRPDCVGEEDDSGAISVSSQCNVQLRSALEDAFREYRSAPPGLRPRLPRLPMHKKNKALVGALDSQLSNCFDGSKDLADTHSILYCAAVAACRVAHVKFPNSDRVPRPKPAVPAWQCRIERRIGEARALIGKLICFREGNTRPRVMRFVRRAFSGTDISPRDYFTCVTERIDFLKQKICAWANRIRRYRRRVERYTQNRTFQSDERWVYRAWERPDQGVADTQLPDDDAMCSFWRSIWSVPVSHTEGDWTREVERACDHIPQMGALTISPQDVARAVRPLPNWKSPGPDGLHNFWIKWFQRSHARLASQFQSALQSGSLPQFLTTGITHLLHKSGSTAEPRNYRPITCLPTVYKVLTSILRAKINKHIDTNSIMSASQNGCGNGSRGTKELLLIDMTINQQVRRSRKDLSTCWIDYKKAYDSVPHTWLMRVLELYKIDATLRTFLMSCMGQWRTVLRYPGCRNIQRNSEPIRIERGIFQGDSLSPLWFCLALNPLSTLLEDSGLGYRLRRGGQVISHLLYMDDLKLFAPKNLQLMELLKVKETFSSAIRMEFGVDKCAVMHVKRGEIVESVRTQLSDSIHLRSLSSLETYKYLGMSEALGINAADMKQSLRERFFDRLNKVLNSLLSGGNKVRAFNGWVMPVLMYSFGILKWTQTELDALDRRVRTLLTANRMHHPRSSVMRLYIPRKCGGRGFLNAKTLHNREVCSLREYFLEADVGMHRDVVSVDKGLTPLSLANENWRKPVVTATNDRREVWQSKELHGRFYRVLHGPDVDFLASVSWLRFGDLFGETEGFVFAIMDEVMMTNNYRKYIVKDGTVDICRACHRPGESIRHIISGCSRLANGDYLHRHNLVARIIHQQLALKYSLVESEVPYYRYVPDPVLENGNITLYWDRSIITDRTIVANKPDIVVIDRLERRTMIVDIAVPHDENLVKAEKDKQIKYLDLAREVVDMWDVDTAIIVPIVVTANGIIAKSLDQHLRRLSLGGWIKGLIQKAVLLDTARIVRRFLSQQP

SEQ ID NO: 10235 - protein, 1205 aa, Cosmia trapezina
MLTRSRAQQLRNTQPTSSGSSLSSASQLPEPAPDVSQVIPAAAVASSSSDEYFSPPTTPPPVRRRGRGRPPASLGPRGPSASDRVPAPGGSVQRMRWTQTVNENVMRAYFGATEGGSNLTAYRGRMLSLFQVLEPAVNVSAQRLSDQVRVIQRNHMLDDVVLDRLRLESRNSRVTSVSPMVAVQLQNLPSASPRPDCVGEEDDSGAISVSSQCNVQLRSALEDAFREYRSAPPGLRPRLPRLPMHKKNKALVGALDSQLSNCFDGSKDLADTHSILYCAAVAACRVAHVKFPNSDRVPRPKPAVPAWQCRIERRIGEARALIGKLICFREGNTRPRVMRFVRRAFSGTDISPRDYFACVTERIDFLKQKICAWANRIRRYRRRVERYTQNRTFQSDERWVYRAWERPDQGVADTQLPDDDAMCSFWRSIWSVPVSHTEGDWTREVERACDHIPQMGALTISPQDVARAVRPLPNWKSPGPDGLHNFWIKWFQRSHARLASQFQSALQSGSLPQFLTTGITHLLHKSGSTAEPRNYRPITCLPTVYKVLTSILRAKINKHIDTNSIMSASQNGCGNGSRGTKELLLIDMTINQQVRRSRKDLSTCWIDYKKAYDSVPHTWLMRVLELYKIDATLRTFLMSCMGQWRTVLRYPGCRNIQRNSEPIRIERGIFQGDSLSPLWFCLALNPLSTLLEDSGLGYRLRRGGQVISHLLYMDDLKLFAPNNLQLMELLKVTETFSSAIRMEFGVDKCAVMHVKRGEIVESVRTQLSDSIHLRSLSSLETYKYLGMSEALGINAADMKQSLRERFFGRLNKVLNSLLSGGNKVRAFNGWVMPVLMYSFGILKWTQTELDALDRRVRTLLTANRMHHPRSSVMRLYIPRKCGGRGFLNAKTLHNREVCSLREYFLEADVGMHRDVVSVDKGLTPLSLANENWRKPVVLDTNDRREVWQSKELHGRFYRVLHGPDVDFLASVSWLRFGDLFGETEGFVFAIMDEVMMTNNYRKYIVKDGTVDICRACHRPGESIRHIISGCSRLANGDYLHRHNLVARIIHQQLALKYSLVESEVPYYRYVPDPVLENGNITLYWDRSIITDRTIVANKPDIVVIDRLERRTMIVDIAVPHDENLVKAEKDKQIKYLDLAREVVDMWDVDTAVIVPIVVTANGIIAKSLDQHLRRLSLGGWIKGLIQRAVLLDTARIVRRFLSQQP

SEQ ID NO: 10236 - protein, 1205 aa, Cosmia trapezina
MKMLTRSATRRARLPPPDSSLSSASPPPVPSLTVNALSTPAAVVASSSSDEYFSPPTTPPPARRRGGRRPPDGLGPRGPPASDRVPAPGGSVQRMRWTRSINENVMRSYYGATEGGNNLTAYRVRMHSLFRVLEPALNVSAQRLSDQVRPVRVIQRNHMLDDTALDRLRSEMQSSSVIAPLSQTIVAPPPPQCNTIQADEGSDGTAANVSTQCNEELRSALEGAIQEYRFVSPELRPRLPRLPMHNKNRALVAALDSQLSNYFDDCEDLTDTHSILYCAAVAACRVAHVKFANDSRATRPKPAVPAWQCRIERRIGGARALIGKLICFREGNTRPRVMRFVRRAFSGTDVRPQDYMSRVTERIDFLKQKVYAWANRIRRYKRRVDRYTQNRTFQSDERWVYRGWERPDQGVADTRLPDDDAMCSFWRSIWSVPVSHTEGDWTREVERACDPIPEMGAITICPQDVARAVRPLPNWKSPGPDGLHNFWIKWFRGSHARLAAQYQSALQSGSLPQFLTTGITHLLHKSGSTAEPKNYRPITCLPTIYKVLTSILRAKINEHIDTNSIMSASQNGSRNGSRGTKELLLIDMAISQQVRRSRKDLSTCWIDYKKAYDSVPHTWLMRVLELYKVDATLRTFLMSCMEQWRTVLRYPGCRNIQRNSEPIRIERGIFQGDSLSPLWFCLALNPLSTLLEDSGLGYRLRRGGQVISHLLYMDDLKLFAPNNLQLMELLKVTETFSSAIRMEFGVDKCAVMHVKRGEIVESVGTQLSDSINLRTLSASETYKYLGMSEALGINVADMKQSLRERFFGRLKKVFNSLLSGGNKVRAFNGWVMPVLMYSFGILKWTQTELDALDRRVRTLLTAYRMHHPRSSVMRLYIPRKCGGRGILNAKTLHNREICSLREYFLEADVGMHRDVVAVDKGLTPLSLAKENWRKPVVLDTNDRMEVWQSKELHGRFFRALHGPDVDLLASVAWLRSGDLFGETEGFVCAIMDEVIMTNNYRRFIVKDGTVDICRACHRPGESIRHIISGCSRLANEEYLHRHNLVARIIHQQLALKYSLVESEVPYYRYVPDPVLENGNITLYWDRSIITDRTIVANKPDIVVVDRTERRAMVIDITVPHDGNLVKAEKDKQIKYLDLAREVVDMWDVDSAIIVPIVVSANGLIAKSLDQHLRRLSLGSWIKGLIQKAVLLDTARIVRRFLSLEP

SEQ ID NO: 10237 - protein, 1200 aa, Cosmia trapezina
MLTRSATRKARLPPPDSSLSSASPPPVPSLTVSAVSTPAAAVASSSSDEYFSPPTTPPPARRRGGRRPPDGLGPRGPPASDRVPAPGGSVQRMRWTRAINENVMRSYYGATEGGNNLTACRVRMHSLFQVLEPALNVSAQRLSDQVRVIQRNHMLDDTVLDRLRNEMQSSRVIAPLSQTIVAPPPPQCNTTQADEGSDGTAAHVSTQCNEELRSALEGAIQEYRFVSPELRPRLPRLPMHNKNRALVAALDSQLSNYFDDCEDLTDTHSILYCAAVAACRVAHVKFANDSRATRPKPAVPAWQCRIERRIGGARALIGKLICFREGNTRPRVMRFVKRAFSGTDVSPQDYMSRVTERIDFLRQKVYAWANRIRRYKRRVDRYTQNRTFQSDERWVYRGWERPDQGVTDTRLPDDDAMCSFWRSIWSVPVSHTEGDWAREVRRACDPIPEMGAITICPQDVARAVRPLPNWKSPGPDGLHNFWIKWFLGSHARLAAQYQSALQSGSLPQFLTTGITHLLHKSGSTTEPKNYRPITCLPTVYKVLTSILRAKINEHIDTNSIMSASQNGSRNGSRGTKELLLIDMAISQQVRRSRRDLSTCWIDYKKAYDSVPHTWLMRVLELYKVDATLRTFLMSCMGQWRTVLRYPGCRNIQRNSEPIRIERGIFQGDSLSPLWFCLALNPLSTLLENSGLGYRLRRGGQVISHLLYMDDLKLFAPSNLQLMELLKVTETFSSAIKMEFGVDKCAVMHVKRGEIVESVGTQLPDSINLRTLSAAETYKYLGMSEALGINVADMKQLLKERFFGRLKKVFNSLLSGGNKVRAFNGWVMPVLMYSFGILKWTQTELDALDRRVRTLLTAYRMHHPRSSVMRLYIPRKCGGRGFLNAKTLHNREICSLREYFLETDVGMHRDVVAVDKGLTPLSLAKENWRKPVVLDANDRMEVWQSKELHGRFFRALHGPDVNLLASVAWLRSGDLFGETEGFVCAIMDEVIMTNNYRRFIVKDGTVDICRACHRPGESIRHIISGCSRLANEEYLHRHNLVARIIHQQLALKYSLVESEVPYYRYVPDPVLENGHITLYWDRSIITDRTIVANKPDIVVVDRTERRAMIVDITVPHDGNLVKAEKDKQIKYIDLAREVVDMWDVDSAVIVPIVVSANGLIAKSLDQHLRRLSLGSWIKGLIQKAVLLDTARIVRRFLSLEP

SEQ ID NO: 10238 - protein, 1036 aa, Cosmia trapezina
MHSLFQVLEPALNVSAQRLSDQVRVIQRNHMLDDTVLDRLRSEMQSSRVIAPLSQTIVAPPPPQCNTSQADGRSDDTAANVSTQCNEELRSALEGAIQEYRFVSPELRPRLPRLPMHNKNRALVAALDSQLSNYFDDCEDLTDTHSILYCAAVAACRVAHVKFANDSRATRPKPAVPAWQCRIERRIAGARALIGKLICFREGNTRPRVMRFVRRAFSGTDVSPQDYMSRVTERIDFLRQKVYAWANRIRRYKRRVDRYTQNRTFQSDERWVYRGWERPDQGVTDTRLPDDDAMCSFWRSIWSVPVGHTEGDWAREVERACDPIPEMGAITICPQDVARAVRPLPNWKSPGPDGLHNFWIKWFPGSHARLAAQYQSALQSGSLPQFLTTGITHLLHKSGSTADPKNYRPITCLPTVYKVLTSILRAKINEHIDTNSIMSVSQNGSRNGSRGTKELLLIDMAISQQVRRSRKDLSTCWIDYKKAYDSVPHTWLMRVLELYKVDATLRTFLMSCMGQWRTVLRYPGCRNIQRNSEPIRIERGIFQGDSLSPLWFCLALNPLSTLLEDSGLGYRLRRGGQVISHLLYMDDLKLFAPNNLQLMELLKVTETFSSAIRMEFGVDKCAVMHVKRGEIVESVGTQLSDSINLRTLSAAETYKYLGMSEALGINVADMKQSLKERFFGRLKKVFNSLLSGGNKVRAFNGWVMPVLMYSFGILKWTQTELDALDRRVRTLLTAYRMHHPRSSVMRLYIPRKCGGRGFLNAKTLHNREICSLREYFLEADVGMHRDVVAVDKGFTPLSLAKENWRKPVVLDTNDRMEVWQSKELHGRFFRALHGPDVDSLASVAWLRSGDLFGETEGFVCAIMDEVIMTNNYRRFIVKDGTVDICRACHRPGESIRHIISGCSRLANEEYLHRHNLVARIIHQQLALKYSLVESEVPYYRYVPDPVLENGNITLYWDRSIITDRTIVANKPDIVVVDRTERRAMVGCGLSNHCADSRNSQWLNCQEPRPTPKEALVGQLDQGLDSESGASGHGPHC

SEQ ID NO: 10239 - protein, 1204 aa, Cosmia trapezina
MMQTRAKTRIQAHPPSPDSSLSSASQPVRASTVSAVSPVAAVASSSSDEFFSPPSSPTPPRRRGRGRPPAGLGPRGQPAPNRVPAAGGNVSRMRWTQSINENVMRAYYGATEGGINLTAYRGRMLSLFQVLEPAVNVSAQRLSDQVRVIQHNHRLDNATLDRLRSEMQSSSASNPPPSQNVMHVPAEIPLRANQRDEEENARAISADNLCNVEIRSALEDAIREYRFTSPDLRPRLPRLPMNKKNRALVCTLDALLPNFIESSADLCDTHSILYCTAVAACRVACVKFPNTDRATRPKPAAPAWQCRIERRINEARVLIGKLICFREGNTRPRVMRFVRRAFSGTNVSPQEYVSRVTERIDFLKQKVYAWANRIRRYRRRVDRYSQNRMFQSDERWVYRAWERPIPTEGVTDVRPPDNETMSAFWRSIWSVPVSHTEGDWMRIVEQACDSIPNMDAVTISPLDVACAVRPLPNWKSPGPDGLHNFWIKWLQRSHACLASQFQSSLETGSLPLLFTTGVTHLLHKSGSTAEPKNYRPITCLPTVYKVLTSILRAKIAHHIYNNSIMSVSQNGCRNGSRGTKELLLIDMTISQQVRRSRKDLSTCWIDYKKAYDSVPHTWLIRVLELYKIDATLRTFLMSCMGQWKTVLLYPGCRRIPGIDEPIRIERGIFQGDSLSPLWFCLALNPLSTLLEDSGLGYRLRRGGQVISHLLYMDDLKLFAPNNLRLMELLKVTENFSSAIRMEFGVDKCAVMHVKRGEIMESVGTQLSDSIHLRSLSSTETYKYLGMSEALDINVADMKQSLKERFFGRLKKVFNSLLSGGNKVRAFNGWVMPVLMYSFGVLKWTQTELDALDRRVRTLLTAYRMHHPRSSVMRLYIPRKCGGRGFLNAKTLHNREICSLREYFLEADVGMHRDVVAVDKGLTPLSLAKENWRKPAVLDTNDRREVWQGKELHGRFFRALHGPDVDFLASVSWLRFGDLFGETEGFVCAIMDEVIMTNNYRKYIVKDGTVDICRACHHPGESIRHIVSGCSRLANGEYLHRHNLVARIIHQQLALQYNLVESEVPYYRYVPDPVLENGQATLYWDRSIITDRTIVANKPDIVVIDRRERRAIIVDIAVPHDENLVKAEKDKKIKYLDLAHEVVDMWDVDSAIIVPIIVTVNGLIAQSLDQHLRRLSLRGWIKGLIQKAVLLDTARIVRRFLSLEP

SEQ ID NO: 10240 - protein, 1104 aa, Mamestra brassicae
MRWTQSINENVMRSYFGATEGGTNLTAYRGRMLSLFQVLEPAVNVSAQRLSDQVRVIQRNRMLDDSVLDRLRMEMCGHVITPPSQTVAPPQSQISSHADEESNDRVTNVSTQCNEELRSALECAIREYRYVPPELRPRLPRLPMHNKNRALVAALDSQLSNYFDDCEDLTDTHSIMYCAAVAACRVAHVKMTNDRVTRPKPAVPAWQCRIERRIGGARALIGKLICFREGNTRPRVMRFVRRAFSGTDISPRDYMSRVTERIDFLKQKVYAWANRIRRYRRRVERYTQNRTFRSNERWVYRVWEQPDQGVTDTRLPDDDAMCSFWRNIWSVPVSHTEGGWIREVERACDPLPEMGAITISPQDVARAVRPLPNWKSPGPDGLHNFWIKWLQRSHARLASQYQTALESGSLPEFLTTGVTHLLHKSGSTAEPKNYRPITCLPTVYKVLTSILRAKINNHINSNNIMSVSQNGCRNGSRGTKELLLIDMAISQQVRRSRKDLSTCWIDYKKAYDSVPHTWLMRVLELYKIDTMLRTFLMSCMGQWRTVLRYPGCRNIQRNNEPVRIERGIFQGDSLSPLWFCLALNPLSTLLENSGLGYRLKRGGQVISHLLYMDDLKLFAPSNLQLMELLKVTETFSSAIRMEFGVDKCAVMHVKRGEIMESVGTQLSDSINLRSLSSTETYKYLGMSEALGINVTDMKQSLKERFFGRLKKVFNSLLSGGNKVRAFNGWVMPVLMHSFGVLKWTQTELDALDRRVRTLLTAYRMHHPRSSVMRLYIPRKCGGRGFLNAKTLHNREICSLREYFLAVDVGMHRDVVAVDKGLTPLSLANENWRKPAVLDTNDRRAVWQSKELHGRYFRALHGPDVDQLASVAWLRFGDLFGETEGFVCAIMDEVIMTNNYRRFIVKDGTVDICRACHRPGESIRHIVSGCSRLANGEYLHRHNLVARIIHQQLALKYSLVESEVPYYRYAPDPVLDNGNITLYWDRSIITDRTIVANKPDIVVVDRIERRAMIVDITVPHDENLVKAEKDKQIKYIDLAREVVDMWDVDSAIIVPIVVSANGLIATSLDQHLRRLSLGSWIKGLIQKAVLLDTARIVRRFLSLEP

SEQ ID NO: 10241 - protein, 1198 aa, Mamestra brassicae
MLTRAAAQRARLPPPASSLSSASPPPEPSPTVSAVIPAVAVASSSSDEYFSPPTSPPPARRRRGRRPPDGLGPRGPPASDRVPAPGGSVQRMRWTQTINENVMRSYYGATEGGTNLTAYRGRMLSLFQVLEPAVNVSAQRLSDQVRVIQRNRMLDDAVLDRLRLESRNGRVSAASPPAAVQIQFSVSPRPNIVGEDDDDGAISVSTQCNERLRSALEDAFREYRSTPPELRPRLPRLPMQNKNRALVCALDSQLANCFDSSEDLADTHSILYCAAAAACRVAHVKFPNSDRATRPAVPAWQCRIERRIGEARTLIGKLICFREGNTRRRVMRFVRRAFSGTDTSPRDYLTSVTERIDFLKQKIYAWANRIRRYKRRVERYTQNRTFQSNERWVYRAWERPDQGVTDTRLPDDDVMCSFWLNIWSVPVSHTEGDWTREVERACDPIPEMGAITISPQDVARAVRPLPNWKSPGPDGLHNFWIKWFKRSHARLASQFQSALESGSLPQFLTTGITHLLHKSGSTAEPKNYRPITCLPTVYKVLTSILRAKINQHIETNSIMSASQNGCMNRSRGTKELLLIDVAISQQVRRSRRDLSTCWIDYKKAYDSVPHTWLMRVLELYKVDAVLRTFLMSCMGQWRTVLRYPGCRQIQANSDPIRIERGIFQGDSLSPLWFCLALNPLSTLLEGSGQGYRLRRGGQVISHLLYMDDLKLFAPNNLQLMKLLKVTETFSSAISMEFGVDKCAVMHVKRGEIMESVGTQLSDSIHLRSLSSTETYKYLGMSEALGINANDVKQSLKERFFGRLNKVLNSLLSGGNKVRAFNGWVMPVLMYSFGILKWTQTELDALDRRVRSLLTANRMHHPRSSVMRLYIPRKCGGRGFLNAKTLHNREICSLREFFLEADVGMHRDVVAVDKGLTALSLANENWRKPVVLDTNDRREVWQSKELHGRFYRVLHGPDVDFLASVAWLRFGDLFGETEGFVCAIMDEVMMTNNYRKYIVKDGTVDICRACHRPGESIRHIISGCSSLANGDYLHRHNLVARIIHQQLALKYNLVESEVPYYRYVPDPVLENGNCTLYWDRSIITDRTIIANKPDIVVIDRLECRAMIVDIAVPHDVNLVKTEKDKQTKYLDLAREVVDMWDVNTAVIVPIVVTANGIIAKSLDQHLKRLSLGSWIKGLIQKAVLLDTARIVRRFLSQGP

SEQ ID NO: 10242 - protein, 1197 aa, Mamestra brassicae
MLTRSRARHLATHPSPSASSLSSASPPPEPSPTVSAVTPAVAVASSSSDEYFSPPTTPPPARRRRGRRPPDGLGPRGPPASDRVPAPGGSVQRMRWTQSINENVMRSYFGATEGGTNLTAYRGRMLSLFQVLEPAVNVSAQRLSDQVRVIQRNRMLDDSVLDRFRMEMCGHVITPPSQTVAPPQSQISSHADEASNDRVTNVSTQCNEELRSALECAIREYRYIPPELRPRLPRLPMHNKNRALVAALDLQLSNYFDDCEDLTDTHSIMYCAAVAACRVAHVKMTNDRVTRPKPAVPAWQCRIERRIGGARALIGKLICFREGNTRPRVMRFVRRAFSGTDISPRDYMSRVTERIDFLKQKVYAWANRIRRYRRRVERYTQNRTFRSNERWVYRVWEQPDHGVTDTRLPDDDAMCSFWRNIWSVPVSHTEGDWIREVERACDPLPEMGAITISPQDVARAVRPLPNWKSPGPDGLHNFWIKWLQRSHARLASQYQSALESGSLPKFLTTGVTHLLHKSGSTAEPKNYRPITCLPTVYKVLTSILRAKINNHINSSNIMSVSQNGCRNGSRGTKELLVIDMAISQQVRRSRKDLSTCWIDYKKAYDSVPHTWLRRVLELYKIDTMLRTFLMSCMGQWRTVLRYPGCRNIQRNSEPVRIERGIFQGDSLSPLWFCLALNPLSTLLENSGLGYRLKRGGQVISHLLYMDDLKLFAPSNLQLMELLKVTETFSSAIRMEFGVDKCAVMHVKRGEIMESVGIQLSDSINLRSLSSTETYKYLGMSEALGINVTDMKPSLKERFFGRLKKVFNSLLSGGNKVRAFNGWVMPVLMYSFGALKWTQTELDALDRRVRTLLTAYRMHHPRSSVMRLYIPRKCGGRGFLNAKTLHNREICSLREYFLAVDVGIHRDVVAVDKGLTPLSLANENWRKPAVLDTDDRRAVWQSKELHGRYFRALHGPDVDQLASVAWLRFGDLFGETEGFVCAIMDEVIMTNNYRRFIVKDGTVDICRACHRPGESIRHIVSSCSRLANGEYLHRHNLVARIIHQQLALKYSLVESEVPYYRYAPDPVLDNGNITLYWDRSIITDRTIVANKPDIVVVDRIERRAMIVDITVPHDENLVKAEKDKQIKYIDLAREVVDMWDVDSAIIVPIVVSANGLIAMSLDQHLRRLSLGSWIKGLIQKAVLLDTARIVRRFLSLEP

SEQ ID NO: 10243 - protein, 1107 aa, Mamestra brassicae
MRWTQTINENVMRSYYGATEGGTNLTAYRGRMLSLFQVLEPAVNVSAQRLSDQVRVILRNRMLDDAVLDRLRLESRSGRVSPASPPAAVPIQSSISPRSNNVGEDDDDGAISVSTQCNERLRSALEDAFREYRSTPPELRPRLPRLPMHNKNRALVCALDSQLTNCFDSSEDLADTHSILYCAAAAACRVAHVKFLNSDRATRPAVPAWQCRIERRIGEARALIGKLICFREGNTRRRVMRFVRRAFSGTDTSPRDYLTRVTERIDFLKQKIYAWANRIRRYKRRVERYTQNRTFQSNERWVYRAWERPDQGVTDTRLPDDDVMCSFWRNIWSVPVSHTEGDWIREVERACDPILEMGATTISPQDVARAVRPLPNWKSPGPDGLHNFWIKWFTGSHARLASQFQSALESGSLPQFLTTGITHLLHKSGSTAEPKNYRPITCLPTVYKVLTSILRAKINHHIESNSIMSASQNGCRNGSRGTKELLLMDIAISQQVRRSRKDLSTCWIDYKKAYDSVPHTWLMRVLELYKVDAVLRTFLMSCMGQWRTVLRYPGCRQIQVNGDPIRIERGIFQGDSLSPLWFCVALNPLSTLLEGSGQGYRLRRGGQVISHLLYMDDLKLFAPNNLQLMELLKVTETFSSAISMEFGVDKCAVMHVKRGEIMESVGTQLSDSIHLRSLSSTETYKYLGMSEALGINANDMKQSLKERFFGRLNKVLNSLLSGGNKVRAFNGWVMPVLMYSFGILKWTQTELDPLDRRVRSLLTANRMHHPRSSVMRLYIPRKCGGRGFLNAKTLHNREICSLREFFLEADVGMHRDVVAVDKGLTALSLANENWRKPVVLDTNDRREVWQSKELHGRFYRVLHGPDVDFLASVAWLRFGDLFGETEGFVCAIMDEVMMTNNYRKYIVKDGTVDICRACHRPGESIRHIISGCSSLANGDYLHRHNLVARIIHQQLALKYNLVESEVPYYRYVPDPVLENGNCTLYWDRSIITDRTIVANKPDIVVIDRLERRAMIVDIAVPHDENLVKTEKDKQTKYLDLAREVVDMWDVNTAVIVPIVVTANGIIAKSLDQHLKRLSLGSWIKGLIQKAVLLDTARIVRRFLSQGP

SEQ ID NO: 10244 - protein, 1198 aa, Noctua fimbriata
MLTRSAARRARLSPPDPSLSSASPPPESSPVVSAVTPAVAVASSSSDEYFSPPTTPPPVRRRGGRRPPDGLGPRGPPASDRVPAPGGSVQRMRWTQSINANVMRAYYGATEEGNNLTAYRVRMLSLFQVLEPAVNVSAQRLSDQVRVIQRNRMLDDTVLDRLRTEMQSSHVIATPPPQAVVPPQSTIIPNRDNDVSNDIVTNVSTQCNEEMRSALEGAIREYRFMQPDLRPRIPRLPMHNKNRALVAVLDSQLSNYFDNCEDLTDAHSILYCAAVAACRVAHVKFSDDRATRPKPAVPPWQYRIERRIGGARALIGKLICFREGNTRPRVMRFVRRAFSGTDISPRDYMSRITERIDFLKQKVYAWANRIRRYKRRVDRYTQNRTFQRDERWVYRAWERPDQGVADTRLPHDDAMCSFWRSIWSVPVSHTEGEWTQGVERACDLVPEMGAITISPQDVVRAVRPLPNWKSPGPDGLHNFWIKWFTRSHARLAILFQSALESGSLPEFLTTGITHLLHKSGSTAEPKNYRPITCLPTVYKVLTSILRAKINKHIDDNSIMSASQNGCRNGSRGTKELLLIDMAISQQVRRSRSDLSTCWIDYKKAYDSVPHTWLMRVLELYKVDATLRTFLMSCMGQWRTVLRYPGCRQIQRNSEPIRIERGIFQGDSLSPLWFCLALNPLSTLLEDSGLGYRLRRGGQVISLLLYMDDLKLFAPNDLQLMELLKVTETFSSDIRMEFGVDKCAVMHVKRGEIVESVGTQLSDSINLRSLSATETYKYLGMSEALGINVADMKQSLKERFFGRLKKVFNSLLSGGNKVRAFNGWVMPVLMYSFGILKWTQTELDALDRRVRTLLTAFRMHHPRSSVMRLYIPRKCGGRGFLNAKTLHNREICSLREYFLETDVGMHRDVVAVDKGLTPLSLAKENWRKPLVPDTNDRMEVWQSKELHGRFFRALHGPDVDLSASVAWLRCGDLFGETEGFVCAIMDEVMMTNNYRRFIVKDGTVDICRACHRPGESIRHIISGCSRLANGEYLHRHNLVARIIHQQLALKYNLVESEVPYYKYVPDPVLENGSITLYWDQSIITDRTIVANKPDIVVVDRSERRTMIVDITVPHDENLVKAEKDKKIKYLDLAREVVDMWDVDSAIIVPIVVSAHGLIAKSLDQYLRRLSLGSWIKGLIQKAVLLDTARIVRRFLSLEP

SEQ ID NO: 10245 - protein, 1198 aa, Noctua fimbriata
MLTRAAAKRARLSPPDPSLSSASPPPESSPVMSAVTPAVAVASSSSDEYFSPPTTPPPVRRRGGRRPPDGLGPRGPPASDRVPAPGGSVQRMRWTQSINENVMRSYYGATEGGNNLTAYRVRMLSLFQVLEPAVNVSAQRLSDQVRVIQRNRMLDDTVLDRLRTEMQSSHVIATPPPQAVVPPQSTIIPNRDNDVSNDIVTNVSTQCNEEMRSALEGAIREYRFMQPDLRPRIPRLPMHNKNRALVAVLDSQLSNYFDNCEDLTDAHSILYCAAVAACRVAHVKFSNDRATRPKPAVPPWQYRIERRIGGARALIGKLICFREGNTRPRVMRFVRRAFSGTDISPRDYMSRITERIDFLKQKVYAWANRIRRYKRRVDRYTQNRTFQRDERWVYRAWERPDQGVADTRLPDDDAMCSFWRSIWSVPVSHTEGEWTQGVERACDLVPEMGAITISPQDVVRAVRPLPNWKSPGPDGLHNFWIKWFTRSHARLAILFQSALESGSLPEFLTTGITHLLHKSGSTAEPKNYRPITCLPTVYKVLTSILRAKINKHIDDNSIMSASQNGCRNGSRGTKELLLIDMAISQQVRRSRRDLSTCWIDYKKAYDSVPHTWLMRVLELYKVDATLRTFLMSCMGQWRTVLRYPGCRQIQRNSEPIRIERGIFQGDSLSPLWFCLALNPLSTLLEDSGLGYRLRRGGQVISHLLYMDDLKLFAPNDLQLMELLKVTETFSSAIRMEFGVDKCAVMHVKRGEIVESVGTQLSDSINLRSLSATETYKYLGMSEALGINVADMKQSLKERFFGRLKKVFNSLLSGGNKVRAFNGWVMPVLMYSFGILKWTQTELDALDRRVRTLLTAYRMHHPRSSIMRLYIPRKCGGRGFLNAKTLHNREICSLREYFLETDVGMHRDVVAVDKGLTPLSLAKENWRKPLVLDTNDRMEVWQSKELHGRFFRALHGPDVDLSASVAWLRSGDLFGETEGFVCAIMDEVMMTNNYRRFIVKDGTVDICRACHRPGESIRHIISGCSRLANGEYLHRHNLVARIIHQQLALKYNLVESEVPYYKYVPDPVLENGSITLYWDQSIITDRTIVANKPDIVVVDRSERRTMIVDITVPHDENLVKAEKDKKIKYLDLAREVVDMWDVDSAIIVPIVVSAHGLIAKSLDQYLRRLSLGSWIKGLIQKAVLLDTARIVRRFLSLEP

SEQ ID NO: 10246 - protein, 1045 aa, Noctua fimbriata
MLDDTVLDRLRTETQSSHVITPSAQAVVLPQSSTIPNRDNDVSNDMVTNVSTQCNEEMRSALEGAIREYRFMQPDLRPRIPRLPMHNKNRALVAVLDSQLSNYFDNCEDLTDAHSILYCAAVAACRVAHVKFSDDRATRPKPAVPPWQYRIERRIGGARALIGKLICFREGNTRPRVMRFVRRAFSGTDISPRDYMSRITERIDFLKQKVYAWASRIRRYKRRVDRYTQNRTFQRDERWVYRTWERPDQGVADTRIPDDDAMCSFWRSIWSVPVSHTEGEWTREVEQACDLVPEMGAITISPQDVVRAVRPLPNWKSPGPDGLHNFWIKWFTRSHARLAILFQSALESGSLPEFLTTGITHLLHKSGSTAEPKNYRPITCLPTVYKVLTSILRAKINKHIDDNSIMSASQNGCRNGSRGTKELLLIDMAISQQVRRSRRDLSTCWIDYKKAYDSVPHTWLMRVLELYKVDATLRTFLMSCMGQWRTVLRYPGCRQIQRNSEPIRIERGIFQGDSLSPLWFCLALNPLSTLLEDSGLGYQLRRGGQVISHLLYMDDLKLFAPNDLQLMELLKVTETFSSAIRMEFGVDKCAVMHVKRGEIVESVGTQLSDSINLRSLSATETYKYLGMSEALGINVADMKQSLKERFFGRLKKVFNSLLSGGNKVRAFNGWVMPVLMYSFGILKWTQTELDALDRRVRTLLTAYRMHHPRSSVMRLYIPRKCGGRGFLNAKTLHNREICSLREYFLETDVGMHRDVVAMDKGLTPLSLAKENWRKPLVLDTNDRMEVWQSKELHGRFFRALHGPDVDLSASVAWLRSGDLFGETEGFVCAIMDEVMMTNNYRRFIVKDGTVDICRACHRPGESIRHIISGCSRLANGEYLHRHNLVARIIHQQLALKYNLVESEVPYYKYVPDPVLENGSITLYWDQSIITDRTIVANKPDIVVVDRSERRTMIVDITVPHDENLVKAEKDKKIKYLDLAREVVDMWDVDSAIIVPIVVSAHGLIAKSLDQYLRRLSLGSWIKGLIQKAVLLDTARIVRRFLSLEP

SEQ ID NO: 10247 - protein, 1199 aa, Noctua fimbriata
MLTRSAAARRARLSPPDPSLSSASPPPESSPVVSAVTPAVAVASSSSDEYFSPPTTPPPVRRRGGRRPPDGLGPRGPPASDRVPAPGGSVQRMRWTQSINANVMRAYYGATEGGNNLTAYRVRMLSLFQVLEPAVNVSAQRLSDQVRVIQRNRMLDDTVLDRLRTEMQSSHVIATPPPQAVVPPQSTIIPNRDNDVSNDIVTNVSTQCNEEMRSALEGAIREYRFMQPDLRPRIPRLPMHNKNRALVAVLDSQLSNYFDNCEDLTDAHSILYCAAVAACRVAHVKFSDDRATRPKPAVPPWQYRIERRIGGARALIGKLICFREGNTRPRVMRFVRRAFSGTDISPRDYMSRITERIDFLKQKVYAWANRIRRYKRRVDRYTPNRTFQRDERWVYRAWERPDQGVADTRLLDDDAMCSFWRSIWSVPVSHTEGEWTQGVERACDLVPEMGAITISPQDVVRAVRPLPNWKSPGPDGLHNFWIKWFTRSHARLAILFQSALESGSLPEFLTTGITHLLHKSGSTAEPKNYRPITCLPTVYKVLTSILRAKINKHIDDNSIMSASQNGCRNGSRGTKELLLIDMAISQQVRRSRSDLSTCWIDYKKAYDSVPHTWLMRVLELYKVDATLRTFLMSCMGQWRTVLRYPGCRQIQRNSEPIRIERGIFQGDSLSPLWFCLALNPLSTLLEDSGLGYRLRRGGQVISHLLYMDDLKLFAPNDLQLMELLKVTETFSSAIRMEFGVDKCAVMHVKRGEIVESVGTQLSDSINLRSLSATETYKYLGMSEALGINVADMKQSLKERFFGRLKKVFNSILSGGNKVRAFNGWVMPVLMYSFGILKWTQTELDALDRRVRTLLTAYRMHHPRSSIMRLYIPRKCGGRGFLNAKTLHNREICSLREYFLETDVGMHRDVVAVDKGLTPLSLAKENWRKPLVLDTNDRMEVWQSKELHGRFFRALHGPDVDLSASVAWLRCGDLFGETEGFVCAIMDEVMMTNNYRRFIVKDGTVDICRACHRPGESIRHIISGCSRLANGEYLHRHNLVARIIHQQLALKYNLVESEVPYYKYVPDPVLENGSITLYWDQSIITDRTIVANKPDIVVVDRSERRTMIVDITVPHDENLVKAEKDKKIKYLDLAREVVDMWDVDSAIIVPIVVSAHGLIAKSLDQYLRRLSLGSWIKGLIQKAVLLDTARIVRRFLSLEP

SEQ ID NO: 10248 - protein, 1198 aa, Noctua fimbriata
MLTRSAARRARLSPPDPSLSSASPPPESSPVVSAVTPAVAVASSSSDEYFSPPTTPPPVRRRGGRRPPDGLGPRGPPASDRVPAPGGSVQRMRWTQSINANVMRAYYGATEGGNNLTAYRVRMLSLFQVLEPAVNVSAQRLSDQVRVIQRNRMLDDTVLDRLRTEMQSSHVIATPPPQAVVPPQSTIIPNRDNDVSNDIVTNVSTQCNEEMRSALEGAIREYRFMQPDLRPRIPRLPMHNKNRALVAVLDSQLSNYFDNCEDLTDAHSILYCAAVAACRVAHVKFSDDRATRPKPAVPPWQYRIERRIGGARALIGKLICFREGNTRPRVMRFVRRAFSGTDISPRDYMSRITERIDFLKQKVYAWANRIRRYKRRVDRYTQNRTFQRDERWVYRAWERPDQGVADTRLPDDDAMCSFWRSIWSVPVSHTEGEWTQGVERACDLVPEMGAITISPQDVVRAVRPLPNWKSPGPDGLHNFWIKWFTRSHARLAILFQSALESGSLPEFLTTGITHLLHKSGSTAEPKNYRPITCLPTVYKVLTSILRAKINKHIDDNSIMSASQNGCRNGSRGTKELLLIDMVISQQVRRSRSDLSTCWIDYKKAYDSVPHTWLMRVLELYKVDATLRTFLMSCMGQWRTVLRYPGCRQIQRNSEPIRIERGIFQGDSLSPLWFCLALNPLSTLLEDSGLGYRLRRGGQVISHLLYMDDLKLFAPNDLQLMELLKVTETFSSAIRMEFGVDKCAVMHVKRGEIVESVGTQLSDSINLRSLSATETYKYLGMSEALGINVADMKQSLKERFFGRLKKVFNSLLSGGNKVRAFNGWVMPVLMYSFGILKWTQTELDALDRRVRTLLTAYRMHHPRSSVMRLYIPRKCGGRGFLNAKTLHNREICSLREYFLETDVGMHRDVVAVDKGLTPLSLAKENWRKPLVPDTNDRMEVWQSKELHGRFFRALHGPDVDLSASVAWLRCGDLFGETEGFVCAIMDEVMMTNNYRRFIVKDGTVDICRACHRPGESIRHIISGCSRLANGEYLHRHNLVARIIHQQLALKYNLVESEVPYYKYVPDPVLENRSITLYWDQSIITDRTIVANKPDIVVVDRSERRTMIVDITVPHDENLVKAEKDKKIKYLDLAREVVDMWDVDSAIIVPIVVSAHGLIAKSLDQYLRRLSLGSWIKGLIQKAVLLDTARIVRRFLSLEP

SEQ ID NO: 10249 - protein, 1198 aa, Noctua fimbriata
MLTRAAAKRARLSPPDPSLSSASPPPESSPVMSAVTPAVAVASSSSDEYFSPPTTPPPVRRRGGRRPPDGLGPRGPPASDRVPAPGGSVQRMRWTQSINENVMRSYYGATEGGNNLTAYRVRMLSLFQVLEPAVNVSAQRLSDQVRVIQRNRMLDDTVLDRLRTEMQSSHVIATPPPQAVVPPQSTIIPNRDNDVSNDIVTNVSTQCNEEMRSALEGAIREYRFMQPDLRPRIPRLPMHNKNRALVAVLDSQLSNYFDNCEDLTDAHSILYCAAVAACRVAHVKFSNDRATRPKPAVPPWQYRIERRIGGARALIGKLICFREGNTRPRVMRFVRRAFSGTDISPRDYMSRITERIDFLKQKVYAWANRIRRYKRRVDRYTQNRTFQRDERWVYRAWERPDQGVADTRLPDDDAMCSFWRSIWSVPVSHTEGEWTQGVERACDLVPEMGAITISPQDVVRAVRPLPNWKSPGPDGLHNFWIKWFTRSHARLAILFQSALESGSLPEFLTTGITHLLHKSGSTAEPKNYRPITCLPTVYKVLTSILRAKINKHIDDNSIMSASQNGCRNGSRGTKELLLIDMAISQQVRRSRRDLSTCWIDYKKAYDSVPHTWLMRVLELYKVDATLRTFLMSCMGQWRTVLRYPGCRQIQRNSEPIRIERGIFQGDSLSPLWFCLALNPLSTLLEDSGLGYRLRRGGQVISHLLYMDDLKLFAPNDLQLMELLKVTETFSSAIRMEFGVDKCAVMHVKRGEIVESVGTQLSDSINLRSLSATETYKYLGMSEALGINVADMKQSLKERFFGRLKKVFNSLLSGGNKVRAFNGWVMPVLMYSFGILKWTQTELDALDRRVRTLLTAYRMHHPRSSIMRLYIPRKCGGRGFLNAKTLHNREICNLREYFLETDVGMHRDVVAVDKGLTPLSLAKENWRKPLVLDTNDRMEVWQSKELHGRFFRALHGPDVDLSASVAWLRSGDLFGETEGFVCAIMDEVMMTNNYRRFIVKDGTVDICRACHRPGESIRHIISGCSRLANGEYLHRHNLVARIIHQQLALKYNLVESEVPYYKYVPDPVLENGSITLYWDQSIITDRTIVANKPDIVVVDRSERRTMIVDITVPHDENLVKAEKDKKIKYLDLAREVVDMWDVDSAIIVPIVVSAHGLIAKSLDQYLRRLSLGSWIKGLIQKAVLLDTARIVRRFLSLEP

SEQ ID NO: 10250 - protein, 1197 aa, Noctua fimbriata
MLTRAAAKRARLSPPDPSLSSASPPPESSPVVSAVTPAVAVASSSSDEYFSPPTTPPPVRRRGGRRPPDGLGPRGPPASDRVPAPGGSVQRMRWTQSINENVMRSYYGATEGGNNLTAYRVRMLSLFQVLEPAVNVSAQRLSDQVRVIQRNRMLDDTVLDRLRTETQSSHVITPSAQAVVLPQSSTIPNRDNDVSNDMVTNVSTQCNEEMRSALEGAIREYRFMQPDLRPRIPRLPMHNKNRALVAVLDSQLSNYFDNCEDLTDAHSILYCAAVAACRIAHVKFSDDRATRPKPAVPPWQYRIERRIGGARALIGKLICFREGNTRPRVMRFVRRAFSGTDISPRDYMSRITERIDFLKQKVYAWASRIRRYKRRVDRYTQNRTFQRDERWVYRTWERPDQGVADTRIPDDDAMCSFWRSIWSVPVSHTEGEWTREVERACDLVPEIGAITISPQDVVRAVRPLPNWKSPGPDGLHNFWIKWFTRSHARLAILFQSALESGSLPEFLTTGITHLLHKSGSTAEPKNYRPITCLPTVYKVLTSILRAKINKHIDDNSIMSASQNGCRNGSRGTKELLLIDMAISQQVRRSRRDLSTCWIDYKKAYDSVPHTWLMRVLELYKVDATLRTFLMSCMGQWRTVLRYPRCWQIQRNSEPIRIERGIFQGDSLSPLWFCLALNPLSTLLEDSGLGYQLRRGGQVISHLLYMDDLKLFAPNDLQLMELLKVTETFSSAIRMEFGVDKCAVMHVKRGEIVESVGTQLSDSINLRSLSTTETYKYLGMSEALGINVADMKQSLKERFFGRLKKVFNSLLSGGNKVRDFNGWVMPVLMYSFGILKWTQTELDALDRRVRTLLTAYRMHHPRSSVMRLYIPRKCGGRGFLNAKTLHNREICSLREYFLETDVGMHRDVVAMDKGLTPLSLAKENWRKPLVLDTNDRMEVWQSKELHGRFFRALHGPDVDLSASVAWLRSGDLFGETEGFVCAIMDEVMMTNNYRRFIVKDGTVDICRACHRPGESIRHIISGCSRLANGEYLHRHNLVARIIHQQLALKYNLVESEVPYYKYVPDPVLENGSITLYWDQSIITDRTIVANKPDIVVVDRSERRTMIVDITVPHDENLVKAEKDKKIKYLDLAREVVDMWDVDSAIIVPIVVSAHGLIAKSLDQYLRRLSLGSWIKGLIQKAVLLDTARIVRRFLSLEP

SEQ ID NO: 10251 - protein, 1198 aa, Atethmia centrago
MLTRSAAVRARLPPPDSSLSSASPPPVPSPTVCAVTTPTAAVASSSSDEYFSPPTTPPPVRRRGGRRPPDGLGSRGPPASDRVPAPGGSVKRMRWTQSVNENVMRSYYGATEGGNNLTAYRVRMLSLFQVLEPAVNVSAQRLSDQVRVIQRNHMLDDTVIDRLRSEMQRSHIIVPPSQTVVLSPQLSTNQADEGSDDRATNVSTQCNVELRSALEDAIREYRLMSPELRPRLPRLPKHKKNRALVAALDSQLSNYFDDCEDLTDTHSILYCAAVAVCRVAHVKFAKDSRTTRPKPTVPAWQCRIESRIGGARALIGKLICFREGNTRPRVMRFVRRAFSETDIGPQDYMTRVTERIDFLKQKVYAWANRIRRYKRRVERYTQNRTFQSDERWVYRGWERPDQDVTDTRLPDDDVMCSFWRSIWSVPVSHTEGDWARKVERACDPIPEMGAITICPQDVARAVRPLPNWKSPGPDGLHNFWLKWFLRSHARLAAQYQTALESGSLPQFLTTGVTHLLHKSGSTAEPKNYRPITCLPTVYKLLTSILRAKINKHIDTNSIMSASQNGCRNGSRGTKELLLIDMTISQQVRHSRKDLSTCWIDYKKAYDSVPHTWLMRVLELYKVDATLRTFLISCMGQWRTVLRYPGCRNIQRNSEPIRIERGIFQGDSLSPLWFCLALNPLSTLLEDSGLGYRMRRGGQVISHLLYMDDLKLFASNNLQLMELLKITESFSSAIRMEFGVDKCAVMHVKRGKIVESVGTQLSDSINLRTLSASETYKYLGMSEALGINVTDMKQSLKERFFGRLKKVFNSLLSGGNKVRAFNGWVMPVLMYSFGILKWTQTELDALDRRVRTLLTAYRMHHPRSSVMRLYIPRKCGGRGFLNAKTLHNREVCSLREYFLEADVGMHRDVVAVDKGLTPLSLAKENWRKLVVLDTNDRREVWQSKELHGRFFRALHEPDVDFQASVAWLRFGDLFGETEGFVCAIMDEVIMTKNYRRFIVKDGTVDVCRACHRPGESIRHIISGCSRLANEEYLHRHNLVARIIHQQLALKYSLVESEVPYYRYVPDPVLDNGNITLYWDRSIITDRTIVTNKPDIVVVDRTERRAMIVDITVPHDGNLVKAEKDKQIKYLDLAREVVDMWDVDSAIIVPIVVSANGLIAKSLDQHLKRLTLDGWIKSLIQKAVLLDTARIVRRFLSLEP

SEQ ID NO: 10252 - protein, 1198 aa, Atethmia centrago
MLTRSAAVRARLPPPDSSLSSASPPPVPSPTVCAVTTPTAAVASSSSDEYFSPPTTPPPVRRRGGRRPPDGLGSRGPPASDRVPAPGGSVKRMRWTQSVNENVMRSYYGATEGGNNLTAYRVRMLSLFQVLEPAVNVSAQRLSDQVRVIQRNHMLDDTVLDRLRSEMQRSHVIVPPSQTVVHSPQLSTNQADEGSDDRATNVSTQCNVELRSALEDAIREYRLMSPELRPRLPRLPMHKKNRALVAALDSQLSNYFDDCEDLTDTHSILYCAAVAVCRVAHVKFAKDSRTTRPKPTVPAWQCRIESRIGGARALIGKLICFREGNTRPRVMRFVRRAFSGTDIGPHDYMTRVTERIDFLKQKVYAWANRIRRYKRRVERYTQNRTFQSDERWVYRGWERPDQDVTDTRLPDDDVMCSFWRSIWSVPVSHTEGDWARKVERACDPIPEMGAITICPQDVARAVRPLPNWKSPGPDGLHNFWLKWFLRSHARLAAQYQTALESGSLPQFLTTGVTHLLHKSGSTAEPKNYRPITCLPTVYKLLTSILRAKINKHKDTNSIMSASQNGCRNGSRGTKELLLIDMTISQQVRRSRKDLSTCWIDYKKAYDSVPHTWLMRVLELYKVDATLRTFLISCMGQWRTVLRYPGCRNIQRNSEPIRIERGIFQGDSLSPLWFCLALNPLSTLLEDSGLGYRMRRGGQVISHLLYMDDLKLFASNNLQLMELLKITESFSSAIRMEFGVDKCAVMHVKRGKIVESVGTQLSDSINLRTLSASETYKYLGMSEALGINVTDMKQSLKERFFGRLKKVFNSLLSGGNKVRAFNGWVMPVLMYSFGILKWTQTELDALDRRVRTLLTAYRMHHPRSSVMRLYIPRKCGGRGFLNAKILHNREVCSLREYFLEADVGMHRDVVAVDKGLTPLSLAKENWRKLVVLDTNDRREVWQSKELHGRFFRALHEPDVDFQASVAWLRFGDLFGETEGFVCAIMDEVIMTKNYRRFIVKDGTVDVCRACHRPGESIRHIISGCSRLANEEYLHRHNLVARIIHQQLALKYSLVESEVPYYRYVPDPVLDNGNITLYWDRSIITDRTIVANKPDIVVVDRTERRAMIVDITVPHDGNLVKAEKDKQIKYLDLAREVVDMWDVDSAIIVPIVVSANGLIAKSLDQHLKRLTLDGWIKGLIQKAVLLDTARIVSRFLSLEP

SEQ ID NO: 10253 - protein, 868 aa, Atethmia centrago
MRFVRRAFSGTDIGPHDYMTRVTERIDFLKQKVYAWANRIRRYKRRVERYTQNRTFQSDERWVYRGWERPDQDVTDTRLPDDDVMCSFWRSIWSVPVSHTEGDWARKVERACDPIPEMGAITICPQDVARAVRPLPNWKSPGPDGLHNFWLKWFLRSHARLAAQYQTALESGSLPQFLTTGVTHLLHKSGSTAEPKNYRPITCLPTVYKLLTSILRAKINKHIDTNSIMSASQNGCRNGSRGTKELLLIDMTISQQVRRSRKDLSTCWIDYKKAYDSVPHTWLMRVLELYKVDATLRTFLISCMGQWRTVLRYPGCRNIQRNSEPIRIERGIFQGDSLSPLWFCLALNPLSTLLEDSGLGYRMRRGGQVISHLLYMDDLKLFASNNLQLMELLKITESFSSAIRMEFGVDKCAVMHVKRGKIVESVGTQLSDSINLRTLSASETYKYLGMSEALGINVTDMKQSLKERFFGRLKKVFNSLLSGGNKVRAFNGWVMPVLMYSFGILKWTQTELDALDRRVRTLLTAYRMHHPRSSVMRLYIPRKCGGRGFLNAKILHNREVCSLREYFLEADVGMHRDVVAVDKGLTPLSLAKENWRKLVVLDTNDRKEVWQSKELHGRFFRALHEPDVDFQASVAWLRFGDLFGETEGFVCAIMDEVIMTKNYRRFIVKDGTVDVCRACHRPGESIRHIISGCSRLANEEYLHRHNLVARIIHQQLALKYSLVESEVPYYRYVPDPVLDNGNITLYWDRSIITDRTIVANKPDIVVVDRTERRAMIVDITVPHDGNLVKAEKDKQIKYLDLAREVVDMWDVDSAIIVPIVVSANGLIAKSLDQHLKRLTLDGWIKGLIQKAVLLDTARIVRRFLSLEP

SEQ ID NO: 10254 - protein, 1207 aa, Atethmia centrago
MLTRSRARRLRQDTHPTSSVPSLSSASQLPEPAPDVSPVIPAAAVASSSSDEYFSPPTTPPPVRPRGRGRPPASLGLRGPPASDRVPAPGGSVQRMRWTQALNENVMRAYFGATEGGSNLTAYRGRMLSLFQVLEPAVNVSAQRLSDQVRVIQRKHMLDDVVLDRLRIESRNSHVSPASPLVAVQMQNLPGGSPRPDHADEEGDDEAISVSSQCNVRLRSALDDAFREYRSTPPGLRPRLPRLPMHKKNKALVCALDSQLSNYFDSSKDLTDTHSILYCAAVAACRVAQVKFPNSDRAPRPKSAVPAWQSRIERRIGETRALIGKLICFREGNTRPRVMRFVKRAFAGTDIRSSRDYLTRVTERIDFLKQKICAWANRIRRYRRRSERYTQNRTFQNDERWVYRTWERPDQGVADTRLPDDDAICSFWRNIWSVPVNHTEGDWTKRIERACDLIPEMGALTILPQDVAHAVRPLPNWKSPGPDGLHNFWIKWFQRSHARLASQFQSALESGSLPLFLTTGITHLLHKSGSTAEPKNYRPITCLPTVYKVLTSILRAKINKHIETNLIMSASQNGCKNGSRGTKELLLIDIAISQQVRRSRKDLSTCWIDYKKAYDSVPHTWLMRVLELYKVDATLRTFLMSCMRQWRTVLCYPGCRYIQRNSEPIRIKRGIFQGDSLSPLWFCLALNPLSTLLENSGLGYRLRRGGQVISHLLYMDDLKLFAPNNLQLMELLKVTKTFSSAIRMEFGVDKCAVMHVKRGGIVESVGTQLSDSIHLRSLSSTETYKYLGMSEALGINAADMKQSLRERFFGRLNKVLNSLLSGGNKVRAFNGWVMPVLMYSFGILKWTQTELDALDRRVRTLLTANRMHHPRSSVMRLYIPRKCGGRGFLNAKTLHNREICSLREYFLETDVVMHRDVVSVDKGLTPLSLADENWRKPIILDTNDRREVWQSKELHGRFYRVLHGPDVDLLASVSWLRFGDLFGETEGFVFAIMDEVIMTNNYRKYIVKDGTVDICRACHRPGESIRHIISGCSRLANGDYLHRHNLVAKIIHQRLALKYSLVESEVPYYRYAPDPVLENGNITLYWDRSIITDRTIVANKPDIVVIDRLTRRTMIIDIAVPHDENLVKAEKDKQIKYLDLAHEVVDMWDVDTAIIVPIVVTANGIIPKSLDQHLKRLSLGSWIKGLIQRAVLLDTARIVRRFLSQEP

SEQ ID NO: 10255 - protein, 1194 aa, Atethmia centrago
MLTRSAARARLPPPDFSLSSASPPPVPSPTVTSPAAVVASSSSDEYFSPPTTPPPVRRRGGRRPPDGLGSRGPPASDRVPAPGGSVQRMRWTRSINENVMRSYYGATEGGNNLTAYRVRMLSLFQVLEPAVNVSAQRLSDQVRVIQRNHMLDDTVLDRLRSETQSGHAIAPPSQTVVVSTQLRTNQADEGSDDRATNVSTQYNVELRSALEDAIREYRFMSPELRPRLPRLPMHKKNRALVATLDSQLSNYFDDCEDLTDTHSILYCAAVAVCRVAHVKFAKDSRATRSKPTVPAWQCRIERRIGGARALIGKLICFREGNTRPRVMRFVRRAFSGTDIGPQDYMSHVTERIDFLKQKVYAWANRIRRYKRRVERYTQNRTFQSDERWVYRGWERPDQGVTGTRLPDDDVMCSFWRSIWSVPVSHTEGDWAREVERACDPIPEMGAITISPQDVARAVRPLPNWKSPGPDELHNFWLKWFLRSHARLAAQYQTALESGSLPQFLTTGVTHLLHKSGSTAEPKNYRPITCLPTVYKVLTSILRAKINEHIDTNSIMSASQNGCRNGSRGTKELLLIDMTISQQVRHSRKDLSTCWIDYKKAYDSVPHTWLMRVLELYKVDATLRTFLMSCMGQWRTVLRYPGCRNIQRNSEPIRIERGIFQGDSLSPLWFCLALNPLSTLLEDSGLGYRLRRGSQVISHLLYMDDLKPFASNNFQLMELLKITETFSSAIRMEFGVDKCAVMHVKRGKIVESVGTQLSDSINLRALSASETYKYLGMSEALGINVTDMKQSLKERFFGRLKKVFNSLLSGGNKVRAFNGWVMPVLMYSFGILKWTQTELDALDRRVRTLLTAYRMHHPRSSVMRLYIPRKCGGRGFLNAKTLHNREVCSLREYFLKADVGMHRDVVAVDKGLTPLSLAKENWRKLVLLDTNDRREIWQSKELHGRFFRALHEPDVDFQASVAWLRFGDLFGETEGFVCAIMDEVIMTKNYRRFIVKDGTVDVCRACQRPGESIRHIISGCSRLANEEYLHRHNLVARIIHQQLALKYNLVESEVPYYRYVPDPVLENGNITLYWDRSIITDRTIVANKPDIVVVDRTERRAMIVDITVPHDGNLVKAEKDKQIKYLDLAREVVDMWDVNSAIIVPIVISANGLIAKSLDQHLRRLTLDGWIKGLIQKAVLLDTARIVRRFLSLEP

SEQ ID NO: 10256 - protein, 1199 aa, Atethmia centrago
MLTRAAAARRARLPPPDSSLSSASPPPVPSPTVSAVTTPAAVVASSSSDKYFSPPTTPPPVRRRGGRRPPDGLGPRGPPASDRVPAPGGSMQRMRWTRSINENVMRSYYGATEGGNNLTAYRVRMLSLFQVLEPAVNVSAQRLSDQVRVIQRNHMLDDTVLERLRSEIQSSHVIDLPSQTVVVLPQLDTYQADEGSDDRATNVSTQCNVELRSALEDAIREYRFMSPEVRPRLPRLPMHKKNRALVAVLDSQLSNYFDDCEDLTDTHSILYCAAVAVCRVAHVIFPNDSRATRPKPTVPIWQCRIERRIGGARALIGKLICFREGNTRPRVMRFVRRAFSGTDISPQDYMSRVTERIDFLKQKVYAWANRIRRYKRRVDRYTQNRTFQSDERWVYRGWEQRDQGVTDTRLPDDDVMCSFWRSIWSVPVSHTEGDWARKVERACDPLPEMGAITICPQDVARAVRPLPNWKSPGPDGLHNFWLKWFLGSHARLAAQYQTALESGSLPQFLTIGVTHLLHKSGSTAEPKNYRPITCLPTVYKVLTSILRAKINKHIDTNSIMSASQNGCRNGSRGTKELLLIDMTISQQVRRFRKDLSTCWIDYKKAYDSVPHTWLMRVLELYKVDATLRTFLMSCMGQWRTVLRYPGCRNIQRNSEPIRIERGIFQGDSLSPLWFCLALNPLSTLLEDSGLGYRLRRGGQVISHLLYMDDLKLFASNNLQLMELLKITETFSSAIRMEFGVDKCAVMHVKRGEIVESVGTQLSDSINLRALSASETYKYLGMSEALGINVTDMKQSLKQRFFDRLKKVFNSLLSGGNKVRAFNGWVMPVLMYSFGILKWTQTELDALDRRVRTLLTAYRMHHPRSSVMRLYIPRKCGGRGFLNAKTLHNREVCSLREYFLEADVGMHRDVVAVDKGLTPLSLAKENWRKLVVLDTNDRREVWQSKELHGRFFRALHEPDVDFQASVAWLRFGDLFGETEGFVCAIMDEVIMTKNYRRFIVKDGTVDMCRACHRPGESIRHIISGCSRLANEEYLHRHNLVARIIHQQLALKYSLVESEVPYYRYVPDPVLDNGNITLYWDRSIITDRTIVANKPDIVVVDRTERRAMIVDITVPHDGNLVKAEKDKQIKYLDLAREVVDMWDVDSAIIVPIVVSANGLIAKSLDQHLRRLTLDGWIKGLIQKAVLLDTARIVRRFLSLEP

SEQ ID NO: 10257 - protein, 1198 aa, Atethmia centrago
MLTRSAAVRARLPPPDSSLSSASPPPVPSPTVCAVTTPTAAVASSSSDEYFSPPTTPPPVRRRGGRRPPDGLGSRGPPASDRVPAPGGSVKRMRWTQSVNENVMRSYYGATEGGNNLTAYRVRMLSLFQVLEPAVNVSAQRLSDQVRVIQRNHMLDDTVLDRLRSEMQRSHIIVPPSQTVVLSPQLSTNQADEGSDDRATNVSTQCNVELRSALEDAIREYRLMSPELRPRLPRLPMHKKNRALVAALDSQLSNYFYDCEDLTDTHSILYCAAVAVCRVAHVKFAKDSRTTRPKPTVPAWQCRIESRIGGARALIGKLICFREGNTRPRVMRFVRRAFSGTDIGPQDYMTRVTERIDFLKQKVYAWANRIRRYKRRVERYTQNRTFQSDERWVYRGWERPDQDVTDTRLPDDDVMCSFWRSIWSVPVSHTEGDWARKVERACDPIPEMGAITICPQDVARAVRPLPNWKSPGPDGLHNFWLKWFLRSHARLAAQYQTALESGSLPQFLTTGVTHLLHKSGSTAEPKNYRPITCLPTVYKLLTSILRAKINKHIDTNSIMSASQNGCRNGSRGTKELLLIDMTISQQVRHSRKDLSTCWIDYKKAYDSVPHTWLMRVLELYKVDATLRTFLISCMGQWRTVLRYPGCRNIQRNSEPIRIERGIFQGDSLSPLWFCLALNPLSTLLEDSGLGYRMRRGGQVISHLLYMDDLKLFASNNLQLMELLKITESFSSAIRMEFGVDKCAVMHVKRGKIVESVGTQLSDSINLRTLSASETYKYLGMSEALGINVTDMKQSLKERFFGRLKKVFNSLLSGGNKVRAFNGWVMPVLMYSFGILKWTQTELDALDRRVRTLLTAYRMHHPRSSVMRLYIPRKCGGRGFLNAKTLHNREVCSLREYFLEADVGMHRDVVAVDKGLTPLSLAKENWRKLVVLDTNDRREVWQSKELHGRFFRALHEPDVDFQASVAWLRFGDLFGETEGFVCAIMDEVIMTKNYRRFIVKDGTVDVCRACHRPGESIRHIISGCSRLANEEYLHRHNLVARIIHQQLALKYSLVESEVPYYRYVPDPVLDNGNITLYWDRSIITDRTIVANKPDIVVVDRTERRAMIVDITVPHDGNLVKAEKDKQIKYLDLAREVVDMWDVDSAIIVPIVVSANGLIAKSLDQHLKRLTLDGWIKSLIQKAVLLDTARIVRRFLSLES

SEQ ID NO: 10258 - protein, 868 aa, Atethmia centrago
MRFVRRAFSGTDIGPQDYMTRVTERIDFLKQKVYAWANRIRRYKRRVERYTQNRTFQSDERWVYRGWERPDQDVTDTRLSHDDVMCSFWRSIWSVPVSHTEGDWARKVERACDPIPEMGAITICPQDVARAVRPLPNWKSPGPDGLHNFWLKWFLRSHARLAAQYQTALESGSLPQFLTTGVTHLLHKSGSTVEPKNYRPITCLPTVYKLLTSILRAKINKHIDTNSIMSASQNGCRNGSRGTKELLLIDMTISQQVRRSRKDLSTCWIDYKKAYDSVPHTWLMRVLELYKVDATLRTFLISCMGQWRTVLRYPGCRNIQRNSEPIRIERGIFQGDSLSPLWFCLALNPLSTLLEDSGLGYRMRRGGQVISHLLYMDDLKLFASNNLQLMELLKITESFSSAIRMEFGMDKCAVMHVKRGKIVESVGTQLSDSINLRTLSASETYKYLGISEALGINVTDMKQSLKERFFGRLKKVFNSLLSGGNKVRAFNGWVMPILMYSFGILKWTQTELDALDRRVRTLLTAYRMHHPRSSVMRLYIPRKCGGRGFLNAKTLHNREVCSLREYFLEADVGMHRDVVAVDKGLTPLSLAKENWRKLVVLDTNDRREVWQSKELHGRFFRALHEPDVDFQASVAWLRFGDLFGETEGFVCAIMDEVIMTKNYRRFIVKDGTVEVCRACHRPGESIRHIISGCSRLANEEYLHRHNLVARIIHQQLALKYSLVESEVPYYRYVPDPVLDNGNITLYWDRSIITDRTIVANKPDIVVVDRTERRAMIVDITVPHDGNLVKAEKDKQIKYLDLAREVVDMWDVDSAIIVPIVVSANGLIAKSLDQHLKRLTLDGWIKGLIQKAVLLDTARIVRRFLSLEP

SEQ ID NO: 10259 - protein, 869 aa, Atethmia centrago
MRFVKRAFAGTDILSSRDYLTRVTERIDFLKQKICAWANRIRRYRRRMERYTQNRTFQNDERWVYRTWERPDQGVADTRLPDDDAICSFWQNIWSVPVNHTEGDWTKRIERACDLIPKMGALTILPQDVAHAVRPLPNWKSPGPDGLHNFWIKWFQRSHARLASQFQSALESGSLPLFLTTGITHLLHKSGSTAEPKNYRPITCLPTVYKVLTSILRAKINKHIETNLIMSASQNGCKNGSRGTKELLLIDIAISQQVRRSRKDLSTCWIDYKKAYDSVPHTWLMRVLELYKVDATLRTFLMSCMGQWRTVLCYPGCRYIQRNSEPIRIKRGIFQGDSLSPLWFCLALNPLSTLLENSGLGYRLRRGGQVISHLLYMDDLKLFAPNNLQLMELLKVTKTFSSAIRMEFGVDKCAVMHVKRGGIVESVGTQLSDSIHLRSLSSTETYKYLGMSEALGINAADMKQSLRERFFGRLNKVLNSLLSGGNKVRAFNGWVMPVLMYSFGILKWTQTELDALDRRVRTLLTANRMHHPRSSVMRLYIPRKCGGRGFLNAKTLHNREICSLRQYFLETDVVMHRDVVSVDKGLTPLSLADENWRKPIILDTNDRREVWQSKELHGRFYRVLHGLDVDLLASVSWLRFGDLFGETEGFVFAIMDEVIMTNNYRKYIVKDGTVDICRACHRPGESIRHIISGCSRLANGDYLHRHNLVAKIIHQQLALKYSLVESEVPYYRYAPDPVLENGNITLYWDRSIITDRTIVANKPDIVVIDRLTRRTMIIDIAVPHDENLLKAEKDKQIKYLDLAHEVVDMWDVDTAIIVPIVVTANGIIPKSLDQHLKRLSLGSWIKGLIQRAVLLDTARIVRRFLSQEP

SEQ ID NO: 10260 - protein, 1198 aa, Mesoligia furuncula
MLTRLAARRARLLPPDSSLSSASPPPVPSPTVSAVMTPAAAVASSSSDEYFSPPTTPPPTRRRRGRRPPDGLGLRGPPASDRVPALGGSVQRMRWTQSINENVMRSYYGATEGGNILTAYRVRMLSLFQVLEPAVNVSAQRLSDQVRVIQRNHMLDDTVLDRLRSEMQSSHVIAPQSQTAAILPQPNISHTDEGSNDRAINVSTQCNEELRRSLEDAIQEYRFMSPELRPRLPRLPMHNKNRALVAVLDSQLSKYFDTCEDLIDTHSILYCAAVAACRVAHVKFANDSRATRPKQAVPAWQCRIERRIGGARTLIGKLICFREGNTRPREMRFVRRAFSGTDISPQDYMSCVTERIDFLKQKVYAWANRIRRYRRRVERYTQNRTFQSDERWVYRGWERPDQGVAETCLPDDDAMCSFWRSIWSVPVSHTEGDRAREVERACDPIPEMGAITICPQDVARAVRPLPNWKSPGPDGLQNFWIKWFPRSHARLASQFQTALESGSLPQFLTTGITHLLHKSGSTAEPKNYRPITCLPTVYKVLTSILRTKINKHIDTNSIMSASQNGCRNGSRGTKELLLIDMAISQQVRRFRKDLSTCWIDYKKAYDSVPHTWLMRVLELYKVDTTLRTFLMSCMGQWRTVLRYPGCRNIQRNSEPIRIERGIFQGDSLSPLWFCLALNPLSTLLEDSGLGYRLRRGGQVISHLLYMDDLKLFAPNTLPLMELLKITETFSSAIRMGFGVDKCAVMHVKRGEIVESVGTQLLDSTNLRALSASETYKYLGMSEALGINVTDMKQSVKERFFGRLKKVLNSLLSGGNKVRAFNGWVMPVLMYSFGILKWTQTELDALDRRVRTLLTANRMHHPRSSVMRLYIPRKCGGRGFLNAKTLHNREICSLREYFLETDVGMHRDVVIVDKGLTPLSLAKENWRKPVVLDTNDRMEVWQSKELHGRFLRALRGPDVDLQASVAWLRFGNLFGETEGFVCAIMDEVMMTNNYRRFIVKDGTVDICRACHRPGESIRHIISGCSRLANGEYLHRHNLVARIIHQQLALKYNLVESEVPYYRYVPDPVLENGNITLYWDRSIITDRTIVANKPDIVVVDRSERRAMIVDITVPHDENLVKAEKDKQIKYLDLAREVVDMWDVDTAIIVPIVVTANGLIAKSLDQHLRRLSLGSWIKGLIQRAVLLDTARIVRRFLSLEP

SEQ ID NO: 10261 - protein, 1197 aa, Spilarctia lutea
MLTRARRRALITSPDSSLRSALPSPEEAIEVPAGAEASSSSSSDEFFSPPTSPIPVRRQGRDRPPTSLGSRGPLTSNRAPATGGDVRRMKWTHSINENVMRAYFRATELGTNLTAYRVRLVSLFQELEPAVNVSAQRLSDQVRAIQRCHLLDDAVLERIRSDVRNTLTIPSSSHTVDVVVNTPQLPDNHDVDEQRESEIISVSTQCNDRIRSALEDAIQEYRYVNYNNRPRLPRLPIHKRNLALVGALNSLLPDYFGNSEDLSDTHSILYCAAIAVCRVVGVKFIERITTRTKNTVPAWQYRIERRIAETRTLIGKLISFKSGNTRPRVMRFVKQAFLGTTISPQQYMSSVTERIDFLKQKVCAWANRIRRYKKRGDRFNQNRMFQTNEKWVYRKWEAPNPCDRDGHLPDENATNTFWRNIWSVPVTHTDGDWMRDVKRSCESITNMEPVRINKEDVSCAVRSLPNWKAPGPDGLHNFWLKWFRSSHACLASQFQAALDSGSLPQFLTTGITHLLYKSGGTMDPKNFRPITCLPTLYKLLSSILRIKITTHINHNSILSISQNGCRSGTRGTKELLIIDMTISQQVRRNRRNLATCWIDYKKAYDSVPHTWLLKVLELYKIDKTLCTFLKSCMGQWRTVLRYPGCRQSPMTDVLIKIERGIFQGDSLSPLWFCLALNPLSTLLEGSELGYGLRKDDRVISHLLYMDDLKLLAPTKLQLTALLKITENFSNSIKMEFGVDKCAVMYVKKGLIVESEGVELSDSTKLRSLSVTEGYKYLGFTQSLGIPESDMKQALRERFFGRLKKVLKSLLSGGNKVRAYNGWVMPVLMYSFGILRWTQTELDALDRGVRTLLTAFRMHHPRSSVMRLYIPRKLGGRGLLNIKTLHNREIYNLREYFLHTDVGMHRSVVAVDTGLTPLALAKENWRKPVVLSTDDRREVWKGKELHGRFYRALHGPDIDFKTSTSWLRYGDLFGETEGFVCAIMDEVIMTNNYRKYILKDGTVDICRACHRPGESIRHIISGCSRLANGEYLHRHNQVARIVHQQLALKYNLVISEVPYYRYVPDPVLENGRATLYWDRSIITDRTIVANKPDIVVIDRLERRAIIIDIAVPHDENLVKVEKEKQIKYLDLSHEIVDMWNVDSVIIVPIVVSVHGLIARSLDQHLKRLTLDGWIKGLIQKAVLLDTARIVRRFLSLEP

SEQ ID NO: 10262 - protein, 1199 aa, Spilarctia lutea
MLTRARRRAQLSPPDSSLRSALPSPEEAIEVPAGAEASSSSSSDEFFSPPTSPIPVRRQGRGRPPTSLGSQGPLTSNRAPAAGGDVRRMKWTHSINENVMRAYFRATELGTNLTAYRVRLVSLFQELEPAVNVSAQRLSDQVRAIQRCHLLDDAALERIRSDIRNSLTVPSSSHVLNVVTNSTPQVPQNDDISELVDSEIISVSTQYNDRIRSTLEDAIREYRYVNLNNRPRLSRLPIHKRNLALVGALDSLLPKYFSNSEDLSDTHSILYCAAIAVCRVAGVKFAEYTTTTRQENTLPAWQYRIERRIAEARTLIGKLMSFRSGNTRPRVMRFVKRAFLGTTISPQEYMSCVTERIDFLKQKVYAWANRIRRYRKRVDRYNQNRMFQRNEKWVYRKWENLSPCMSDGQVPDENATNSFWRNMWSVPVTHTEGDWYRDVERSCESLLPMEPISIDEEDVSCAVRSLPNWKAPGPDGLHNFWLKWFRSSHACLASQFQTALDSGSLPQFLTTGITHLLYKSGDAMDPKNFRPITCLPTLYKLLTSILRLKITTHINHNSILSISQNGCRSGTRGTKELLIIDMTISQQVRRNRKSLATCWIDYKKAFDSVPHTWLLKVLELYKIDTTLCTFLKVCMGQWRTALRYPGCRQSAMNDVLIKIERGIFQGDSLSPLWFCLALNPLSTLLEGSGLGYRLQKDDRVISHLFYMDDLKLLAPTKLQLTALLKVTENFSNSIKMEFGVDKCAVMYVKKGEIVESEGIELSDSTKLRSLSATETYKYLGFSQSLGMPESDMKQTLRERFFSRLKKVLKSLLSGGNRVRACNGWVMPVLMYSFGVLRWTQTELDAIDRRVRTLLTAFRMHHPRSSVMRLYIPRRLGGRGLLNIKTLHNREVYNLREYFLQTDVGVHRSVVTVDTGLTPLALAKENWRKPVVLSTNDRREVWKGKELHGRFYRALHGPDIDFKTSTSWLRYGDLFGETEGFVCAIMDEVIMTNNYRKYILKDGTVDICRACHRPGESIRHIISGCSRLANGEYLHRHNQVARIVHQQLALKYRLVNSEVPYYRYVPDPVLENGRATLYWDRSIITDRTIVANKPDIVVIDRLERRAIIIDIAVPHDENLVKVEKEKQIKYLDLSHEIVDMWNVDSVIIVPIVVSAHGLIAKSLDQHLKRLTLEGWIKGLIQKAVLLDTARIVRRFLSLEP

SEQ ID NO: 10263 - protein, 1047 aa, Xestia c-nigrum
MLDDTVLDRLRTEVQSSRVTATPPSQAVVPPQSTVTTPYCDGDVSSDMVTNVSTQCSEDMRSALEGAIREYRFMTPELRPRLPRLPMHNKNKMLMAVLDSQLSNYFDSCEDLTDIHSILYCAAVAACRVAHVKFSDDRATRPKPAVPAWQYRIEQRIGGARALIGKLICFREGNTRPRVMRFVRRAFSGTDISPRDYMFRVTERIDFLKQKVYAWASRIRRYKRRVDRYTQNRTFQRDERWVYRAWERPDQGVADTRLPDDDAMCSFWRSIWSVPVSHAEGEWTRVVERACDPVPEMGAITISPQDVACAVRPLPNWKSPGPDGLHNFWIKWFTRSHARLATLFQSALESGSLPEFLTTGITHLLHKSGSTAEPKNYRPITCLPTVYKVLTSILRAKITKHIDENSVMSASQNGCRNGSRGTKELLLIDMAISQQVRRSRKDLSTCWIDYKKAYDSVPHTWLRRVLELYKVDATLRTFLMSCMGQWRTVLRYPGCRQIQRNSEPIRIERGIFQGDSLSPLWFCLALNPLSTLLEDSGLGYRLRKDGRVISHLLYMDDLKLFAPNDFQLMELLKVTETFSSAIRMEFGVDKCAVMHVKRGGIVESVGTQLSDSINLRSLSATETYKYLGMSEALGISVANMKQSLKERFFGRLKKVFNSLLSGGNKVRAFNGWVMPVLMYSFGILKWTQTELDALDTKVRKLLTAYRMHHPRSSVMRLYIPRKCGGRGFLNAKTLHNREICSLREYFLAADVGMHRDVVAMDKGLTPLSLAKENWRIPVVFTTDDRRKEWQSKELHGRFYRALHGPDVDFQASVSWLRSGDLFGETEGFVCAIMDEIMMTNNYRRFIVKDGTVDICRACHRPGESIRHIISGCSRLANGEYLHRHNLVARIIHQQLALKYNLVESEVPYYRYVPDPVLVNGSITLYWDQSIITDRTVIANRPDIVVMDRSERRAMIVDITVPHDENLVKAEKDKQIKYLDLAREVVDLWEVDSAIIVPIVVSAHGLIAKSLDQHLRRLSLGSWIKGLIQKAVLLDTARIVRRFLSLEP

SEQ ID NO: 10264 - protein, 1198 aa, Xestia c-nigrum
MLTRAAARRARLPPPDPSLSSASPPPEPSPIVSAVTPAVAVASSSSDEYFSPPTTPPPARRRGGRRPPDGLGPRGPPASDRVPAPGGSVQRMRWTQSNNENVMRAYYGATEGGNNLTAYRVRMLSLFQVLEPAVNVSAQRLSDQVRVIQRNRMLDDTVLDRLRTEMHSSHVIATPPSQAVVPPQSTTITNRDDDVSSDMITNVGTQYSEDMRSALEGAIREYRFMTPELRPRLPRLPMHNKNRMLVAVLDSQLSNYFDNCEDLTDVHSILYCAAVAACRVARVKFSDDRATRPKPAVPAWQYRIEQRIGGARALIGKLICFREGNTRPRVMRFVRRAFSGTDINPRDYMSRVTERIDFLKQKVYAWASRIRRYKRRVDRYTQNRTFQRDERWVYRAWERPDQGVADTRLPDDDAMCSFWRSIWSVPVSHAEGEWTRVIERACDPVPEMGAITISPQDVACAVRPLPNWKSPGPDGLHNFWIKWFTRSHARLATLFQSALESGSLPEFLTTGITHLLHKSGSTAEPKNYRPITCLPTVYKVLTSILRTKICKHVDDNSVMSASQNGCRNGSRGTKELLLIDMAISQQVRRSRKDLSTCWIDYKKAYDSVPHTWLMRVLELYKVDATLRTFLMSCMRQWRTVLRYPGCRQIQRNSEPIRIERGIFQGDSLSPLWFCLALNPLSTLLEDSGLGYQLRKDGRVISHLLYMDDLKLLAPNDLQLMELLKVTEAFSSAIRMEFGVDKCAVMHVKRGEIVESVGTQLSDSINLRSLSATETYKYLGMSEALGINVADMKQSLKERFFGRLKKVFNSLLSGGNKVRAFNGWVMPVLMYSFGILKWTQTELDALDTKVRKLLTAFRMHHPRSSVMRLYIPRKCGGRGFLNAKTLHNREICSLRDYFLEADVGMHRDVVTMDKGLTPLSLAKENWRKPIILTTDDRRKEWQGKELHGRFYRALHGPDVDFLASVSWLRSGDLFGETEGFVCAIMDEVMMTNNYRRFIVKDGTVDICRACHRPGESIRHIISGCSRLANGEYLHRHNLVARIIHQQLALKYNLVESEVPYYRYVPDPVLVNGSITLYWDQSIITDRTVIANRPDIVVMDRSERRAMIVDITVPHDENLVKAEKDKQIKYLDLAREVVDMWEVDSAIIVPIVVSAHGLIAKSLDQHLRRLSLGSWIKGLIQKAVLLDTARLVRRFLSLEP

SEQ ID NO: 10265 - protein, 1108 aa, Xestia c-nigrum
MRWTQSNNENVMRAYYGATEGGINLTAYRVRMLSLFQVLEPAVNVSAQRLSDQVRVIQRNRMLDDTVLDRLRTEVQSSRVTATPPSQAVVPPQSTVTTPFCDGDVSSDMVINVSTQCSEDMRSALEGAIREYRFMTPELRPRLPRLPMHNKNKMLMAVLDSQLSNYFDSCEDLTDIHSILYCAAVAACRVAHGKFSDDRATRPKPAIPAWQYRIEQRIGGARALIGKLICFREGNTRPRVMRFVRRAFSGTDISPRDYMFRVTERIDFLKQKVYAWASRIRRYKRRVDRYTQNRTFQRDERWVYRAWERPDQGVADTRLPDDDAMCSFWRSIWSVPVSHAEGEWTRVVERACDPVPEMGAITISPQDVACAVRPLPNWKSPGPDGLHNFWIKWFTRSHARLATLFQSALESGSLPEFLTTGITHLLHKSGSTAEPKNYRPITCLPTVYKVLTSILRAKITKHIDENSVMSASQNGCRNGSRGTKELLLIDMAISQQVRRSRKDLSTCWIDYKKAYDSVPHTWLRRVLELYKVDATLRTFLMSCMGQWRTVLRYPGCRQIQRNSEPIRIERGIFQGDSLSPLWFCLALNPLSTLLEDSGLGYQLRKDGRVISHLLYMDDLKLFAPNDLQLMELLKVTETFSSAIRMEFGVDKCAVMHVKRGGIVESVGTQLSDSINLRSLSATETYKYLGMSEALGISVADMKQSLKERFFGRLKKVFNSLLSGGNKVRAFNGWVMPVLMYSFGILKWTQTELDALDTKVRKLLTAYRMHHPRSSVMRLYIPRKCGGRGFLNAKTLHNREICSLREYFLAADVGMHRDVVAMDKGLTPLSLAKENWRIPVVFTTDDRRKEWQSKELHGRFYRALHGPDVDFQASVSWLRSGDLFGETEGFVCAIMDEVMMTNNYRRFIVKDGTVDICRACHRPGESIRHIISGCSRLANGEYLHRHNLVARIIHQQLALKYNLVESEVPYYRYVPDPVLNSGSITLYWDQSIITDRTVIANRPDIVVMDRSERRAMIVDITVPHDENLVKAEKDKQIKYLDLAREVVDMWEVDSAIIVPIVVSAHGLIAKSLDQHLRRLSLGSWIKGLIQKAVLLDTARIVRRFLSLEP

SEQ ID NO: 10266 - protein, 868 aa, Griposia aprilina
MRFVRRAFAGTNISPQDYMSCVTERIDFLKQKVYAWANRNRRYKRRVERYTQNRTFQRDERWVYRGWERPDQGVADTCLPDDDAMCSFWRNIWSVPVSHTEGDWTREVERACDPIPEMGAITICPQDVTRAVRPLPNWKSPGPDGLHNFWIKWFGRSHARLAAQYQVALESGSLPQFLTTGVTHLLYKSGSTAEPKNYRPIACLPTVYKVLTSILRDKINKHIDTNYIMSPSQNGCRNGSRGTKELLLIDMAISQQVRRSRKDLSTCWIDYKKAYDSVPHTWLMRVLELYKVEATLRTFLMSCMGQWRTVLHYPACRNTQRNSESIRIERGIFQGDSLSPLWFCLALNPLSTLLEDSGLGYRLRRGGQVISHLLYMDDLKLFAPNNSQLMDLLKVTETFSSAIRMEFGVDKCAVMHVKRAEIVESVGTQLSDSINLRALSASETYKYLGMSEALGINGTDMKQSLKDRFFGRLKKVFNSLLSGGNKVRAFNGWVMPVLMYSFGILKWTQTEVDALDRKVRTLLTANRMHHPRSSVMRLYIPRKCGGRGFLNAKTLHNREICSLREYFLEADVGMHRDVVTVDKGLTPLSLAKENWRKPVVLDTNDRMEVWQSKELHGRFFRALHGPDVDQLASVAWLRFGDLFGETEGFVCAIMDEVMMTNNYRRFIVKDGTVDICRACHRPGESIRHIISGCSRLANEEYLHRHNLVARIIHQQLALKYSLVESEVPYYRYVPDPVLENGHITLYWDRSIITDRTIVANKPDIVMVDRLERRAMIVDITVPHDGNLVKAEKDKQIKYLDLAREVVDMWDVDSAIIVPIVVTANGLIAKSLDQHLRRLSLGSWIKGLIQKAVLLDTARIVRRFLSLEP

SEQ ID NO: 10267 - protein, 1045 aa, Griposia aprilina
MLDDTVLDRLRNEMQSSHVIAPPSQTVVVLPQSNTSQADEESDDRATNVSTQCNDELRSALEDAIREYRFISPELRPRLPRLPMHNKNRVLVAALDAQLSNYFDDCVDLTDTHSILYCAAVAACRVAHVKFANDSRATRPKPAVPAWQCRIERRIGEARALIGKLICFREGNTRPRVMRFVRRALAGTNISPQDYMSCVTERIDFLKQKVYAWANRIRRYKRRVERYTQNRTFQRDERWVYRGWERPDQGVADTCLPDDDAMCSFWRNIWSVPVSHTEGDWTREVERACDPIPEMGAITICPQDVTRAVRPLPNWKSPGPDGLHNFWIKWFGRSHARLAAQYQVALESGSLPQFLTTGVTHLLHKSGSTAEPKNYRPIACLPTVYKVLTSILRDKINKNIDTNYIMSPSQNGCRNGSRGTKELLLIDMAISQQVRRSRKDLSTCWIDYKKAYDSVPHTWLMRVLELYKVEATLRTFLMSCMGQWRTVLHYPACRNTQRNSEPIRIERGIFQGDSLSPLWFCLALNPLSTLLEDSGLGYQLRRGGQVISHLLYMDDLKLFAPNNSQLMDLLKVTETFSSAIRMEFGVDKCAVMHVKRGEIVESVGTQLSDSINLRALSSSETYKYLGMSEALGINGTDMKQSLKDRFFGRLKKVFNSLLSGGNKVRAFNGWVMPVLMYSFGILKWTQTELDALDRKVRTLLTANRMHHPRSSVMRLYIPRKCGGRGFLNAKTLHNREICSLREYFLEADVGMHRDVVTVDKGLTPLSLAKENWRKPVVLDTNDRMEVWQSKELHGRFFRALHGPDVDLLASVAWLRFGDLFGETEGFVCAIMDEVMMTNNYRRFIVKDGTVDICRACHRPGESIRHIISGCSRLANEEYLHRHNLVARIIHQQLALKYSLVESEVPYYRYVPDPVLENGHITLYWDRSIITDRTIVANKPDIVMVDRLERRAMIVDITVPHDGNLVKAEKDKQIKYLDLAREVVDMWDVDSAIIVPIVVTANGLIAKSLDQHLRRLSLGSWIKGLIQKAVLLDTARIVRRFLSLEP

SEQ ID NO: 10268 - protein, 1198 aa, Griposia aprilina
MLTRSAARQARPPPPDSSLSSASLPPVSSPTVSAVTTPAAVVASSSSDEYFSPPTTPPPARRRGGHRPPDGLGPRGPPASDRVPAPGGSVQRMRWTRSINENVMRSYYGATEGGNNLTAYRVRMLSLFQVLEPAVNVTAQRLSDQVRVIQRNHMLDDTVLDRLRNEMQSSHVIAPPSQTVVVLPQSKTSQADEESDDRATNVSTQCNDELRSALEDAIREYRFISPELRPRLPRLPMHSKNRALVVALDAQLSHYFDDCVDLTNTHSILYCAAVAACRVAHVKFANDSRATRPRPAVPAWQCRIERRIGGARALIGKLICFREGNTCPRVMRFVRRAFAGTDISPQDYMSCVTERIDFLKQKVYAWANRIRRYKRRVERYTQNRTFQRDERWVYRGWERPDQGVADTCLPDDDAMCSFWRNIWSVPVSHTEGDWTREVERACDPIPEMGAITIYPQDVTRAVRPLPSWKSPGPDGLHNFWIKWFGRSHARLAAQYQVALESGSLPQFLTTGVTHLLHKSGSTAEPKNYRPIACLPTVYKVLTSILRDKINKHIDTNYIMSPSQNGCRNGSRGTKELLLIDMAISQQVRRSRKDLSTCWIDYKKAYDSVPHTWLMRVLELYKVETTLRTFLMSCMGQWRTVLRYPACRNTQRNSEPIRIERGIFQGDSLSPLWFCLALNPLSTLLEDSGLGYWLRRGGQVISHLLYMDDLKLFAPNNSQLMDLLKVTETFSSAIRMEFGVDKCAVMHVKRGEIVESVGTQLSDSINLRALSASETYKYLGMSEALGINGTDMKQSLKDRFFGRLKKVFNSLLSGGNKVRAFNGWVMPVLMYSFGILKWTQTELDALDRKVRTLLTANRMHHPQSSVMRLYIPRKCGGRGFLNAKTLHNREICSLREYFLEADVGMHRDVVTVDKGLTPLSLAKENWRKPVVLDTNDRMEVWQSKELHGRFFRALHGPDVDQLASVAWLRFGDLFGETEGFVCAIMDEVMMTNNYRRFIVKDGTVDICRACHRSGESIRHIISGCSRLANEEYLHRHNLVARIIHQQLALKYSLVESEVPYYRYVPDPVLENGHITLCWDRSIITDRTIVANKPDIVMVDRLVRRAMIVDITVPHDGNLVKAKKDKQIKYLDLAREVVDMWDVDSAIIVPIVVTANGLIAKSLDQHLRRLSLGSWIKGLIQKAVLLDTARIVRRFLSLEP

SEQ ID NO: 10269 - protein, 1196 aa, Griposia aprilina
MLTRSRRARPPPPDSSLSSASLPPVSSPTVSAVTTPAAVVASSSSDEYFSPPTTPPPARRRGGHRPPDGLGPRGPPASDRVPAPGGSVQRMRWTRSINENVMRSYYRATEGGSNLTAYRVRMLSLFQVLEPAVNVSAQRLSDQVRVIQRNHMLHDTVLDRLRNEMQSSHVIAPPSQTVIVLPQCNTTQADEESDDRATNVSTQCNEELRSALEDAIREYRFISPELRPRLPRLPMHNKNRVLVAALDAQLSNYFDYCVDLTDTHSILYCAAVAVCRVAHVKFANDSRATRPKPAVPAWQCRIERRIGGARALIGKLICFREGNTRPRVMRFVRRAFAGTNISPQDYMSYVTERIDFLKQKVYAWANRIRRYKRRVERYTQNRTFQRDERWVYRGWERPDQGVADTCLPADDAMCSFWRNIWSVPVSHTEGDWAREVERACDPIPEMGAISICPQDVTRAVRPLPNWKSPGPDGLHNFWIKWFGRSHARLAAQYQVALESGSLPQFLTTGVTHLLHKSGSTAEPKNYRPITCLPTVYKVLTSILRAKINKHIDTNYIMSPSQNGCRNGSRGTKELLLIDMAISQQVRRSRKDLSTCWIDYKKAYDSVPHTWLVKVLELYKVDATLRTFLKSCMGQWRTVLHYPGCRNIQRDNEPIRIERGIFQGDSLSPLWFCLALNPLSTLLEDSGLGYRLRRGGQVISHLLYMDDLKLFAPNNLQLMELLKVTETFSSAIRMEFGVDKCAVMHVKRGEIVESVRTQLSDSINLRALSASETFKYLGMSEALGINGTDMKQSLKERFFGRLKKVFNSLLSGGNKVRAFNGWVMPVLMYSFGILKWTQTELDALDRKVRTLLTANRMHHPRSSVMRLYIPRKCGGRGFLNAKTLHNREICSLREYFLEADVGMHRDVVTVDKGLTPLSLAKENWRKPVVLDTNDRMEVWQSKELHGRFFRALHGPDVDQLASVAWLRFGDLFGETEGFVCAIMDEVILTNNYRRHIMRDGTVDVCRACHRPGESIRHIISGCSRLANEEYLHRHNLVARIIHQQLALKYSLVESEVPYYRYVPDPVLENGHITLYWDRSIITDRTIVANKPDIVVVDRLERRAMIVDITVPHDGNLVKAEKDKQIKYLDLAREVVDMWDVDSAIIVPIVVTANGLIAKSLDQHLRRLSLGSWIKGLIQKAVLLDTARIVRRFLSLEP

SEQ ID NO: 10270 - protein, 1199 aa, Griposia aprilina
MMLTRSAKRRAHPPPPDSSLSSASPPPVSSPTVSAVTTPAAVVASSSSDEYFSPPTTPPPVRRRGGHRPPDGLGSRGPPASDRVPAPGGSVQRMRWTRSINENVMRSYYGATEGGNNLTAYRVRMLSLFQVLEPAVNVSAQRLSDQVRVIQRNHMLDDTVLDRLRNEMQSSHVIAPPSQTVVVLPQSNTSQADEESDDRATNVSTQCNDELRSALEDAIREYRFISPELRPRLPRLPMHNKNRVLVAALDAQLSNYFDDCVDLTDTHSILYCAAVAACRVAHIKFANDSRPTRPKPAVPAWQCRIERRIGGARALIGKLICFREGNTRPRVMRFVRRAFAGTNINPQDYMSCVTERIDFLKQKVYAWANRICRYKRRVERYTQNRTFQREEKWVYRGWERPDQGVADTCLPDDDAMCSFWRNIWSVPVSHTEGDWGREVERACDPIPEMGAISICPQDVTRAVRPLPNWKSPGPDGLQNFWIKWFGRSHTRLAAQYQVAIESGSLPQFLTTGVTHLLHKSGSTAEPKNYRPITCLPTVYKVLTSILRAKINKHIDTNSIMSPSQNGCRNGSRGTKELLLIDMAISQQVRRSRKDLSTCWIDYKKAYDSVPHTWLVRVLELYKVDATLRTFLKSCMGQWRTILHYPGCRNIQRDNEPIRIERGIFQGDSLSPLWFCLALNPLSTLLEDSGLGYRLRRGGQVISHLLYMDDLKLFAPNNLQLMELLKVTETFSSAIRMEFGVDKCAVMHVKRGEIVESVGTQLSYSINLRALSASDTYKYLGMSEALGINGTDMKQSLKERFFGRLKKVFNSLLSGGNKVRAFNGWVMPVLMYSFGILKWTQTELDALDRKVRTLLTANRMHHPRSSVMRLYIPRKCGGRGFLNAKTLHNREICSLREYFLEADVGMHTDVVKVDKGLTPLSLAKENWRKPVVLDTNDRMEVWQSKELHGRFFRTLHGPDVDQLASVAWLRFGDLFGETEGFVCAIMDEVILTNNYRRHIMKDGTVDVCRACHRPGESIRHIISGCSRLANEEYLHRHNLVARIIHQQLALKYSLVESEVPYYRYVPDPVLENGHITLYWDRSIITDRTIVANKPDIVVVDRLERRAMIVDITVPHDGNLVKAEKDKQIKYLDLAREVVDMWDVDSAIIVPIVVTANGLIAKSLDQHLRRLSLGSWIKGLIQKAVLLDTARIVRRFLSLEP

SEQ ID NO: 10271 - protein, 1112 aa, Griposia aprilina
MRWTQSINENVMRAYYGATEGGINLTAYRSRMLSLFQVLEPAVNVSAQRLSDQVRVIRHNHRLDDATLDRLRLEMQSSSASNPSPPQNLVHAPTVVPLRTNQQDEEEDTRAISADNLCNVELRSILEDAIREYRFTSSDLRPRLPRLPMNKKNRALVCALDALLPNLIENSADLCDTHSILYCTAVAACRIARVKFPNTDRTAQLKPAAPAWQCRIERRINEARVLIGKLTCFREGNTRPRVMRFVRQAFSGTNISPREYISCVTERIDFLKQKVYAWANRIRRYRRRVDRYTQNRMFQKDERWVYRAWERPIPTQGVTDVLPPDNDTVSAFWRSIWSVPVSHTEGDWMRVVEQACDSIPEMEAISISPLDVARAVRPLPNWKSPGPDGLHNFWIKWLQRSHACLASQFQSSLETGSLPLFFTTGVTHLLHKSGSTAEPKNYRPITCLPTVYKVLTSILRAKIAEHIKNNSIMSVSQNGCKNGSRGTKELLLIDMAISQQVRRSRKDLSTCWIDYKKAYDSVPHTWLIRVLELYKIDATLRTFLISCMGQWRTILLYPGCQQIQRTDEPIRIERGIFQGDSLSPLWFCLALNPLSTLLEDSGLGYRLRRGGQVISHLLYMDDLKLFAPNNLRLMELLKVTETFSSAIRMEFGVDKCAVMHVKRGGIMESVGTQLSDSIHLRSLSSTETYKYLGMSEALGINAADMKQSLRERFFGRLNKVLNSLLSGGNKVRAFNGWVMPVLMYTFGILKWTQTELDAVDRKVRTLLTAYRMHHPRSSVMRLYIPRKCGGRGFLNAKTLHNREICSLREYFLQTDVGMHRDVVAVDKGLTPLSLAKENWRKPAILDTNDRKEVWQGKELHGRFFRALHGPDVDFLASVSWLRFGDLFGETEGFVCAIMDEVIMTNNYRKYIVKDGTVDICRACHRPGESIRHIVSGCSRLANGEYLHRHNLVARIIHQQLALQYNLVESEVPYYRYVPDPVLENGHTTLYWDRSIITDRTIVANKPDIVVIDRRERRAMIVDIAVPHDENLVKAEKDKKIKYLDLAHEVVDMWGVDSAIIVPIIVSVNGLIAESLDQHLRRLSLRSWVKSLIQRAVLLDTARIVRRFLSLDP

SEQ ID NO: 10272 - protein, 1198 aa, Griposia aprilina
MLTRSAKRRARPPPPDSSLSSASPPPVSSPIVSAVTTPAAVVASSSSDEYFSPPTTPPPARRRGGHRPPDGLEPRGPPASDRVPAPGGSVQRMRWTRSINENVMRSNYGATEGGNNLTAYRVRMLSLFQVLEPAVNVTAQRLSDQVRVIQRNHMLDDTVLDRLRNEMQSSHVIAPPSQTVIVLPQYNTTQADEESDDRATNVSTQCNEELRSALEDAIREYRFISPELRPRLPRLPMHNKNRALVAALDTQLSNYFDDCVDLTDTHSSLYCAAVAACRVAHVKFANDSRATRPKPVVPAWQCRIERRIGGARALIGKLICFREGNTRPRVMRFVRRAFAGTDISPQDYMSCVTERIDFLKQKVYAWANRIRRYKRRVERYTQNRTFQRDERWVYRGWERPDQGVADTYLPDDDAMCSFWRNIWSVPVSHSEGDWTREVERACEPLPEMGAITICPQDVTRAVRPLPNWKSPGPDGLHNFWIKWFLRSHARLAAQFQVALESGLLPQFLTTGVTHLLHKSGSTAEPKNYRPITCLPTVYKVLTSILRAKINNHIDTNSIMSPSQNGCRNGSRGTKELLLIDMTISQQVRRSRKDLSTCWIDYKKAYDSVPHTWLMRVLELYKVDSTLRTFLKSCMGQWRTVLHYPGCRNVQRNSEPIRIERGIFQGDSLSPLWFCLALNPLSTLLENSGLGYRLRRGGQVISHLLYMDDLKLFAPNNLQLMELLKVTETFSSAIRMEFGVDKCAVMHVKRGEIVESVGTQLSDSINLRALSASETYKYLGISEALGINGTDMKQSLKERFFGRLKKVFNSLLSGGNKVRAFNGWVMPVLMYSFGILKWTQTELDALDKKVRSLLTANRMHHPRSSVMRLYIPRKCGGRGFLNAKTLHNREICSLREYFLEADVGMHRDVVTVDKGLTPLSLAKENWRKPVVLDTNDRMEVWQSKELHGRFFRALHGPDVDQLASVAWLRFGDLFGETEGFVCAIMDEVMMTKNYRRFIVKDGTVDICRACHRPGESIRHIISGCSRLANEEYLHRHNLVARIIHQQLALKYSLVESEVPYYRYVPDPVLENGHITLYWDRSIITDRTIVANKPDIVVVDRIERRAVIVDITIPHDGNLVKAEKDKQIKYLDLAREVVDMWDVDSAIIVPIVVTANGLIAKSLDQHLRRLSLGSWIKGLIQKAVLLDTARIVRRFLSLEP

SEQ ID NO: 10273 - protein, 1197 aa, Griposia aprilina
MLTRSAALRARLPTPDSSLSSASPPPVSSPIVSAVTTPAAVVASSSSDEYFSPPTTPPPARRRGGHRPPDGLGPRGPPASDRVPAPGGSVQRMRWTQSINENVMRSYYGATEGGNNLTAYRVRMLSLFQVLEPAVNVSAQRLSDQVRVIQRNHMLDDTVLDRLRSEMQSSHVITPPSQTVVLLPQPITSHDEGSDDRATNVSTQCNEELRSALEGAIREYRFMSPELRPRLPRLPMHNKNRALVAALDSQLSNYFDDCVDLTDTHSILYCAAVAACLVAHVKFANDSRATRPKPAVPAWQCRIERRIGGARALIGKLICFREGNTRPRVMRFVRRAFAGTDVSPQDYISCVTERIDFLKQKVYAWASRIRRYKRRVERYTQNRTFQRDERWVYRDWERPDQGVADTYLPDDDAMCSFWHNIWSVPVSHTEGDWTREVERACEPIPEMGAITICPQDVARAVRPLPNWKSPGPDGLHNFWIKWFLRSHARLAAQFQAALESGSLPQFLTTGVTHLLHKSGSIAEPKNYRPITCLPTVYKVLTSILRAKINKHIDTNSIMSASQNGCRNGSRGTKELLLIDMAISQQVRRSRKDLSTCWIDYKKAYDSVPHTWLMRVLELYKVDATLRTFLKSCMRQWRTVLRYPTCRNTQRNSEPIRIERGIFQGDSLSPLWFCLALNPLSTLLEDSGLGYRLRRGGRVISHLLYMDDLKLFAPNNLQLIELLKVTETFSSAIRMEFGLDKCAVMHVKRGEIVESVGTQLSDSMNLRALSASETYKYLGMSEALGVNNTDMKQSLKERFFGRLKKVFNSLLSGGNKVRAFNGWVMPVLMYSFGILKWTQTELDTLDRRVRTLLTANRMHHPRSSVMRLYIPRKCGGRGFLNAKTLHNREICSLREYFLEADVGMHRDVVAVDKGLTPLSLAKENWRKPVVLDTNDRMEVWQSKELHGRFFRALHGPDVDVQASVAWLRFGDLFGETEGFVCAIMDEVMMTNNYRRFIVKDGTVDICRACHRPGESIRHIISGCSRLANEEYLHRHNLVARIIHQQLALKYSFVESEVPYYRYVPDPVLENGTITLYWDRSIITDRTIIANKPDIVLVDRRERRAMIVDITIPHDGNLVKAEKDKQIKYLDLAREVVDMWDVDSAIIVPIVVTANGLIAKSLDQHLRRLSLGSWIKGLIQKAVLLDTARIVRRFLSLEP

SEQ ID NO: 10274 - protein, 1198 aa, Omphaloscelis lunosa
MLTRSAARRARLPPPDSPLSSASSPPVLSPTVNAVMTPAAAVASSSSDEYFSPPTTPPPARRRGRRRPPDGLGPRGPPASDRVPAPGGSVQRMRWTRSINENVMRSYYGATEGGNNLTAYRVRMLSLFQVLEPAVNVSAQRLSDQVRVIQRNHMLDDTVLDRLRSEMQSSHVIAPPVRSVIVPSQIITSQADERIDDRATNVSTQCNEELRSALEGAIHEYRFMSPELRPRLPRLPMHNKNKALVAALDSQLSNYFDDCEDLTDTHSILYCAAVAVCRVAHVKFSNDSRATRPKPAVPAWQCRIERRIDGARTLIGKLICFREGNTRPRVMRFVRRAFLGTDISPQDYMTRVTERIDFLKQKVYAWANRIRRYKRRVERYTQNRTFQSDERWVYRAWERPNQGVTDTHLPDEDAMCSFWRSIWSVPVSHTEGDWTREVERACDSIPEMGAITICPQDVARAVRPLPNWKSPGPDGLHNFWIKWFVRSHARLAAQYQTALESGSLPQFLTTGVTHLLHKSGSTAEPKNYRPITCLPTVYKVLTSVLRAKINKHIDTNSIMSASQNGCRNGSRGTKELLLIDMAISQQVRRSRKDLSTCWIDYKKAYDSVPHTWLMRVLELYKVDITLRTFLMSCMGQWRTVLRYPGCRNIQRNSEPIRIERGIFQGDSLSPLWFCLALNPLSTLLEDSGLGYRLRRGGQVISHLLYMDDLKLFAPNNLQLMELLKVTETFSSAIRMEFGVDKCAVMHVKRGKIMESVGTQLSDSINLRALSASETYKYLGMSEALGINVTDMKQSLKERFFGRLKKVLNSLLSGGNKVRAFNGWVMPVLMYSFGILKWSQTELDALDRRVRTLLTAYRMHHPRSSVMRLYIPRKCGGRGFLNAKTLHNREICSLREYFLEADVGMHRDVVVVDKGLTPLSLAKENWRKPVVLDTKNRMEIWQSKELHGRYFRALHGPDVDLPASVAWLRYGDLFGETEGFVCAIMDEVMMTNNYRRFIVKDGTVDICRACHRPGESIRHIISGCSRLANEEYLHRHNLVARIIHQQLALKYSLVESEVPYYRYVPDPVLENGNITLYWDRSIITDRTIVANKPDIVVVDRGERSAMIIDITVPHDENLVKAEKDKQIKYLDLAREVVDMWDVDSAIIVPIVVTANGLIAKSLDQHLRRLSLGSWIKGLVQKAVLLDTARIVRRFLSLEP

SEQ ID NO: 10275 - protein, 1205 aa, Omphaloscelis lunosa
MLTRSRARKLIDTHPTSSGSSLSSASQLPDPAPDVSPVIPVAAVASSSSDEYFSPPTTPPPTRQRGRGRPPASLGLRGPPASDRVPAPGGSVQRMRWTQTVNENVMRAYFGATEGGSNLTAYRGRMLSLFQVLEPAVNVSAQRLSDQVRVIQRNHMLDDVVLDRLRLESRNNHVTPASPLVTVQLQNLPSSSPRSDRVGEEDDDGVISVSSQCNVRLRSALEDAFREYRSIPPGLRPQLPRLPMHKKNKALMCTLDSLLSNCFDGSKDLADTHSILYCAAVAACRVAHVKFPNSDRAPRPKPAVPAWQCRIERRIGEARVLIGKLICFREGNTRPRVMRFVKRAFSGTDISFQDYLTRVTERIDFLKQKVYAWANRIRRYRRRVERYTQNRTFQSDERWVYRAWERPDQGVADTHLPDDDAMCSFWRSIWSVPVSHTEGDWTREVERACDPIPEMGAITICPQDVARAVRPLPNWKSPGPDGLHNFWIKWFQRSHARLASQFQSALESGSLPQFLTTGITHLLHKSGSTAEPKNYRPITCLPTVYKVFTSILRTKINKHIDTNSIMSASQNGCRNGSRGTKELLLIDMAINQQVRRSRRDLSTCWIDYKKAYDSVPHTWLMRVLELYKVNATLRTFLMSCMGQWRTVLRYPGCRQILRNSEPIRIERGIFQGDSLSPLWFCLALNPLSTLLEDSGLGYRLRRGGQVISHLLYMDDLKLFAPNNLQLLELLKVTETFSSAIRMEFGVDKCAVMHVKRGEIVESVGTQLSDSIQLRSLSSIETYKYLGMSEALGVNAADMKQSLKERFFNRLNKVLNSLLSGGNKVRAFNGWVMPVLMYSFGILKWTQTELDALDRRVRTLLTANRMHHPRSSVMRLYIPRKCGGRGFLNAKTLHNREVCSLREYFLEADVGMHRDVVTVDKGLTPLSLANENWRKPIVLDTNDRREVWQSKELHGRFYRALHGPDVDLLASVSWLRFGDLFGETEGFVFAIMDEVMMTNNYRKYIVKDGTVDICRACHRPGESIRHIISGCSRLANGDYLHRHNLVARIIHQQLALKYSLVESEVPYYRYVPDPVLENGNITLYWDRSIITDRTIVANKPDIVVIDRLERRTMIIDIAVPHDENLVKAEKDKQIKYLDLAREVVDMWDVDTAIIVPIVVTANGIIAKSLDQHLKRLSLGSWIKGLIQKAVLLDTARIVRRFLSQEP

SEQ ID NO: 10276 - protein, 1209 aa, Omphaloscelis lunosa
MKTRRMLTRSATRRAHPPPPDSSLSSASPPSVPNPTVNVVTTPAAAVASSSSDEYFSPPTSPTPVRRQGRGRPPAGLGPRGQQAPNRVPAAGGNVSRIRWTQSMNENVMRAYYGATEGGINLTAYRSRMLNLFQVLEPAVNVSAQRLSDQVRVIQHNHRLDYATLDRLRLEMQNSFASNPPPSQNVVQAPAAVPLQANQYEEEEDGRAISADNLCNVELRSALEDAIREYRFTSPDLRPRLPRLPMNKRNRALVCALDALLPNFIESSANLCDTHSILYCTAVAACRIARVKFPNTDRSVRPKPVVPAWQCRIECRINEARVLIGKLICFREGNTRPRVMRFVRRAFSGTSFSPREYVSHVTERIDFLKQKVYAWANRIRRYKRRVDRYTQNRMFQNDERWVYRTWERPTPNQGVTDTRLPDSDAMKAFWRSIWSVPVSHTEGEWMRVVEQACDPLPHMEAISITPLDVARAVRPLPNWKSPGPDGLHNFWLKWLQRSHTCLATQFQSSLDTGSLPMFFTTGVTHLLHKSGSTAEPKNYRPITCLPTIYKVLTSILRAKISHHINNNLIMSVSQNGCKNGSRGTKELLLIDMTISQQVRKSRKDLSTCWIDYKKAYDSVPHTWLMRVLELYKIDATLRTFLMSCMRQWRTVLLYPGCRQIRGIDEPIRIERGIFQGDSLSPLWFCLALNPLSTLLEDSGLGYRLRRGGQVISHLLYMDDLKLFAPNNLRLMELLKITETFSSAIRMEFGVDKCAVMHVKRGEIMESVGTQLSDSIHLRSLSSTETYKYLGMSEALGINVTDMKQSLKERFLGRLNKVLNSPLSGGNKVRAFNGWVMPVLMYSFGILKWTQTELDALDRKVRTLLTANRMHHPRSSVMRLYIPRKCGGRGFLNAKTLHNREIYSLREYFLQTNVGMHRDVVAVDKGLTPLSLAKENWRKPAVLDTNDRKEIWQGKELHGRFFRALHGPDVDFLTSVSWLRFGDLFGETEGFVCAIMDEVIMTNNYRKYIVKDGTVDICRACHHPGESIRHIVSGCSCLANGEYLHRHNLVARIIHQQLALQYNLVESEVPYYRYVPDPVLENGHTTLYWDRSIITDRTIVANKPDIVVIDRRERRAMIVDIAVPHDENLVKAEKDKKIKYLDLAHEVVDMWDVDSAIIVPIIVTVNGLIAKSLDQHLRRLSLRGWIKGLIQKAVLLDTARIVRRFLSLEP

SEQ ID NO: 10277 - protein, 1204 aa, Busseola fusca
MLTRSAAARRARSPSPDSSLSSASSPPVSSPTVSAVTTPAAAAASSSSDEYFSPPTSPTPVRRQGRGRPPKSLEPRGPPASDRVPATGGSVQRMRWTKNVNENVMRAYFGATEGGSNLTAYRGRMLSLFQVLEPAVNVSAQRLSDQVRVIQRNRMLDDAVLDRLRLESRNSHITPASSLVAVQLNNQPNVSPRPIHVDEDDDDRAISVSSQCNIKLGSALEDAFCEYRSIPPELRPSLPRLPMHKKNKALVCALDSHLSKYFKDSKDLTDTHSILYCAAVAVCRVAQVKFQNSDRATRPKSAVPAWQCRIERRIGETRALIGKLICFREGNTRPRVMRFVRRAFSGTDVSSRDYLSRVTERIDFLKQKIYAWANRIRRYKRRVERYTQNRKFQSDERRVYRAWERPNQGVIDTHLPDDDTMYSFWKNIWSVPANHTEGDWTGKIEQACELIPEMGALIISPQDIARAVRPLPNWKSPGPDGLHNFWIKWFQSSHAPLASQFQSALGSGSLPQFLTTGITHLLHKSGSTADPKNYRPITCLPTVYKVLTSILRAKIDKHIDTNSIMSVSQNGCRNGSRGTKELLLIDITISQQVRRSRKDLSTCWIDYKKAYDSVPHTWLMRVLELYKVDTTLRTFLMSCMGQWRTVLRYPGCRNIQRNSEPIRIERGIFQGDSLSPLWFCLALNPLSTLLEDSGLGYRMRRGSQVISHLLYMDDLKLFAPNNLQLMELLKITETFSSAIRMEFGVDKCAVMHVKRGEIVESVGTQLSDSTNLRALSTSETYKYLGMSEALGINVTDMKQSLKDRFFGRLKKVLNSLLSGGNKVRAFNGWVMPVLMYSFGILKWTQTELDALDRRVRTLLTANRMHHPRSSVMRLYIPRKCGGRGFLNAKNLHNREICSLREYFLKADVGMHRDVVAVDKGLTPLSLGKENWRKPVVLDTNDRMVVWQSKELHGRFFRALHGPDIDLLASVAWLRFGDLFGETEGFVCAIMDEVMMTNNYRRFIVKDGTVDICRACHRPGESIRHVISGCSRLANGEYLHRHNLVARIIHQQLALKYNLVESEVPYYRYVPDPVLENGNITLYWDRSIITDRTIVANKPDIVLVDRSERRAMIADISVPHDENLVKAEKDKQIKYLDLAREVVDMWDVDSAIIVPIVVTANGLIAKSLDQHLRRLSLGSWIKGLIQKAVLLDTARIVRRFLSLEP

SEQ ID NO: 10278 - protein, 1197 aa, Sesamia nonagrioides
MLTRSAARRARPPSPDSLLSSASPPPVSSPTVSAVTTPAATVASSSSDEYFSPPTTPPPVRRRGGRRPPDCLGPRGPSASDRVPAPGGSVQRMRWTQSINENVMRSYYGATEGGTNLTAYRVRMLSLFQVLEPAVNVSAQRLSDQVRVIQRNHMLDDTVLDRLRNEMQSSRVITHQSQSAEIPPRPTNYADEGSNDRATNVSTQCNEELRNALEAAIREYRSISAELRPRLPRLPMHNRNRALMAALDAQLSNYFDTCEDLTDTHSILYCAAVAACRVAHVKFPSDSRATRPKPVVPAWQRRIERRIGGARALIGKLICFREGNTRPRVMRFVRRAFSGTNTSPQNYMARVTERIDFLKQKVYAWANRIRRYKRRVERYTQNRTFQSNERRVYRDWERSEQGVTDTCLPDDDAMCSFWRSIWSVPVSHTEGDWARDVERACDPIPEMGAITICPQDVAHAVRPLPNWKSPGPDGLHNFWIKWFPRSHARLASQFQTALVSGSLPQFLTTGITHLLHKSGSTAEPKNYRPITCLPTVYKVLTSILKTKINKHIDSNSILSASQNGCRSGSRGTKELLLIDMAISQQVRRSRKDLSTCWIDYKKAYDSVPHTWLMRVLELYKVDATLRTFLMTCMRTWRTVLRYPGCRNIQRNSESIRIERGIFQGDSLSPLWFCLALNPLSTLLEDSGLGYRLRRGGQVISHLLYMDDLKLFAPNNSQLNELLKITEIFSSSIRMEFGVDKCAVMHVKRGEIMEPVGTQLTSSINLRALSASETYKYLGMSEALGINVTDMKQSLKERFFGRLKKVLNSLLSGGNKVRAFNGWVMPVLMYSFGILKWTQTELDALDQRVRTLLTANRLHHPRSSVMRLYIPRKCGGRGFLNAKTLHNREICSLRDYFLETDVGMQRDVVAADKGLTPLSLANENWRKPVVLDTNDRMEVWKSKELHGRFFRALHGPDVDFQASVAWLRFGDLFGETEGFVFAIMDEVMMTNNYRRFIVKDGTVDICRACHRPGESIRHIISGCSRLANGEYLHRHNLVARIIHQQLALKYKLVESEVPYYRYMPDPVLENGHITLYWDRSIITDRTIIANKPDIVLVDRSERRAMIVDITIPHDENLVKAEKDKQTKYLDLAHEVVDMWEVDSAIIVPIVVTANGLIAKSLDQHLRRLSLDSWIKGLIQKAVLLDTARIVRKFLSLEP

SEQ ID NO: 10279 - protein, 1197 aa, Sesamia nonagrioides
MLTRSAARRARPPSPDSLLSSASPPPASSATVSAVTTPAAAVASSSSDEYFSPPTTPPPARRRGGRRPPDRLGPRGPSASDRVPAPGGSVQRMRWTQSINENVMRSYYGATEGGNNLTAYRVRMLSLFQVLEPAVNVSAQRLSDQVRVIQRNHMLDDTVLDRLRNEMQSSRIIAHQSQTAEIPPQPTNYADEGSNDRATNVSTQCNEELINALENAIREYRFTPAELRPRLPRLPMHNRNRALMAALDAQLSDYFDTCEDLTDTHSILYCAAVAACRVAHVKFPSDSRATRPKPVVPAWQHRIERRIGGARALIGKLICFREGNTRPRVMRFVRRAFAGTNISPQNYMARVTERIDFLKQKVYAWANRIRRYKRRVERYTQNRTFQSNERWVYRDWERPEQGVTDTCLPDDDAMCSFWRNIWSVPVSHTEGDWARDVERACDPIPEMGAITICPQDVACAVRPLPNWKSPGPDGLHNFWIKWFPRSHARLASQFQTALVSGSLPQFLTTGITHLLHKSGSTAEPKNYRPITCLPTVYKVLTSILKTKINKHIDSNSIMSASQNGCKSGSRGTKELLLIDMAISQQVRRSRKDLSTCWIDYRKAYDSVPHTWLMRVLELYKVDATLRTFLMSCMRTWRTVLRYPGCRNIQRNSEPIRIERGIFQGDSLSPLWFCLALNPLSTLLEDSGLGYRLRRGGQVISHLLYMDDLKLFAPNNSQLRELLKITETFSSSIRMEFGVDKCAVMHVKRGEIMESVGTQLTDSINLRALSASETYKYLGMSEALGINVTDMKQSLKERFFGRLKKVLNSLLSGGNKVRAFNGWVMPVLMCSFGILKWTQTELDALDQRVRTLLTANRLHHPRSSVMRLYIPRKCGGRGFLNAKTLHNREVCSLRDYFLVTDVGMHRDVVAADKGLTPLSLAKENWRKPVVLDTNDRMDVWKSKELHGRFFRALHGPDVDFQASVAWLRFGDLFGETEGFVFAIMDEVMMTNNYRRFIVKDGTFDICRACHRPGESIRHIISGCSRLANGEYLHRHNLVARIIHQQLALKYNLVESEVPYYRYTPDPVLENGYITLYWDRSIITDRTIVANKPDIVMVDRSERRAMIVDITIPHDENLVKAEKDKQIKYLDLAHEVVDMWEVDSAIIVPIVVTANGLIAKSLDQHLRRLSLGSWIKGLIQKAVLLDTARIVRKFLSLEP

SEQ ID NO: 10280 - protein, 868 aa, Sesamia nonagrioides
MRFVRRAFSGTNTSPPNYMARITERIDFLKQKVYAWANRIRRYKRRVERYAQNRTFQSNQRCVYRDWERPEQGVADTCLPDDDAMCSFWRSIWSVPVSHTEGDWARDVERACDPIPEMGAITICPQDVARAVRPLPNWKSPGPDGLHNFWIKWFPRSHASLASQFQTALVSGSLPQFLTTGITHLLHKSGSTAEPKNYRPITCLPTVYKVLTSILKAKINNHIDSNSIMSVSQNGCRSGSRGTKELLLIDMAISQQVRRSRKDLSTCWIDYKKAYDSVPHTWLMRVLKLYKVDTTLRTFLMTCMGQWRTVLRYPGCRNIQRNSEPIRIERGIFQGDSLSPLWFCLALNPLSTLLEDSGLGYRLRRGGQVISHLLYMDDLKLFAPNNLQLKELLKITETFSSAIRMEFGVDKCAVMHIKRGEIVESVGTQLTSSINLRALSASETYKYLGMSEALGINVTVMKQSLKERFFGRLKKVLNSLLSGGNKVRAFNGWVMPVLMYSFGILKYTQTELDALDQRVRTLLTANRLHHPRSSVMRLYIPRKCGGRGFLNAKTLHNREICSLREYFLETDVGMHRDVVVVDKGLTPLSLAKENWRKPVVLDTNDRMEVWKSKELHGRFFRALHGPDVDLQASVAWLRFGDLFGETEGFVCAIMDEVMMTNNYRRFIVKDGTVDICRACHRPGESIRHIISGCSRLANGEYLHRHNLVARIIHQQLALKYNLVESEVPYYRYMPDPVLENGHITLYWDRSIITDRTIVANKPDIVMVDRSERRAMIVDITIPHDENLVKAEKDKQIKYLDLAHEVVDMWEVDSAIIVPIVVTANGLIAKSLDQHLRRLSLGSWIKGLIQKAVLLDTARIVRKFLSLEP

SEQ ID NO: 10281 - protein, 1200 aa, Sesamia nonagrioides
MLTRSAARRARPPSPDSLLGSASPPPVSSATASAVTTPAAAVASSSSDEYFSPPTTPPPARRRGGRRPPDRLGPRGPSASDRVPAPGGSVQRMRWTQSINENVMRSYYGATEGGNNLTAYRVRMLSLFQVLEPAVNVSAQRLSDQVRVIQRNHMLDDVVLDRLRLESRNSHVTPASSLVAVQLNSVSPRPNHVDEEDDDRAISVSPQCNEKLRSALEDAFREYRSIPPELRPRLPRLPMHKKNKALVCALDSQLSNYLKDSKDLNDTHSILYCGAVAICRVAHVKFPDSDRATRPKSAVPAWQCRIERRIGETRALIGKLISFREGNTRPRVMRFVRRAFSGTDTSTRDYLFRVTERIDFFKQKIYAWANRIRRYKRRVERYSQNRNFQSDERRVYRAWERSDQGVTDTCLPDDNATCSFWRNIWSVPVSHTEGSWTRVVERACDPVPEMGAITICPQDVARAVRPLPNWKSPGPDGLHNFWIKWFTRSHACLASQFQTALESGSLPQFLTTGVTHLLHKSGSTAEPKNYRPITCLPTVYKVLTSILKSKINTHIDSNSIMSASQNGCRSGSRGTKELLLIDMAISQQVRRSRKDLSTCWIDYKKAYDSVPHTWLMRVLELYKVDATLRTFLMTCMRTWRTVLRYPGCRNIQRNSEPIRIERGIFQGDSLSPLWFCLALNPLSTLLEDSGLGYRLRRGGQVISHLLYMDDLKLFAHTDSQLKELLKITETFSSSIRMEFGVDKCAVMHVKRGEIMESVGTQLTSSINLRALSASETYKYLGMSEALGINVTDMKQSLKERFFGRLKKVLNSLLSGGNKVRAFNGWVMPVLMYSFGILKWTQTELDALDRRVRTLLTANRLHHPRSSVMRLYIPRKCGGRGFLNAKTLHNREICSLREYFLTTDVGMHRDVVAVDKGLTPLSLAKENWRKPVVLDTNDRMEVWKSKELHGRFFTALHGPDVDLQASVAWLRFGDLFGETEGFVCAIMDEVMMTNNYRRFIVKDGTVDICRACHRPGESIRHIISGCSRLANGEYLHRHNLVARIIHQQLALKYNLVESEVPYYRYTPDPVLENDLITLYWDRSIITDRTIFANKPDIVLVDRSERRAMIVDITIPHDENLVKAEKDKQIKYLDLAHEVIDMWEVDSAIIVPIVVTANGLIAKSLDQHLRRLSLGSWIKGLIQKAVLLDTARIVRKFLSLEP

SEQ ID NO: 10282 - protein, 868 aa, Sesamia nonagrioides
MRFVRRAFSGTDTSTRDYLFRVTERIDFFKQKIYAWANRIRRYKQRVERYSQNHNFQSDERRVYRAWERSDQGVTDTCLPDDDATCSFWRNIWSVPVSHTEGSWTRVVERACDPVPEMGAITICPQDVAHAVRPLPNWKSPGPDGLHNFWIKWFTRSHARLASQFQTALESGSLPQFLTTGVTHLLHKSGSTAEPKNYRPITCLPTVYKVLTSILKSKINTHIDSNSIMSASQNGCRSGSRGTKELLLIDMAISQQVRRSRKDLSTCWIDYKKAYDSVPHTWLMRVLELYKVDATLRTFLMTCMRTWRTVLRYPGCRNIQRNSEPIRIERGIFQGDSLSPLWFCLALNPLSTLLEDSGLGYRLRRGGQVISHLLYMDDLKLFAHTDSQLKKLLKITETFSSSIRMEFGVDKCAVMHVKRGEIMESVGTQLTSSINLRALSASETYKYLGMSEALGINVTDMKQSLKERFFGRLKKVLNSLLSGGNKVRAFNGWVMPVLMYSFGILKWTQTELDALDRRVRTLLTANRLHHPRSSVMRLYIPRKCGGRGFLNAKTLHNREICSLREYFLTTDVGMHRDVVAVDKGLTPLSLAKENWRKPVVLDTNDRMEVWKSKELHGRFFKALHGPDVDLQASVAWLRFGDLFGETEGFVCAIMDEVMMTNNYRRFIVKDGTVDICRACHRPGESIRHIISGCSRLANGEYLHRHNLVARIIHQQLALKYNLVESEVPYYRYTPDPVLENDHITLYWDRSIITDRTIVANKPDIVLVDRSERRAMIVDITIPHDENLVKAEKDKQIKYLDLAHEVVDMWEVDSAIIVPIVVTANGLIAKSLDQHLRRLSLGSWIKGLIQKAVLLDTARIVRKFLSLEP

SEQ ID NO: 10283 - protein, 1161 aa, Sesamia nonagrioides
MLTRSAARRARPPSPDSLPSSASPPPASSTTVSAVTTPAAAVASSSSDEYFSPPTTPPPVRRRGGRRPPDCLGPRGPSASDRVPAAGGSVQRMRWTQSINENVIRSYYGATEGGNNLTAYRVRMLSLFQVLEPAVNVSAQRLSDQVRVIQRNHMLDDTVLDRLRNEMQSSRVITHQSQSAEIPPQPTNYADEGSNDRATNVSTQCNEELRNALVAAIREYRFMSAELRPRLPRLPMHNRNRALMAALDAQLSNYFDTCENLTDTHSILYCAAVAACRVAHVKFSSDSRATRPKPVVPAWQHRIERRIGGARALIGKLICFREGNTRPRVMRFVRRAFSGTNTSPQNYMARITERIDFLKQKVYAWANRIRRYKRRVERYTQNRTFQSNQRWVYRDWERPEQGVADTCLPDDDAMCSFWRSIWSVPVSHTECDWARDVERACDPIPEMGAITICPQDVARAVRPLPNWKSPGSDGLHNFWIKWFPRSHASLASQFQTALVSGSLPQFLTTGITHLLHKSGSTAEPKNYRPITCLPTVYKVLTSILKAKINNHIDSNSIMSVSQNGCRSGSRGTKELLLIDMAISQQVRRSRKDLSTCWIDYKKAYDSVPHTWLMRVLELYKVDTTLRTFLMTCMGQCRTVLRYPGCRNIQRNSEPIRIERGIFQGDSLSPLWFCLALNPLSTLLEDSGLGYRLRRGGQVISHLLYMDDLKLFAPNNLQLKELLKITETFSSAIRMEFGVDKCAVMHLKRGEIVESVGTQLTSSINLRALSASETYKYLGMSEALGINVTDMKQSLKERFFGRLKKVLNSLLSGGDKVRAFNGWVMPVLMYSFGILKWTQTELDALDQRVRTLLTANRLHHPRSSVMRLYIPRKCGGRGFLNAKTLHNREICSLREYFLETDVGMHRDVVAVDKGLTPLSLAKENWRKPVVLDTNDRMEVWKSKELHGRFFRALHGPDVDLQASVAWLRFGDLFGETEGFVCAIMDEVMMTNNYRRFIVKDGTVDICRACHRPGESIRHIISGCCRLANGEYLHRHNLVARIIHQQLALKYNLLESEVPYYRYMPDPVLENGHITLYWDRSIITDRTIVANKPDIVMVDRSERRAMIVDITIPHDENLVKAEKDKQIKYLDLAHEVVDMWEVDSAIIVPIVVTANGLIAKSLD

SEQ ID NO: 10284 - protein, 868 aa, Sesamia nonagrioides
MRFVRRAFSGTDVSTRDYLLRVTERIDFLKQKIYAWANRIRRYRRRVERYSQNRNFQSDERWVYRAWERSDQGVTDTCLPDDDATRSFWRNIWSVPVSHTEGGWTRDVERACDPVPEMGAITICPQDVARAVRPLPNWKSPGPDGLHNFWIKWFSGSHACLASQFQTALESGSLPQFLTTGITHLLHKSGSTAEPKNYRPITCLPTVYKVLTSILKAKINTHIDSNSIMSASQNGCKSGSRGTKELLLIDMAISQQVRRSRKDLSTCWIDYRKAYDSVPHTWLMRVLELYKVDATLRTFLMSCMRTWRTVLRYSGCRNIQRNSEPIRIERGIFQGDSLSPFWFCLALNPLSTLLEDSGLGYRLRRGGQVISHLLYMDDLKLFAPNNSQLRELLKITETFSSSIRMEFGVDKCAVMHVKRGEIMESVGTQLTGSINLKALSASETYKYLGMSEALGINVTDMKQSLKERFFGRLKKVLNSLLSGGNKVRAFNGWVMPVLMYSFGILKWTQTELDALDQRVRTLLTANRLHHPRSSVMRLYIPRKCGGRGFLNAKTLHNREVCSLREYFLETDVGMHRDVVAADKGLTPLSLAKENWRKPVVLDTNDRLEVWKSKELHGRFFRALHGPDVDFQASVAWLRFGDLFGETEGFVFAIMDEVMMTNNYRRFIVKDGTVDICRACHRPGESIRHIISGCSRLANGEYLHRHNLVARIIHQQLALKYKLVESEVPYYRYMPDPVLENGHITLYWDRSIITDRTIVANKPDIVLVDRSERRAMIVDITIPHDENLVKAEKDKQIKYLDLAHEVVDMWEVDSAIIVPIVVTANGLIAKSLDQHLRRLSLGSWIKGLIQKAVLLDTARIVRKFLSLEP

SEQ ID NO: 10285 - protein, 1206 aa, Drepana arcuata
MFTRSQARRHNARPPPSASPPSSVSQTPADSDSATLDLRVVATAASSSSDEYFSPPTSPRPVRRQGRVQPPPNGLGPRDQSAPDRVLAVGGNVQRMRWTHTINENVMRAYYGATEGGTSLTAYRSRMLLLFQELEPTVNVSAQRLSDQVRVIQRNHRLDDNVLDRLRSEMQGNHVTSAPAQSAAQSLVSSITLPQPSYTDMEGGDRPLNAGTQYNELVRSTLKDAVQQYKSVSPGLRPRLPRLPMHKKNLALVATLDSLLPEYLDCCEDLTETHQILYCAAIAACRLAYVNFPNHERTGQPKPAVPIWQRRIQRRIDDARVLIGKLSCFREGNTRPRVMRYVRKAFSGSDINPRDYVACVTERIDYLKQKVYAWANRIRRYKQRVDRYTQNRMFQNDQKWVYRGWERTEQGVSDEQLPDNDAVSTFWSNIWSVPVTHTEGDWIEEIKRVCESIQEMGEVTISPKDVADAVQSLSNWKSPGPDGLHTFWLKWLRTSHARLASQFQSSLESGSLPSFLTTGITHLLHKSGSTMDPKNYRPITCLPTMYKLLTSILRAKISMHINNNVIMSASQNGCKNGSRGTKELLLIDMTISQQVRRSCKNLSTCWIDYKKAYDSVPHTWLMRVLELYKVNSTLRIFLKSVMGQWKTVLHYPRGRQIPGNDEPIRIERGIFQGDSLSPLWFCLALNPLSTLLESSGLGYRLRRGGQVISHLLYMDDLKLFAPSELQLTELLNITQNFSNSIRMEFGIDKCAVMHVKRGNIVESVGIQLSDSINIRSLTPTENYKYLGMSEALGIHEADMKKSLLDRFYGRLTKVLNSLLTGGNKVRAYNGWVMPVLMYSFGILKWTQRELEITDRKVRTLLTSYRMHHPRSSVMRLYIPRKCGGRGFLNAKTLHNREVYKLREYFRSTEVGMHRDVVAVDKGLTALSLAKENWRKPVVLTTNDRREIWQSKELHGRFYWALHGPDVDLEASLAWLRFGDLFGETEGFVCAIMDEVMMTNNYRKYILRDGTVDICRACHRPGESLRHIISGCSHLANGEYLHRHNQVAKIIHQQLSLKYNLVDSEVPYYKYSPDPVLENGHVTLYWDRSIITDRCITANKPDIVLIDRLERRTMIVDITVPHDGNLVKAEKDKQIKYLDLAHEIVSMWDVDSAIIVPIVITANGLMAKSLDQHLKRLSLDGWIKCLIQKAVLLEPARIVRRFLSLGP

SEQ ID NO: 10286 - protein, 1104 aa, Apamea monoglypha
MKKKTWYFHIIYVIIIIIIINNLTAYRVRMLSLFQVLEPAVNVSAQRLSDQVRVIQRNHMLDDTVLDRLRSEMQSSHVIAPQSQTAAVLPQSNTSHADEGSNDRATNVSIQCNEELRNALEGAIREYRFMSPELRPRLPRLPMHNKNRALVAVLDAQLSSHFDACEDLTDTHSILYCAAVAACRVAHVKFDSDSRATRPKPAIPAWQCRIERRIGGARALIGKLICFREGNTRPRVMRFVRRAFLGTDISSQDYLSRVTERIDFLEQKVYAWANRIRRYKRRVERYTQNRTFQSDERWVYRGWERPDQSVADTCLPDDDAMCSFWRSIWSAPVSHTEGDWTGKIERACELIPEMGAITICPQDVARAVRPLPNWKSPGPDGLHNFWIKWFQRSHAPLAAQFQSALESGLLPQFITTGITHLLHKSGSTADPKNYRPITCLPTIYKVLTSILRAKINKHIDSNSIMSVSQNGCRNGSRGTKELLLIDMAISQQVRRSRKDLSTCWIDYKKAYDSVPHTWLMRVLELYKVDTTLRTFLMTCMGQWRTVLRYPGCRNIQRNSEPIRIERGIFQGDSLSPLWFCLALNPLSTLLDDSGLGYRLRRGGQVISHLLYMDDLKLFAPNNLQVMKLLKITETFSSAIRMEFGVDKCAVMHVKRGEIVESVGTQLSDFTNLRALSAAETYKYLGMSEALGINVTDMKQSLKERFFGRLKKVFNSLLSGGNKVRAFNSWVMPVLMYSFGILKWTQTELEALDRRVRTLLTANRMHHPRSSVMRLYIPRKCGGRGFLNAKTLHNREICSLREYFLETDVGMHRDVVAVDKGLTPLSLAKENWRKPVVLDTNDRMEVWQSKELHGRFYRALHGPDVDLLASVAWLRFGDLFGETEGFVCAIMDEVMMTNNYRRYIVKDGTVDICRACHRPGESIRHIISGCSRLANGEYLHRHNLVARIIHQQLALKYSLVESEVPYYRYVPDPVLENGNITLYWDRSIITDRTIVANKPDIVVVDRSERRAMIVDITVPHDENLVKAEKDKQIKYLDLAREVVDMWDVDSAIIVPIVVSANGLIAKSLDQHLRRLSLGSWIKGLIQKAVLLDTARIVRRFLSLEP

SEQ ID NO: 10287 - protein, 1075 aa, Apamea monoglypha
MLSLFQVLEPAVNVTAQRLSDQVRVIQRNHMLDDTVLDRLRSEMQSSHVIAHQSQTAAVLPQSNTSHADEGSNDMATNVSIQCNEELRNALEGAIREYRFMSPELRPRLPRLPMHNKNRALVAVLDAQLSSHFDVCEDLTDTHSILYCAAVAACRVAHVKFASDSEATRPKPAIPAWQCRIERRIGGARALIGKLICFREGNTRPRVMRFVRRAFLGTDISSQDYLSRVTERIDFLKQKVYAWANRIRRYKRRVERYTQNRTFQNDERWVYRGWERPDQSVADTCLPDDDAMCSFWRSIWSAPVSHTEGDWTGKIERACELIPEMGAITICPQDVARAVRPLPNWKSPGPDGLHNFWIKWFQRSHAPLAAQFQSALESGLLPQFITTGITHLLHKSGSTADPKNYRPITCLPTIYKVLTSILRAKINKHIDSNSIMSVSQNGCRNGSRGTKELLLIDMAISQQVRRSRKDLSTCWIDYKKAYDSVPHTWLMRVLELYKVDTTLRTFLMTCMGQWRTVLRYPGCRNIQRNSEPIRIERGIFQGDSLSPLWFCLALNPLSTLLDDSGLGYRLRRGGQVISHLLYMDDLKLFAPNNLQLMELLKITETFSSAIRMEFGVDKCAVMHVKRGEIVESVGTQLSDSTNLRALSASETYKYLGMSEALGINVTDMKQSLKERFFGRLKKVLNSLLSGGNKVRAFNSWVMPVLMYSFGILKWTQTELDALDRRVRTLLTANRLHHPRSSVMRLYISRKCGGRGFLNAKTLHNREICSLREYFLETDVGMHRDVVAVDKGLTPLSLAKENWRKPVVLDTNDRMEVWQSKELHGRFYRALHGPDVDLLASVAWLRFGDLFGETEGFVCAIMDEVMMTNNYRRFIVKDGTVDICRACHRPGESIRHIISGCSRLANGEYLHRHNLVARIIHQQLALKYNLVESEVPYYRYVPDPVLENGNITLYWDRSIITDRTIVANKPDIVVVDRSERRAMIVDITVPHDENLVKAEKDKQIKYLDLAREVVDMWHVDSAIIVPIVVTANGLIAKSLDQHLRRLSLGSWIKGLIQKAVLLDTARIVRRFLSLEP

SEQ ID NO: 10288 - protein, 1200 aa, Furcula furcula
MLTRSRNKARLRPPDSSPRSASQSPQLNQEANGTPAPVASSESDEYFSPPTSPPPVRRRRGRPPRELGLLEQPAPNRVLAPGGVVRRMRWTSSINENVMRAYYEATEGGTSLTAYRNRMLSLFQALEPAVNVSAQRLSDQVRAIQRSHMLDGAVLDRLRSEVQGSRVAPCTSSSQAVAPAVNTAPAPRLVAISDDDRDDITTNVSTNISTQLRSTLEDVVREYRTMPCGLRPRLPRLPMHKRNRALVCALDSLLSSYFDSSEDLADAHSLLYCAAMTACCVARVKLQNTDAATRPRPAVPAWQCRIERRIGEARVLIGKLTCFREGNTRPRVMRFVRRAFSGTGIDPREYLSRVTERIDFLKQKVCAWASRIRRYRARADRYFQNNMFQRDQRWVYRSWERPSQTEGDVRRPDDDAMATFWRNIWSVPVTHSEGDWIGDVEQVCEPLPEMGAITIWPQDVADAVRLLPNWKAPGPDGLHNFWLKSIRSSHICLASLFQSALESGSLPEFMTTGITHLLHKTNSTTDPKNYRPITCLPTVYKTLTSILRTKIYRHVEDNSIMSASQNGCRSGARGTKELLLIDMAICQQARRNRKDLSTCWIDYKKAYDSVPHTWLMRVLELYKVNATLRTFLASCMRQWRTVLRYPGSRQTLGDGEPIRIERGIFQGDSLSPLWFCLALNPLSTLLKSSGLGYRLRRGGQVISHLLYMDDLKLFAPTELQLMGLLRVTETFSNSIRMEFGVDKCAVMHVKRGRIVESRSVQLSDSTDLKTLSATETYKYLGMSQALGINETDMKQSLRDRFLGRLRKVLKCLLSGGNRVRAYNGWVMPVLMYSFGILKWTQTELDTLDRTVRTLLTTYRMHHPRSSVMRLYIPRKCGGRGFLNAKTLHNREIYNLREYFLHCGGEMHTDVVAVDNGLTPLSLAKGNWRKPVVLTTGDREAVWQSKELHGRFYRALHRPDVDFSASVAWLRFGDLFGETEGFVCAIMDEVVMTNNYRKYILRDGTIDICRACHRPGESLRHIISGCSRLANGEYLHRHNQVARIIHQQLALRYRLVTSEVPYYRYVPEPVLEDGHITLYWDRSIITDRTIVANRPDIVLIDRTERRAMIVDVTVPHDENLVKAEKDKECKYLDLAHEVVDMWDIDKAIIVPIVVSAHGLMAKSLDKHLKRLTLDGWIKGQIQKAVLLETARIVRRFLSLEP

SEQ ID NO: 10289 - protein, 975 aa, Furcula furcula
MPQNLRPRLPRLPMHKRNRALVCALDSLLLSYFDSSEDLADAHSLLYCAAMTACRVARVKVPNADAATRPRPAVPAWQCRIERRIGEARVLIDKLTYFREGNTRPRVMRFVRRAFSGTGIGPREYLSRVTERIDFLKQKVCAWANRIRRYKARVDRYFQNNMFQRDQRWVYRSWERPSQTEGDVRRPDDDAMTTFWRNIWSVPVTHSEGDWIRDVEQVCEPLPEMGAITIWPQDVADAVRQLPNWKAPGPDGLHNFWLKWIRSSHICLASLFQSALESGSLPEFMTTGITHLLHKNNSTTDPKNYRPITCLPTVYKTLTSILRAKIYRHVEDNSIMSASQNGCRSGARGTKELLLIDMAICQQARRSRKDLSTCWIDYKKAYDSVPHTWLMRVLELYKVNATLRTFLASCMRQWRTVLLYPGSRQTLGNGDPIRIERGIFQGDSLSPLWFCLALNPLSTLLKSSGLGYRLRRGSQVISHLLYMDDLKLFAPTELQLMGLLKVTETFSNSIRMEFGVDKCAVMHVKRGRLVESRSVQLSDSTDLRTLSATETYKYLGMSQALGINETDMKQSLRERFLGRLRKVLKSLLSGGNRVRAYNGWVMPVLMYSFGILKWTQTELDTLDRTVRTLLTTYRMHHPRSSVMRLYIPRKCGGRGFLNAKTLHNREICNLREYFLHCGGEMHTDVVAVDNGLTPLSLAKGNWRKPVVLTTGDREAVWQSKELHGRFYRALHGPDVDFSASVAWLRFGDLFGETEGFVCAIMDEVVMTNNYRKYILRDGTIDICRACHRPGESLRHIISGCSRLANGEYLHRHNQVARIIHQQLALKYRLVTSEVPYYRYVPEPVLEDGHITLYWDRSIITDRTIVANKPDIVLIDRTERHAMIVDVTVPHDENLVKAEKDKECKYLDLAHEVVDMWDIDRAIIVPIVVSAHGLMAKSLDKHLKRLTLDGWIKGQMQKAVLLETARIVRKFLSLEP

SEQ ID NO: 10290 - protein, 1194 aa, Furcula furcula
MLTRSKAHLRPPDSSPHSASQPPGPSIDGSLAAVASSESDEYFSPPTSPPPVRRRRGRPPRELGLLEQPAPNRVLAPGGVVRRMRWTLSINENVMRAYYKATEGGTNLTAYRDRMLSLFQALEPAVNVSAQRLSDQVRAIQRGHMLDDAVLDRLRSEVQGSRVFPCIPSSQAVAPAVNTAPAPRPAANSDDDRDDMTTDVSTNVSSQLRSTLEDVVREYRTMPQSLRPRLPRLPMHKRNRALVCALDSLLSSYFDSSEDLADAHALLYCAAITACRVARVKFPDAATRPKPAVPAWQCRIERRIGEARVLIGKLTCFREGNIRPRVMRFVRRAFSGTGIDPREYLSRVTERIDFLKQKVCAWANRIRRYRARVDRYSQNNMFQRDQRWVYRSWERPSQIVGEVQRPDDDAMIRFWRNIWSVPVTHSEGDWIGDVEEVCEPLPEMGPITIGPQDVADAVRPLPNWKAPGPDGLHNFWLKCIRSSHICLASLFQSALESGSLPEFMTTGITHLLHKTDSTTNPKNYRPITCLPTVYKTLTSILRAKIYRHVEDNSIMSSSQNGCRSGARGTKELLLIDMAICQQARRNRKDLSTCWIDYKKAFDSVPHTWLMRVLELYKVNTTLRTFLASCMRQWRTVLLYPGSRQTLGNGDPIRIERGIFQGDSLSPLWFCLALNPLSTLLKSSGLGCRLRRGGQVISHLLYMDDLKLFAPTELQLMGLLKVTETFSNSIRMGFGVDKCAVMHVKRGRMVESRSVQLSDSTDLRTLSATETYKYLGMSQALNINETAMKQSLRERFLGRLRKVLKSLLSGGNKVRAYNGWVMPVLMYSFGILKWTQTELDTLDRTVRTLLTTYRMHHPRSSVMRLYIPRKCGGRGFLNAKVLHNREICNLREYFLHCSGEMHTDVVAVDNGLTPLSLAKGNWRKPVVLTTGDREAVWQSKELHGRFYRALHGPDVDFTASVAWLRFGDLFGETEGFVCAIMDEVVMTNNYRRYILRDGTIDICRACHRPGESLRHIISGCSRLANGEYLHRHNQVARIIHQQLALKYRLVTSEVPYYRYAAEPVLEDGHITLYWDRSIITDRTIVANKPDIVLIDRTERRAMIVDITVPHDENLVKAEKDKQCKYLDLAHEVVDMWDIDDAIIVPIVVSAHGLMAKSLDKHLKRLSLDGWIKGQIHKAVLLETARIVRKSLSLEP

SEQ ID NO: 10291 - protein, 1196 aa, Furcula furcula
MLTRNRAHPRPPDSSPRSASQPLGPSADGSLAAVASSGSDEYFSPPTSPPPVRRRRGRPPRVLGSLEQPAPNRVLAPGGVVRRMRWTSSINENVMRAYYEATERGTNLTAYRLRMLTLFQALEPAVNVSAQRLSDQVRAIQRGHMLDDAVLDRLRSEVQVSRVAPCIPSSQAVAPAVNIVPAPRPATNSDDDRDDMTTDVSTNLNTQLRSTLEDVVREYRTMPLNLRPRLPRLPMHKRNRALVCALDSLLSSYFDSSEDLADAHSLLYCAAMTACRVARVKFPSTDAATRPRPAVPAWQFRIECRIGEARVLIGKLNCFREGNTRPRVMRFVRRAFSGTGIDPREYLSRVTERIDFLKQKVCAWANRIRRYKARVDRYSQNNMFQRDQRWVYRSWERSSQIEGDGRRPDDSAMTTFWRNIWSVPVTHSEGDWMRDVEQICEPLPEMGAITIRPQDVADAVRPMPNWKAPGPDGLHNFWLKWIRSSHICLASLFQSALESGSLPEFMTMGITHLLHKTSSTTDPKNYRPITCLPTVYKTLTSILRAKIYRHVEDNSIMSASQNGCRSGARGTKELLLIDMAICQQARRNRKDLSTCWIDYKKAYDSVPHTWLMRVLELYKVNPTLRTFLASCMRQWRTVLLYPGSRQILGNGDPIRIERGIFQGDSLSPLWFCLALNPLSTLLRGSGLGCRLRRGGQVISHLLYMDDLKLFAPTELQLMGLLKVTETFSNSISMEFGVDKCAVMHVKRGRMVESRSVQLLDTTDLRTLSATETYKYLGMSQALGINETDMKQSLRERFLGRLRKVLKSLLSGGNRVRAYNGWVMPVLMYSFGILKWTQTELDTLDRTVRTLLTTYRMHHPRSSVIRLYIPRKCGGRGFLNAKTLHNREICNLREYFLHCGGVMHTDVVAVDNGLTPLSLAKGNWRKPVVLTTGNREAVWQSKELHGRFYRALHGPDVDFSASVAWLRFGDLFGETEGFVCAIMDEVVMTNNYRKYILRDGTIDICRACHRPGESLRHIISGCSRLANGEYLHRHNQVARIIHQQLALKYRLVMSEVPYYRYVPEPVLEDGHITLYWDRSIITDRTIVANKPDIVLIDRNERRAMIVDVTVPHDENLVKAEKDKECKYLDLAHEVVDMWDIDRAIIVPIVVSAHGLMAKSLDKHLKRLTLGGWIKGQMQKAVLLETARIVRRFLSLEP

SEQ ID NO: 10292 - protein, 1111 aa, Spodoptera exigua
MRWTQSINENVMRAYYGATEGGNNLTAYRVRMLSLFQVLEPAVNVSAQRLSDQVRVIQRNRMLDDTVLDRLQTEMGSRASASSSRTVVPATLPLTSHGIVSAVADEESTDTVAHVSTQCIDELRSALEYAIREYRYISPELRPRLPRLPMHNKNKALVAALDSQLSNYLDDCEDLGDTHSIMYCAAVAACRVAHVKFPTNDVTTRPKPAVPAWQRRIECRIAGARALIGKLICFREGNTRPRVMRSVRRAFSGTDISPRDYMSRVTERIDFLKQKVYAWANRIRRYRRRVERYTQNRTFRSNERWVYRTWERPDHGVTDRRLPDDDAMCSFWRSIWSVPVSHTEGDWIRDVERACDPIPQMGTINISPQDVARAVRPLPNWKSPGPDGLHNFWIKWFTRAHARLASQFQSAVESGSLPKFLTTGVTHLLHKSGSTAEPKNYRPITCLPTVYKVLTSILRSKINSHIDKNKIMSTAQNGCKNGSRGTKELLLIDMAISQQVRRARKDLSTCWIDYKKAYDSIPHTWLMRVLELYKIDTILRTFLMSCMRQWSTVLRYPGCRHTQRNSEPVRIERGIFQGDSLSPLWFCLALNPLSTLLENSGLGYRLKRGGQVISHLLYMDDLKLFAPNKLQLMELLKLTETFSSAIRMEFGVDKCAIMHVKRGEVVESVGTQLTDSINLRSLSPTETYKYLGMSEALGINVTDMKQSLKERFFGRLKKVFNSFLSGGNKVRAFNGWVMPVLMYSFGVLKWSQTELDALDRQARTMLTAYRMHHPRSSVMRLYIPRKCGGRGFLNAKTLHNREVCSLREYFLAADVDMHRDVVAVDKGLTPLSLAIENWRKPVVLDTNARREVWQSKELHGRFFRALHGPDVDQVASVAWLRFGDLFGETEGFVCAIMDEVIMTNNYRRFIVKDGTVDICRACHRPGESIRHIISGCSRLANGEYLHRHNLVARIIHQQLALKYSLVESEVPYYRYEPDPVLDNGHITLYWDRSIITDRTIVANKPDIVVVDRKERRAMIVDIAVPHDENLVKAEKDKLIKYIDLAREVVDMWEVDSAIIVPIVVSANGLIAKSLDQHLRRLSLGGWIKGLIQKVVLLDTARIVRRFLSLEP

SEQ ID NO: 10293 - protein, 1196 aa, Spodoptera exigua
MLTRAAARRARPPPPASSLSSASPPPESSPTVSDVTPAVAVASSSSDEYYSPPTTPPPTRRRGGRRPPARLGPRGPPASDRVPAVGGSVQRMRWTQSINENVMRAYYGATEGGNNLTAYRVRMLSLFQVLEPAVNVSAQRLSDQVRVIQRNRMLDDTVLDRLQTEMGSRASASSSRTVVPATLPLTSHGIVSAVADEESTDTVAHVSTQCTDELRSALECAIREYHYISPELRPRLPRLPMHNKNKALVAALDSQLSNYLDDCEGLGDTHSIMYCAAVAACRMAHVKFPTNDVTTRPKPAVPAWQHRIECRIAGARALIGKLICFREGNTRPRVMRFVRRAFSGTDISPRDYMSRVTERIDLAWANRIRRYRRRVERYTQNRTFRSNERWVYRTWERPDHGVTDRRLPDDDAMCSFWRSIWSVPVSHTEGDWIRDVERACDPIPQMGTINISPQDVARAVRPLPNWKSPGPDGLHNFWIKWFTRAHARLASQFQSAVESGSLPKFLTTGVTHLLHKSGSTAEPKNYRPITCLPTVYKVLTSILRSKINSHIDKNKIMSTAQNGCKNGSRGTKELLLINMAISQQVRRARKDLSTCWIDYKKAYDSIPHTWLMRVLELYKIDTILRTFLMSCMRQWSTVLRYPGCRHTQRNSEPVRIERGIFQGDSLSPLWFCLALNPLSTLLENSGLGYRLKRGGQVISHLLYMDDLKLFAPNKLQLMELLKLTETFSSAIRMEFGVDKCAIMHVKRGEVVESVGTQLTDSINLRSLSPTETYKYLGMSEAVGINVTDMKQSLKERFFGRLKKVFNSFLSGGNKVRAFNGWVMPVLMYSFGVLKWSQTELDALDRQVRTMLTAYRMHHPRSSVMRLYIPRKCGGRGFLNAKTLHNREVCSLREYFLAADVDMHRDVVAVDKGLTPLSLAIENWRKPVVLDTNARREVWQSKELHGRFFRALHGPDVDQVASVAWLRFGDLFGETEGFVCAIMDEVIMTNNYRRFIVKDGTVDICRACHRPGESIRHIISGCSRLANGEYLHRHNLVARIIHQQLALKYSLVESEVPYYRYEPDPVLDNGHITLYWDRSIITDRTIVANKPVIVVVDRKVRRAMIVDIAVPHDENLVKAEKDKLIKYIDLAREVVDMWEVDSAIIVPIVMSANGLIAKSLDQHLRRLSLGGWIKGLIQKVVLLDTARIVRRFLSLEP

SEQ ID NO: 10294 - protein, 868 aa, Amphipyra berbera
MRFVRRAFSGTDINPRDYMSRVTERIDFLKQKVYAWANRIRRYKRRVERYTQNRMFHSDERWVYRTGERPDHDVSDAHPPDNDVMNTFWRNIWSMPVTHTEGDWMQEVQRACEPIKEMGDITIVPQDVTSAVRPMANWKSPGPDGLHNFWIKWLRSLHARLASQFQSSLESGSLPEFLTTGVTHLLHKSGSTAEPKNYRPITCLPTVYKLLTSILRAKINSHILYNSIMSVSQNGCKNGSRGTKELLLIDMAISQQVRRSRKDLSTCWIDYKKAYDSVPHTWLMRVLELYKVNTTLCAFLTSCMGQWRTVLHYPGCRQIQGRGEPIRIERGIFQGDSLSPLWFCLALNPLSTLLEGSGLGYRLRRGGQVISHLLYMNDLKLFAPNNLQLMKLLKVTETFSNSIRMEFGVDKCAVMHVKRGGIMESVGTQLSDSIHLRSLSSTETYKYLGMSEALGINETDMKQSLRERFYGRLKKVLKSLLSGGNKVRAFNGWVMPVLMYSFGILKWTQTELDALDRRVRTLLTAYRMHHPRSSVMRLYIPRKCGGRGFLNAKTLHNREVCSLREYFLQADVGMHRDVVAVDKGFTPLSLAKENWRKPVVLDTNGRREVWQSKELHGRFYRALHGPDVDFLASVAWLRFGDLFGETEGFVCAIMDEVMMTNNYRKYIVKDGTVDICRACHCPGESIRHIISGCSRLANGEYLHRHNLVARIIHQQLALKYNLVNAEVPYYKYVPDPVLENGHITLYWDRSIITDRTIVANKPDIVVIDRTERLTMIVDITVPHDENLVKAEKDKEIKYEDLAHEVVDIWEVDSAVIVPIVVTANGLIAKSLDHHLTRLSLGSWVKGLIQKAVLLDTARIVRKFLSLRP

SEQ ID NO: 10295 - protein, 1203 aa, Amphipyra berbera
MLTRARARKQTAHPRSPDSSLSSASQPPESSPPVSAVTPAAAVASSSSDEYYSPPSSPPPVRRRGGARPPACLGPRGQPATNRVPAAGGNVSRMRWTQSINENVMRAYYGATEGGINLTAYRERMLFLFQVLEPAINVSAQRLSDQVRVVQRNRRLDDTVLERLRSEARNSQTVTFPVQAAVQMQPLAVPPRPIHVDGEGDGEAINVSNQCSEELRSALDDAILEFRTTPPEIRPRLPRLPMHGKNRALMCALDSLLSNYFDGSEDLADTHSILYCAAIAACRVAHVKFTENERATRPKPAVPAWQSRIERRIGGARVLIGKLICFREGNNRPRVMRFVRRAFSGTDISPRDYMSRVTERIDFLKQKVYAWANRIRRYKRRVERYTQNRIFQSDQRRVYRAWERPDFGGGDVRLPDDDALSSFWRSIWSVPIAHTEDGWMRDIEQACEPIAEMEPITITPQDVADAARPLPNWKSPGPDGLHNFWLKWLRSSHARLASQFQSSLESGSLPQFLTTGVTHLLYKSGSTAEPKNYRPITCLPTVYKLLTSILRVKITTHIDNNCIMSASQNGCRKGSRGTKELLLIDMAISQQVRRSQKDLSTCWIDYKKAYDSVPHSWLMRVLELYKINTTLRTFLMSCMRHWRTVLRYPGCRRIRGSGEQIRIERGIFQGDSLSPLWFCLALNPLSTLLEGTGLGYQLRRGGQVISHLLYMDDLKLFAPTDLQLMELLKVTENFSNSIRMEFGVDKCAVMHVKRGRIAESEGIQLPNSVQLRSLSPTETYKYLGMSEALGISETDMRQSLRERFFGRLNKLLKSFLSGGNKVRAFNGWVMPVLMYSFGTLKWTQADLDALDRRVRALLTAHRMHHPRSSVMRLYIPRKCGGRGFLNAKTLHNREVYSLREYFLQAEGVMHRDVVAVDKGFTPLALARENWRKPAVLSTNDREVVWQSKELHGRYYRALHGPDVDFSASVSWLRSGNLFGETEGFVCAIMDEVMMTNNYRKYIVKDGTVDICRACHRPGESIRHIVSGCSRLANGEYLHRHNLVARIIHQQLALKYNLVESEVPYYRYVPDPVLENGHATLYWDRSIITDRTIVANKPDIVVIDRSERRTMIVDITVPHDENLVKAEKDKQIKYLDLAHEVVGMWDVDSAVIVPIVVTANGLIAKSLDIHLMRLSLGGWIKGLIQRAVLLDTARIVRRFLSLEP

SEQ ID NO: 10296 - protein, 1207 aa, Amphipyra berbera
MLTRSRAKAIAQNTRPRPSASSLSSASQPPDSSIVSDVTPAAAVASSSSDEYFSPPSTPPPPPPRRRGRGRPPASLGPRGPPASDRVPAPGGSVQRMRWTPTMNENCMRAYFGATEGGTNLTAYRGRMLSLFQVLEPAVNVSAQRLSDQVRVIQRDHRLTDDALDRLRSEVQSNCIISLQSQTAAQPQVPPMVPPQPIRADEESDDRVTIVSAQCNEQLRSALELAIREYRFAPPNLRPRIPRLPMNRQNRALMCALDSLLSNYFDNSEGLEDTHSILYCAAVAACRVAHVKFDNNDRATRPKPAVPAWQCRIERRINEARALIGKLICFREGNTRPRVMRFVRRAFSGTDINPREYMSRVTERIDFLKQKVYAWASRIRRYKRRVERYTQNRMFHSDERWVYRTWERPEHDVSDTHLPDNDVMNTFWRNIWSMPVTHTEGDWMQEVQRACEPIEEMGDIIIVPQDVTSAVRPMANWKSPGPDGLHNFWLKWLRSSHARLASQFQSSLESGSLPPFLTTGITHLLHKSGSTAEPKNYRPITCLPTIYKLLTSILRAKINTHIINNSIMSASQNGCKNGSRGTKELLLIDMAISQQVRRSRKDLSTCWIDYKKAYDSVPHTWLMRVLELYKVNTTLCAFLTSCMGQWRTVLHYPGCRQIQGRGEPIRIERGIFQGDSLSPLWFCLALNPLSTLLEGSGLGYRLRRGGQVISHLLYMDDLKLFAPNNLQLMKLLKVTETFSNSIRMEFGVDKCAVMHVKRGGIMESVGTQLSDSIHLRSLSSTETYKYLGMSEALGINETDMKQSLRERFYGRLKKVLKSLLSGGNKVRAFNGWVMPVLMYSFGILKWTQTELDALDRRVRTLLTAYRMHHPRSSVMRLYIPRKCGGRGFLNAKTLHNREVCSLREYFLQADVGMHRDVVAVDKGFTPLSLAKENWRKPVVLDTNGRREVWQSKELHGRFYRALHGPDVDFLASVAWLRFGDLFGETEGFVCAIMDEVMMTNNYRKYIVKDGTVDICRACHCPGESIRHIISGCSRLANGEYLHRHNLVARIIHQQLALKYNLVDAEVPYYKYVPDPVLENGHITLYWDRSIITDRTIVANKPDIVVIDRTERLTMIVDITVPHDENLVKAEKDKEIKYQDLAHEVVDMWEVDSAVIVPIVVTANGLIAKSLDHHLTRLSLGRWVKGLIQKAVLLDTARIVRKFLSLRP

SEQ ID NO: 10297 - protein, 1203 aa, Amphipyra berbera
MLTRARARKQTAHPRSPDSSLSSASQPPVSSPPVSAVTPAAAVASSSSDEYYSPPSSPPPVRRRGGARPPACLGPRGQPATNRVPAAGGNVSCMRWTQSINENVMRAYYGATEGGINLTAYRERMLFLFQVLEPAINVSAQRLSDQVRVVQRNRRLDGTVLERLRSEARNSQTVTFPVQAAVQMQPLAVPPRPIHVDGEGDGEAINVSNQCSEELRSALDDAILEFRTTPPEIRPRLPRLPMHGKNRALMCALDSLLSNYFDGSEDLADTHSILYCAAIAACRVAHVKFTENERATRPKPAVPAWQSRIERRIGGARVLIGKLICFREGNNRPRVMRFVRRAFSGTDISPRDYMSRVTERIDFLKQKVYAWANRIRRYKRRVERYTQNRIFQSDQRRVYRAWERPDFGGGDVRLPDDDALSSFWRSIWSVPIAHTEDGWMRDIEQACEPIAEMEPITITPQDVADAARPLPNWKSPGPDGLHNFWLKWLRSSHARLASQFQSSLESGSLPQFLTTGVTHLLYKSGSTAEPKNYRPITCLPTVYKLLTSILRVKITTHIDNNCIMSASQNGCRKGSRGTKELLLIDMAISQQVRRSQKDLSTCWIDYRKAYDSVPHSWLMRVLELYKINTTLRTFLMSCMRHWRTVLRYPGCRRIRGSGEQIRIERGIFQGDSLSPLWFCLALNPLSTLLEGTGLGYQLRRGGQVISHLLYMDDLKLFAPTDLQLMELLKVTENFSNSIRMEFGVDKCAVMHVKRGRIAESEGIQLPNSVQLRSLSPTETYKYLGMSEALGISETDMRQSLRERFFGRLNKLLKSFLSGGNKVRAFNGWVMPVLMYSFGTLKWTQADLDALDRRVRALLTAHRMHHPRSSVMRLYIPRKCGSRGFLNAKTLHNREVYSLREYFLQAEGVMHRDVVAVDKGFTPLALARENWRKPAVLSTNDREVVWQSKELHGRYYRALHGPDVDFSASVSWLRSGNLFGETEGFVCAIMDEVMMTNNYRKYIVKDGTVDICRACHRPGESIRHIVSGCSRLANGEYLHRHNLVARIIHQQLALKYNLVESEVPYYRYVPDPVLENGHATLYWDRSIITDRTIVANKPDIVVIDRSERRTMIVDITVPHDENLVKAEKDKQIKYLDLAHEVVGMWDVDSAVIVPIVVTANGIIAKSLDIHLMRLSLGGWIKGLIQRAVLLDTARIVRRFLSLEP

SEQ ID NO: 10298 - protein, 1080 aa, Amphipyra berbera
MLSLFQVLEPTVNVSAQRLSDQVRVIQRDHRLTDAALDRLRSEVQSNAIISLQSQTAAQPRTPTVVPPLPTHANEESDDRVTNVSTQCNEQLRSALELAIREYRFTPPNIRPRIPRLPMHRKNRALMCALDSLLSSYFDNSENLEDTHSILYCAAVAACRVAHAKFDNNDKATRPKPAVPAWQCRIERRINEARALIGKLICFREGNTRPRVMRFVRRAFSGTDINPRDYMSRVTERIDFLKQKVYAWANRIRRYKRRVERYTQNRMFHSDERWVYRTWERPDHDVSDAHPPDNDVMNTFWRNIWSMPVTHTEGDWMQEVQRACEPIKEMGDITIVPQDVTSAVRPMANWKSPGPDGLHNFWIKWLRSSHARLASQFQSSLESGSLPEFLTTGVTHLLHKSGSTAEPKNYRPITCLPTVYKLLTSILRAKINSHILYNSIMSVSQNGCKNGSRGTKELLLIDMAISQQVRRSRKDLSTCWIDYKKAYDSVPHTWLMRVLELYKVNTTLCAFLTSCMGQWRTVLHYPGCRQIQGRGEPIRIERGIFQGDSLSPLWFCLALNPLSTLLEGSGLGYRLRRGGQVISHLLYMDDLKLFAPNNLQLMKLLKVTETFSNSIRMEFGVDKCAVMHVKRGGIMESVGTQLSDSIHLRSLSSTETYKYLGMSEALGINETDMKQSLRERFYGRLKKVLKSLLSGGNKVRAFNGWVMPVLMYSFGILKWTQTELDALDRRVRTLLTAYRMHHPRSSVMRLYIPRKCGGRGFLNAKTLHNREVCSLREYFLQADVGMHRDVVAVDKGFTPLSLAKENWRKPVVLDTNGRREVWQSKELHGRFYRALHGPDVDFLASVAWLRFGDLFGETEGFVCAIMDEVMMTNNYRKYIVKDGTVDICRACHCPGESIRHIISGCSRLANGEYLHRHNLVARIIHQQLALKYNLVDAEVPYYKYVPDPVLENGHITLYWDRSIITDRTIVANKPDIVVIDRTERLTMIVDITVPHDENLVKAEKDKEIKYQDLAHEVVDMWEVDSAVIVPIVVTANGLIAKSLDHHLTRLSLGSWVKGLIQKAVLLDTARIVRKFLSLRP

SEQ ID NO: 10299 - protein, 1197 aa, Noctua janthe
MLTRSATRRARLSPPDPSLSSASPPPESSPIVSAMTPAVAVASSSSDEYFSPPTTPPPVRRRGGRRPPDGLGPRGPPASDRVPAPGGSVPRMRWTQSINANVMRAYYGATEGGNNLTAYRVRMLSLFQVLEPAVNVSAQRLSDQVRVIQRNGMLDDTVLDRLRTEMQSSHVIATPPQTVVPPQSTIIPTHDNNVSNDMVTNVSTQCNEEMRCALEGAIREYRFMQPDLRPRVPRLPMHNKNKVLVAVLDSQLSNYFDNCENLTDAHSVLYCAAVAACRVAHVKFSDDRATRPNPAVPSWQYRIERRIGEARALIGKLICFREGNTRPRVMRFVRRAFSGTDISARDYMSRVTERIDFLKQKVYAWANRIRRYKRRVDRYTQNRTFQRDERWVYRAWERPDQGVADTHLPDDDAMCSFWRSIWSVPVSHTEGEWTREVERACDLVPEMGAITISPQDVVRAVRPLPNWKSPGPDGLHNFWIKWFTRSHARLAILFQSALESGSLPEFLTTGITHLLHKSGSTAEPKNYRPIACLPTVYKVLTSILRAKINKHIDDNSVMSASQNGCRNGSRGTKELLLIDMAISQQVRRSRRDLSTCWIDYKKAYDSVPHTWLMRVLELYKVDSTLRIFLMSCMGQWRTVLRYPGCRQIQRNSEPIRIERGIFQGDSLSPLWFCLALNPLSTLLEDSGLGYRLRRGGQVISHLLYMDDLKLFAPNDLQLMELLKVTETFSSAIRMEFRVDKCAVMHVKRGEIVESVGTQLSDSINLRSLSATETYKYLGMSEALGINVADMKQSLKERFFGRLKKVFNSLLSGGNKVRAFNGWVMPVLMYSFGILKWTQTELDALDRRVRTLLTTYRMHHPRSSVMRLYIPRRCGGRGFLNAKTLHNREIYSLREYFLETDVGMHRDVVAVDKGLTPLSLAKENWRKPVVLDTNDRMEVWQSKELHGRFFRALHGPDVDLPASVAWLRSGDLFGETEGFVCAIMDEVMMTNNYRRFIVKDGTVDICRACHRPGESIRHIISGCSRLANGEYLHRHNLVARIIHQQLALKYNLVESEVPYYKYVPDPVLENGNITLYWDRSIVTDRTIVANKPDIVVVDRSERRAMIVDITVPHDGNLVKAEKDKQIKYLDLAHEVVDMWDVDSAIIVPIVVSAHGLIAKSLDQYLRRLSLGSWIKGLIQKAVLLDTARIVRRFLSLEP

SEQ ID NO: 10300 - protein, 1197 aa, Noctua janthe
MLTRSATRRARLSPPDPSLSSASPPPESSPIVSAVTPAVAVASSSSDEYFSPPTTPPPVRRRGGRRPPDGLGPRGPPASDRVPAPGGSVPRMRWTQSINANVMRAYYGATEGGNNLTAYRVRMLSLFQVLEPAVNVSAQRLSDQVRVIQRNGMLDDTVLDRLRTEMQSSHVIATPPQTVVPPQSTIIPTHDNNVSNDMITNVSTQCNEEMRCALEGAIREYRFMQPDLRPRVPRLPMHNKNKVLVAVLDSQLSNYFDNCENLTDAHSVLYCAAVAACRVAHVKFSDDRATRPKPAVPSWQYRIERRIGEARALIGKLICFREGNTRPRVMRFVRRAFSGTDISARDYMSRVTERIDFLKQKVYAWANRIRRYKRRVDRYTQNRTFQRDERWVYRAWERPDQGVADTHLPDDDAMCSFWRSIWSVPVSHTEGEWTREVERACDLVPEMGAITISPQDVVRAVRPLPNWKSPGPDGLHNFWIKWFTRSHARLAILFQSALESGSLPEFLTTGITHLLHKSGSTAEPKNYRPIACLPTVYKVLTSILRAKINKHIDDNSVMSASQNGCRNGSRGTKELLLIDIAISQQVRRSRRDLSTCWIDYKKAYDSVPHTWLMRVLELYKVDSTLRIFLMSCMGQWRTVLRYPGCRQIQRNSEPIRIERGIFQGDSLSPLWFCLALNPLSTLLEDSGLGYRLRRGGQVISHLLYMDDLKLFAPNDLQLMELLKVTETFSSAIRMEFGVDKCAVMHVKRGEIVESVGTQLSDSINLRSLSATETYKYLGMSEALGINVADMKQSLKERFFGRLKKVFNSLLSGGNKVRAFNGWVMPVLMYSFGILKWTQTELDALDRRVRTLLTTYRMHHPRSSVMRLYIPRRCGGRGFLNAKTLHNREICSLREYFLETDVGMHRDVVAVDKGLTPLSLAKENWRKPVVLDTNDRMEVWQSKELHGRFFRALHGPDVDLPASVAWLRSGDLFGETEGFVCAIMDEVMMTNNYRRFIVKDGTVDICRACHRPGESIRHIISGCSRLANGEYLHRHNLVARIIHQQLALKYNLVESEVPYYKYVPDPVLENGNITLYWDRSIVTDRTIVANKPDIVVVDRSERRAMIVDITVPHDGNLVKAEKDKQIKYLDLAHEVVDMWDVDSAIIVPIVVSAHGLIAKSLDQYLRRLSLGSWIKGLIQKAVLLDTARIVRRFLSLEP

SEQ ID NO: 10301 - protein, 1197 aa, Noctua janthe
MLTRSATRRARLSPPDPSLSSASPPPESSPIVSAVTPAVAVAPSSSDEYFSPPTTPPPVRRRGGRRPPDGLGPRGPPASDRVPAPGGSVPRMRWTQSINANVMHAYYGATEGGNNLTAYRVRMLSLFQVLEPAVNVSAQRLSDQVRVIQRNGMLDDTVLDRLRTEMQSSHVIATPPQTVVPPQSTIIPTHDNNVSNDMVTNVSTQCNEEMRCALEGAIREYRFMQPDLRPRVPRLPMHNKNKVLVAVLDSQLSNYFDNCENLTDAHSVLYCAAVAACRVAHVKFSDDRATRPKPAVPSWQYRIERRIGEARALIGKLICFREGNTRPRVMRFVRRAFSGTDISARDYMSRVTERIDFLKQKVYAWANRIRRYKRRVDRYTQNHTFQRDERWVYRAWERPDRGVADTHLPDDDAMCSFWRSIWSVPVSHTEGEWTREVERACDLVPEMGAITISPQDVVRAVRPLPNWKSPGPDGLHNFWIKWFTRSHARLAILFQSALESGSLPEFLTTGITHLLHKSGSTAEPKNYRPIACLPTVYKVLTSILRAKINKHIDDNSVMSASQNGCRNGSRGTKELLLIDMAISQQVRRSRRDLSTCWIDYKKAYDSVPHTWLMRVLELYKVDSTLRIFLMSCMGQWRTVLRYPGCRQIQRNSEPIRIERGIFQGDSLSPLWFCLALNPLSTLLEDSGLGYRLRRGGQVISHLLYMDDLKLFAPNDLQLMELLKVTETFSSAIRMEFSVDKCAVMHVKRGEIVESVGTQLSDSINLRSLSATETYKYLGMSEALGINVADMKQSLKERFFGRLKKVFNSLLSGGNKVRAFNGWVMPVLMYSFGILKWTQTELDALDRRVRTLLTTYRMHHPRSSVMRLYIPRRCGGRGFLNAKTLHNREICSLREYFLETDVGMHRDVVAVDKGLTPLSLAKENWRKPVVLDTNDRMEVWQSKELHGRFFRALHGPDVDLPASVAWLRSGDLFGETEGFVCAIMDEVMMTNNYRRFIVKDGTVDICRACHRPGESIRHIISGCSRLANGEYLHRHNLVARIIHQQLALKYNLVESEVPYYKYVPDPVLENGNITLYWDRSIVTDRTIVANKPDIVVVDRSERRAMIVDITVPHDGNLVKAEKDKQIKYLDLAHEVVDMWDVDSAIIVPIVVSAHGLIAKSLDQYLRRLSLGSWIKGLIQKAVLLDTARIVRRFLSLEP

SEQ ID NO: 10302 - protein, 1000 aa, Noctua janthe
MVTNVSTQCNEEMRCALEGAIREYRFMQPDLRPRVPRLPMHNKNKVLVAVLDSQLSNYFDNCENLTDAHSVLYCAAVAACRVAHVKFSDDRATRPKPAVPSWQYRIERRIGEARALIGKLIYFREGNTRPRVMRFVRRAFSGTDISARDYMSRVTERIDFLKQKVYAWANRIRRYKRRVDRYTQNRTFQRDERWVYRAWERPDQGVADTHLPDDDAMCSFWRSIWSVPVSHTEGEWTREVERACDLVPEMGAITISPQDVVRAVRPLPNWKSPGPDGLHNFWIKWFTRSHARLAILFQSALESGSLPEFLTTGITHLLHKSGSTAEPKNYRPIACLPTVYKVLTSILRAKINKHIDDNSVMSASQNGCRNGSRGTKELLLIDMAISQQVRRSRRDLSTCWIDYKKAYDSVPHTWLMRVLELYKVDSTLRIFLMSCMGQWRTVLRYPGCRQIQRNSEPIRIERGIFQDDSLSPLWFCLALNPLSTLLEDSGLGYRLRRGGQVISHLLYMDDLKLFAPNDLQLMELLKVTETFSSAIRMEFGVDKCAVMHVKRGEIVESVGTQLSDSINLRSLSATETYKYLGMSEALGINVADMKQSLKERFFGRLKKVFNSLLSGGNKVRAFNGWVMPVLMYSFGILKWTQTELDALDRRVRTLLTTYRMHHPRSSVMRLYIPRRCGGRGFLNAKTLHNREICSLREYFLETDVGMHRDVVAVDKGLTPLSLAKENWRKPVVLDTNDRMEVWQSKELHGRFFRALHGPDVDLPASVAWLRSGDLFGETEGFVCAIMDEVMMTNNYRRFIVKDGTVDICRACHRPGESIRHIISGCSRLANGEYLHRHNLVARIIHQQLALKYNLVESEVPYYKYVPDPVLENGNITLYWDRSIVTDRTIVANKPDIVVVDLSERRAMIVDITVPHDGNLVKAEKDKQIKYLDLAHEVVDMWDVDLAIIVPIVVSAHGLIAKSLDQYLRRLSLGSWIKGFIQKAVLLDTARIVRRFLSLEP

SEQ ID NO: 10303 - protein, 974 aa, Noctua janthe
MQPDLRPRVPRLPMHNKNRVLVAVLDSQLSNYIDNCEDLTDAHSVLYCAAVAACRVAHVKFSDDRATRPKPAVPSWQYRIERRIGEARAVIGKLICFREGNTRPRVMRFVRRAFSGTDISARDYMSRVTERIDFLKQKVYAWANRIRRYKRRVDRYTQNRTFQRDERWVYRAWERPDQGVADTRLPDDDAMCSFWRSIWSVPVSHTEGEWTREVERACDLVPEMGAITISPQDVVRAVRPLPNWKSPGPDGLHNFWIKWFTRSHARLAILFQSALESGSLPEFLTTGITHLLHKSGSTAEPKNYRPITCLPTVYKVLTSILRAKINKHIDDNSVMSASQNGCRNGSRGTKELLLIDMAISQQVRRSRKDLSTCWIDYKKAYDSVPHTWLMRVLELYKIDATLRTFLMSCMGQWRTVLRYPGCRQIQRNSEPIRIERGIFQGDSLSPLWFCLALNPLSTLLEDSGLGYRLRRGGQVISHLLYMDDLKLFAPNDLQLMELLKVTETFSSAIRMEFGVDKCAVMHVKRGEIVESVGTQLSDSINLRSLSATETYKYLGMSEALGINVADMKQSLKERFFGRLKKVFNSLLSGGNKVRAFNGWVMPVLMYSFGILKWTQTELDALDRRVRTLLTAYRMHHPRSSVMRLYIPRRCGGRRFLNAKTLHNREICSLREYFLETDVGMHRDVVAVDKGLTPLSLAKENWRKPVVLDTNDRMEVWQSKELHGRFFRALHGPDVDLSASVAWLRSGDLFGETEGFVCAIMDEVMMTNNYRRFIVKDGTVDICRACHRPGESIRHIISGCSRLANGEYLHRHNLVARIIHQQLALKYNLVESEVPYYKYVPDPVLENGSITLYWDRSIITDRTIVANKPDIVVVDRSERRAMIVDITVPHDENLVKAEKDKQIKYLDLAREVVDMWDVDSAIIVPIVVSAHGLIAKSLDQYLRRLSLGSWIKGLIQKAVLLDTARIVRRFLSLEP

SEQ ID NO: 10304 - protein, 1200 aa, Mythimna ferrago
MLTRAAARRARPPPPASSLSSASPPPEPSPIVSAVTPAVAAASSSSDEYYSPPTTPPPTRRRGGRRPPDCLGPRGPPASDRVPAPGGSVQRMRWTQSIKENVMRSYYGATEGGNNLTAYRVRMLSLFQVLEPAVNVSAQRLSDQVRVILRNHMLDDTVLDRLRTEMSDRVITPPSQPVVPAVVPPSSYISFHTDEVSSDTVTNVSNQCNSELRSALECAIREYRNIPPELRPRIPRLPMCNKNRALVAALDSQLSNYFDDCEDLTDTHSIMYCAAVAACRVAHVKFPNSDVATRPKPAVPAWQCRIERRIGGARALIGKLICFREGNTRPRVMRFVRRAFSGTEISPQDYMSRVTERIDFLKQKVYAWANRIRRYKRRVERYTQNRTFRSNERWVYRAWERPDQGVTDARLPDDDAMGSFWRSIWSVPVSHTEGDWTREVERACDPIPQMGAIDISPQDVARAVRPLPNWKSPGPDGLHNFWIKWFTRSHARLAYQFQSALESGSLPQFLTTGITHLLHKSGSAAEPKNYRPITCLPAVYKVLTSILRSKINSHIDENSIMSPSQNGCRNGSRGTKELLLIDMTISQQVRRSRKDLSTCWIDYRKAYDSVPHTWLMRVLELYKIDTTLRTFLMSCMRQWSTVLRYPGCRNIQRNSEPVRIERGIFQGDSLSPLWFCLALNPLSTLLENSGLGYRLKRGGQVISHLLYMDDLKLFAPNNLQLMELLKVTEIFSSAIRMEFGVDKCAVMHVKRGEVVESVSTQLTDSINLRSLSPTETYKYLGMSEALGISITGMKQSLRERFFGRLKKVFNSLLSGGNKVRAFNGWVMPVLMYSFGVLKWTQTELDALDRRVRTLLTAYRMHYPRSSVMRLYIPRKCGGRGFLNAKTLHNREVCSLREYFLAADVGMHRDVVAVDKGLTPLSLANENWRKPIVLDTNDRREVWQSKELHGRFFRALHGPDVDQLASVAWLRFGDLFGETEGFVCAIMDEVIMTNNYRRFVVKDGTVDICRACHRPGESIRHIVSGCSRLANGEYLHRHNLVARIIHQQLALKYSLVESEVPYYRYEPDPVLDNGHITLYWDRPIITDRTIVANKPDIVVVDRSERRAMIVDISVPHDENLVKAEKDKQIKYIDLAREVVDMWEVDSAVIVPIVVSANGLIAKSLDQHLRRLSLGDWIKGLIQKAVLLDTARIVRRFLSLEP

SEQ ID NO: 10305 - protein, 1200 aa, Mythimna ferrago
MLTRAAARRARPPPPASSLSSASPPPEPSLNASAVTPAATVASSSSDEFYSPPTSPPPARRRRGRRPPSSLGPRGPPASDRVPAPGGSVQRMRWTQSINENVMRSYYGATEGGNNLTAYRVRMLSLFQVLEPAVNVSAQRLSDQVRVILRNHMLDDSVLDRLRTEMSDRVITPPSQPVVPVVVPPSSHISFHTDEVSTDMVTNVSTQCNNELRSALECAIREYRNIPPELRPRIPRLPMCNKNRALVAALDSQLSNYFDDCEDLTETHSIMYCAAVAACRVAHVKFPDSDEATRPKLAVPAWQCRIERRIGGARALIGKLICFREGNTRPRVMRFVRRAFSGTNISPRDYMSRVTERIDFLKQKVYAWANRIRRYKRRVERYTQNRTFRSNERWVYRAWERPDQGVTDARLPEDDAMCSFWRSIWSVPVSHTEGDWTREVERACDPIPQMGAITISPQDVARAVRPLPNWKSPGPDGLHNFWIKWFTRSHARLAYQFQSALESGSLPQFLTTGITHLLHKSGSTAEPKNYRPITCLPTVYKVLTSILRSKINSHIDENSIMSPSQNGCRNGSRGTKELLLIDMTISQQVRRSRKDLSTCWIDYKKAYDSVPHTWLMRVLELYKIDTTLRTFLMSCMRRWSTVLRYPGCRNIQRNSEPVRIERGIFQGDSLSPLWFCLALNPLSTLLENSGLGYRLKRGGQVISHLLYMDDLKLFAPNNLQLMELLKVTETFSSAIRMEFGVDKCAVMHVKRGEVVESVGVQLTDSINLRSLSPTETYKYLGMSEALGISTIDMKQSLKERFFGRLKKVFNSLLSGGNKVRAFNGWVMPVLMYSFGVLKWTQTELDALDRRVRTLLTAYRMHHPRSSVMRLYIPRKSGGRGFLNAKTLHNREVCSLREYFLAADVGMHRDVVALDKGLTPLSLANENWRKPIVLDTDDRREVWQSKELHGRFFRALHGPDVDQLASVAWLRFGDLFGETEGFVCAIMDEVIMTNNYRRFIVKDGTVDICRACHRPGESIRHIISGCSRLANGEYLHRHNLVARIIHQQLALKYSLVESEVPYYRYEPDPVLDNGHITLYWDRPIITDRTIVANKPDIVVVDRSERRAMIVDISVPHDENLVKAEKDKQIKYIDLAREVVDMWEVDSAIIVPIVVSANGLIAKSLDQHLRRLSLGDWIKGLIQKAVLLDTARIVRRFLSLEP

SEQ ID NO: 10306 - protein, 1200 aa, Mythimna ferrago
MLTRAAARRARPPPPASSLSSASPPPDPSPTVSAVTPAVAAASSSSDEYYSPPTTPPPARRRGGRRPPACFGPQGPPASDRVPATGGSVPRMRWTQSTNENVMRAYYGATEGGNNLTAYRVRMLSLFQVLEPAVNVSAQRLSDQVRVIQRNHMLDDTVLDRLRTEMSNHVIAPSSQPVVPVMVPPSNHVANPADVESTDMVIQVSTQCTNELRSALECAIREYRNMPSVLRPRLPRLPMHNKNKALVAALDMQLSNYFDNCKDLTDAHSIMYCAAVAACRVAHVKFPNSDVATRPKPAVPAWQCRIERRIGGARALIGKLICFREGNTRPRVMRFVRRAFSGTDICPRDYMLRVTERIDFLKQKVYAWANRIRRYKRRVERYTQNRAFQSNERWVYRAWERPDQGVTDTRLPDDDAMCSFWRNIWSVPVSHTEGGWTREVEQACEPITEMGAITISPQDVARAVRPLPNWKCPGPDGLHNFWIKWLQRSHACLASQYQAALESSSLPEFLTTGVTHLLHKSGSTAEPKNYRPITCLPTVYKVLTSILRDKINNHIDNNSIMSASQNGCRKGSRGTKELLLIDMAISQQVRRSRKDLSTCWIDYKKAYDSVPHTWLMRVLELYKIDATLRTFLMSCMRQWRTVLRYPGCRNIQRSSEPVRIERGIFQGDSLSPLWFCLALNPLSTLLENSGLGYQLKRGGQVTSHLLYMDDLKLFAPNKLQLMELLKVTETFSSAIRMEFGVDKCAVMHVKRGEIVESVSTQLSDSISLRSLSATETYKYLGMSEALGINATDMKQSLRERFFGRLKKVFNSLLSGGNKVRAFNGWVMPVLMYSFGVLKWTQTELDALDRRVRSLLTANRMHHPRSSVMRLYIPRKCGGRGFLNAKTLHNREVCSLREYFLAADVGMHRDVVAVDKGLTPLSLANENWRKPVVLDTNDRKDVWQSKELHGRFFRALHGPDVDQLASVAWLRVGDLFGETEGFVCAIMDEVIMTKNYRRFIVKDGTVDICRACHHPGESIRHIISGCSRLANGEYLHRHNLVARIIHQQLALKYSLVESEVPYYRYVPDPVLDNGDITMYWDRSIITDRTIVANKPDIVVVDRSERRAMIVDISVPHDENLVKAEKDKQIKYIDLAREVVDMWDVDSAIIVPIVVSGNGLIAKSLDQHLRRLALGSWIKGLIQRAVLLDTARIVRRFLSLEP

SEQ ID NO: 10307 - protein, 930 aa, Mythimna ferrago
MYCAAVAACRVAHVKFPNSDAATRPKPAVPAWQCRIERRIGGARALIGKLICFREGNTRPRVMRFVRRAFSGTDISPRDYMSRVTERIDFLKQKVYAWANRIRRYKRRVERYTQNRTFRSNERWVYRAWERPDQGVTDSRLPDDDAMSSFWRSIWSVPVSHTEGDWTREIERACDPIPQMGAIDISPQDVARAVRPLPNWKSPGPDGLHNFWIKWFTRSHARLAYQFQSALESGSLPQFLTTGITHLLHKSGSTAEPKNYRPITCLPTVYKVLTSILRSKINNHIDENSIMSPSQNGCRNGSRGTKELLLVDMTISQQVRRSRKDLSTCWIDYKKAYDSVPHTWLMRVLELYKIDTTLRTFLMSCMRQWSTVLCYPRCRNIQRNSEPVRIERGIFQGDSLSPLWFCLALNPLSTLLENSGLGYRLKRGGQVISHLLYMDDLKLFAPNNLQLMELLKVTETFSSAIRMEFGVDKCAVMHVKRGEVVESVSTLLTDSINLRSLSPTETYKYLGMSEALGMSITNMKQSLKERFFGRLKKVFNSLLSGGNKVRAFNGWVMPVLMYSFGVLKWTQTELDALDRRVRTLLTAYRIHHPRSSVMRLYIPRKCGGRGFLNAKTLHNREVCSLREYFLAADVGMHRDVVAVDKGLTPLSLAIENWRKPIVLDTNDRREVWQSKELHGRFFRALHGPDVDQLASVAWLRFGDLFGETEGFVCAIMDEVIMTNNYRRFIVKDGTVDICRACHRPGESIRHIISGCSRLANGEYLHRHNLVARIIHQQLALKYSLVESEVPYYRYEPDPVLDNGHITLYWDRPIITDRTIVANKPDIVVVDRSERRAMIVDISVPHDENLVKAEKDKQIKYIDLAREVVDMWEVDSAVIVPIVVSANGLIAKSLDQHLRRLSLGDWIKGLIQKAVLLDTARIVRRFLSLEP

SEQ ID NO: 10308 - protein, 1200 aa, Mythimna ferrago
MLTRSRARSQIAQPTSSGSSLSSASQPPGPAPAVSPEIPVAAVASSSSDEYFSPPTTPPPARRRGRGRPPACLGPRGPPASDRVLAAGGSVQRMRWTQSINENVMRSYFGATEGGTNLTAYRGRMLSLFQVLEPAVNVSAQRLSDQVRVIQRNRMLDDAVLDRLRLESRNGRVSPISPPAAVECQPSVSPRPDHVGEDDDDEAISVSTQCNARLRSALEDAFREYRSIPPELRPRLPRLPMHRKNRALVCALDSQLSNCFDSSEDLSDTHSILYCAAAAACRVAHVKIPNNDRATRPAKPAWQCRIERRIGEARALIGKLICFREGNTRPRVMRFVRRAFSGTDISPRDYLPRITERIDFLKQKVYAWANRIRRYKRRVERYTQNHTFQSNERWVYRAWERPDQSVIDTRLPDDDAMYSFWRSIWSVPVNHTEGDWTREIERECELIPEMGAINISPQDVARAVRPLPNWKSPGPDGLHNFWLKWFQSSHARLASQFQSTLESGSLPQFLTTGITHLLHKSGSTAEPKNYRPITCLPTVYKVLTSILRAKINNHIETNSIMSASQNGCRNGSRGTKELLLIDVAISQQVRRSRRDLSTCWIDYKKAYDSVPHTWLMRVLELYKVDATLRAFLMSCMGQWRTVLHYPGCRRVSENSEPLRIERGIFQGDSLSPLWFCLALNPLSTLLEGSGLGYRLRREGQVISHLLYMDDLKLFASNNFQLMELLKVTETFSSAIRMEFGLDKCAVMHVKRGEIMESVGTQLSDSIHLRSLCSTETYKYLGMSEALGINAADVKQSLRERFFGRLNKVLNSLLSGGNKVRAFNGWVMPVLMYSFGILKWTQTELDALDRRVRTLLTANRMHHPRSSVMRLYIPRKCGGRGFLNAKTLHNREVCSLREYFLETDVGMHRDVVAVDKGLTPLSLASENWRKPIVMDTNERKEVWKGKELHGRFYRALHGPDVDLLASVSWLRFGNLFGETEGFVFAIMDEVMMTNNYRKYIVKDGTVDICRACHRPGESIRHIISGCSHLANGDYLHRHNLVARIIHQQLALKYNLVESEVPYYKYVPDPVLENGSVTLYWDRSIITDRTIVANKPDIVVIDRLERRTMIVDIAVPHDENLVKAEKDKQTKYLDLAREVVDMWEVDRAIIVPIVVTANGLIAKSLDQHLRRLSLGSWIKGLIQKAVLLDTARIVRRFLSQEP

SEQ ID NO: 10309 - protein, 1033 aa, Mythimna ferrago
MMNITAPSQPVVPVVVPPPSHISFHTDEVSTDTVTNVSTQCNNELRSALECAIREYRNMPLEFRPRLPRLPMRNKNKALVAALDSQLSNYFDDCEDLTDTHSIMYCAAVAACRVAHVKFPNSDVATRPKPAVPAWQCRIERRIGGARALIGKLICFREGNTRPRVMRFVRRAFSGTDISPRDYMSRVTERIDFLKQKVYAWANRIRRYKRRVERYTQNSTFRSNERWVYRAWERPDQGVTDTRLPDDDAMCLFWRNIWSVPVSHTEGGWTREVERACESITEMGAITISPQDVARAVRPLPNWKSPGPDGLHNFWIKWLQRSHARLASQYQAALESGSLPEFLTTGVTHLLHKSGSTAEPKNYRPITCLPTVYKVLTSILRAKINHHVDNNAIMSASQNGCRNGSRGTKELLLIDMAISQQVRRSRKDLSTCWIDYKKAYDSVPHTWLMRVLELYKVDATLRTFLMSCMRQWRTVLRYPGCRNIQRNSEPVRIERGIFQGDSLSPLWFCLALNPLSTLLENSGLGYRLKRGGQAISHLLYMDDLKLFAPNNLQLMELLKVTETFSSAIRMEFGVDKCAVMHIKRGEIVESVGIQLSDSIHLRSLSPTETYKYLGMSEALGINAADMKQSLKERFFGRLKKVLNSLLSGGNKVRAFNGWVMPVLMYAFGVLKWTQTELDALDRRVRTLLTAYRMHHPRSSVMRLYIPRKCGGRGFLNAKTLHNREVCSLREYFLAADGGMHRAVVAVDKGLTPLSLANENWRKPVVLDTNVRKEVWQSKELHGRFFRALHGPDVDQLASVAWLRVGDLFGETEGFVCAIMDEVIMTNNYRRFIVKDGTVDICRACHRPGESIRHIISGCSRLANGEYLHRHNLVARIIHQQLALKYSLVESEVPYYRYVPDPVLDSGDITLYWDRSIITDRTIVANKPDIVVVDRRERRAVIVDISVPHDENLVKAEKDKQIKYIDLAREVIDMWNVDSAIIVPIVVSANGLIAKSLDQHLRRLSLSGWIKGLIQKAVLLDTARIVRRFLSLEP

SEQ ID NO: 10310 - protein, 1199 aa, Acronicta aceris
MLTRARARYIERHTRLKTPDSSPSSALQQPQHGRTSPDAAATASSSSDEYYSPPTSPPPVRRRGGRRPPDRLGPRGPLASGGIPASGGSVQRMRWTQSLNENVMRAYYGATEGGTNLTAYRGRMLSLFQALEPTIDVSTQRLSDQVRVIQRNHMLDDSVLDQLRSEVQSSRAIAHPSQSVAPSAMLPQTNLAEVGSDDRVTNVSTQYNEKLRSALEGAFREYRSSPPELRPRLPRLPMNNKNLALVCALDSLLSDYFDSSEDLADTHSILYCAAVAACRVAHVKFPESDRATRPKPMIPAWQSRIEQRIGEARALIGKLICFREGNTRPRVMRFVRRAFSGTNIDPRDYASCVTERIDFLKQKVYAWANRIRRYKRRAERYSLNRAFQGDQRWVYRTWDRPDNGVSDVCRPNDDAMSLFWRNIWSVPVNHTEDDWICDVERACESLPAMEEINISPQDVACAVHSVPNWKAPGPDGLHNFWIKWLRSSHARLASQFQSSLESGTLPQFLTTGITHLLHKSGDTADPKNYRPITCLPTVYKLLTSILRAKICYHIDESSIMSASQNGCRNGSRGTKELLLIDMTISQQVRRLRKNLSTCWIDYKKAYDSVPHTWLMRVLELYKVDVSLRTFLRSCMGQWRTVLHYPGCRQIQRISEPIRIERGIFQGDSLSPLWFCLALNPLSTLLEESRLGYRLRRGGQVISHLLYMDDLKLFASSDLHLMELLKITENFSNSIRMEFGVEKCAVMHVKRGGIVESVGIQLSDSTQLRSLASTETYKYLGMAEALGINVADMKQSLQVRFFGRLTKVLKSLLSGGNKVRAFNGWVMPVLMYSFGVLKWTQTELETLDRKVRTLLTAYRMHHPRSSVMRLYIPRKCGGRGFLNAKNLHNREVCSLREHFLKTEMGMHRDVVAVDNGLTPLSMAKENWRKPVVLSTNDRRNVWQGKELHGRYYRALHEPGVDTLASVSWLRFGDLFGETEGFVCAIMDEVMMTNNYRKFIVKDGTVDICRACHRPGESIRHIISGCSRLANGEYLHRHNLVARIIHQQLALKYNLVESEVPYYKYVPDPVLENGHATLYWDRSIITDRTIIANKPDIVVIDRLERRAMIVDITVPHDENLFKAEKEKEIKYLDLAHEVVDMWGVDAAIIVPIVVSANGLIAKSLDRHLKRLSLGGWIKGLIQKAVLLDTARIVRRFLSLGP

SEQ ID NO: 10311 - protein, 1199 aa, Acronicta aceris
MLTRARARYIERHTRLTTPDSSPSSALQQPQHGRTSPDAAATASSSSDEYYSPPTSPPPVRRRGGRRPPDRLGPRGPLASGGIPASGGSVQRMRWTQSLNENVMRAYYGATEGGTNLTAYRGRMLSLFQALEPTIDVSTQRLSDQVRVIQRNHMLDDSVLDQLRSEVQSSRAIAHPSQSVAPSAMLPQTNLAEVGSDDRVTNVSTQYNEKLRSALEGAFREYRSSPPELRPRLPRLPMNNKNLALVCALDSLLSDYFDSSEDLADTHSILYCAAVAACRVAHVKFPESDRATRPKPMIPAWQSRIEQRIGEARALIGKLICFREGNTRPRVMRFVRRAFSGTNIDPRDYASCVTERIDFLKQKVYAWANRIRRYKRRAERYSLNRAFQGDQRWVYRTWDRPDNGVSDVCRPNDDAMSLFWRNIWSVPVNHTEDDWICDVERACESLPAMEEINISPQDVACAVHSVPNWKAPGPDGLHNFWIKWLRSSHARLASQFQSSLESGTLPQFLTTGITHLLHKSGDTADPKNYRPITCLPTVYKLLTSILRAKICYHIDESSIMSASQNGCRNGSRGTKELLLIDMTISQQVRRLRKNLSTCWIDYKKAYDSVPHTWLMRVLELYKVDVSLRTFLRSCMGQWRTVLHYPGCRQIQRISEPIRIERGIFQGDSLSPLWFCLALNPLSTLLEESRLGYRLRRGGQVISHLLYMDDLKLFASSDLHLMELLKITENFSNSIRMEFGVEKCAVMHVKRGGIVESVGIQLSDSTQLRSLASTETYKYLGMAEALGINVADMKQSLQVRFFGRLTKVLKSLLSGGNKVRAFNGWVMPVLMYSFGVLKWTQTELETLDRKVRTLLTAYRMHHPRSSVMRLYIPRKCGGRGFLNAKNLHNREVCSLREHFLKTEMGMHRDVVAVDNGLTPLSMAKENWRNPVVLSTNDRRNVWQGKELHGRYYRALHEPGVDTLASVSWLRFGDLFGETEGFVCAIMDEVMMTNNYRKFIVKDGTVDICRACHRPGESIRHIISGCSRLANGEYLHRHNLVARIIHQQLALKYNLVESEVPYYKYVPDPVLENGHATLYWDRSIITDRTIIANKPDIVVIDRLERRAMIVDITVPHDENLSKAEKEKEIKYLDLAHEVVDMWGVDAAIIVPIVVSANGLIAKSLDRHLKRLSLGSWIKGLIQKAVLLDTARIVRRFLSLGP

SEQ ID NO: 10312 - protein, 868 aa, Eilema sororculum
MRYVTRAFAGTDISPQDYTSRVTERIDFLKQKVYAWANRIRRYKKRVDRYTVNRMFQRDQRWVYRSWERTEESVDDVRRPDAEATNAFWRSIWSVPVNHTEGDWMREVERACETIPEMEKINIDAIDVDCAVRSLSNWKSPGPDGLHNFWLKWLRSSHVVLASQFQSAVESGTLPAFMMTGVTHLLHKTGSTLEPNNYRPITCLPTVYKLLTSILRAKINNHINNNSIMCASQNGCRNGARGTKELLLIDMAISQQARRNRKDLTACWIDYKKAFDSVPHTWLLRVLELYKVNTTLCTFLRSCMGQWRTVLFYPGCRQALGSGEPITIERGIFQGDSLSPLWFCLALNPLSTLLVNSGLGYRLRREGQMVSHLFYMDDLKLFAHTNPQLIALLKVTETFSNSIKMAFGVDKCAVIHVKRGRVVESEGIQLSDSTNLRSLLVTETYKYLGMSQALCINEVDMKQMLQERFFGRLKKVLNSLLSGGNKVRACNSWVMPLLMYSFGILKWTQTELDTIDRKVRTQLTAFRMHHPRSSVMRLYIPRKCGGRGFLNAKTLHNREVCNLRDYFLTSNVDMHRDVVNVDTGLTPLGLAKENWRRPTIVSTDSRREVWQSKELHGRFYRALHRPEVDLLASVAWLRFSDLFGETEGFVCAIADEVIKTNNYRKYIMRDGTIDICRACHQPGESLRHITSGCSRLANGEYLHRHNQVARIIHQRLALKYNLVEVEVPYYKYVPEPVLENSHITLYWDRSIITDRTVVANKPDIVVIDRSERRALIVDVTIPHDENLVKAEKDKQVKYLDLAHEVVDMWNVGSAIIVPIVVSVNGLIAKSLDQHLKRLGLDGWVKGQMQKAVLLDTARIVRKFLSLEP

SEQ ID NO: 10313 - protein, 1191 aa, Eilema sororculum
MLTRAQARNRNAQTTSPDSSLSSAAQPPAMEPAASSSSSSDEFFSPPTSPTPVRRPGRGRPPTCLGPRRPPASNRAPAAGGNVHRMRWTNSINENVMRAYFAATEGGTNLSAYRTRMLPLFQALEPSINTSAQRLSDQVRVIQRNRMLNETVLETLRQECLRNICVTPAPAPAPASTAEINNDTCVAPDDTPIPVSIQYNEEIKEALECALREYRSVPVHVRPRLPRLPIHRRNIALVSALDSLLPRYLENSENLGDTHSILYCTAVAACRMAGAKFPIKDPAIRPKSAIPAWQCRIERRVAEARVLIGKLICFRSGNTRPRVMRYVTRAFTGTDISPQDYTSRVTERIDFLKQKVYAWANRIRRYKRRVDRYTVNHMFQRDQRWVYRSWERTDESVDDVRRPDAEATNAFWRSIWSVPVSHTEGDWMREVERACETIPEMEEIYIDATDVDCAVHSLSNWKSPGPDGLHNFWLKWLRSSHVVLASQFQSAIESGTLPAFMTTGVTHLLHKTGSTLEPNNYRPITCLPTVYKLLTSILRAKINNHINNNSIMCASQNGCRNGARGTKELLLIDMAISQQARRNRKDLTACWIDYKKAFDSVPHTWLLRVLELYKVNTTLCTFLRSCMGQWRTVLFYPGCRQALGGGVPITIERGIFQGDSLSPLWFCLALNPLSTLLVNSGLGYRLRREGQMVSHLFYMDDLKLFAHTNPQLIALLKVTETFSNSIKMAFGVDKCAVIHVKRGQVVESEGIQLSDSTNLRSLLVTETYKYLGMSQALCINEVDMKQMLQERFFGRLKKVLNSLLSGGNKVRACNSWVMPLLMYSFGILRWTQTELDTIDRKVRTQLTAFRMHHPRSSVMRLYIPRKCGGRGFLNAKTLHNREVCNLRDYFLKSNVDMHRDVVNVDTGLTPLGLAKENWRRPTIVSTDSRREVWQSKELHGRFYRALHRPEVDLLASVSWLRFSDLFGETEGFVCAIADEVIKTNNYRKYIMRDGTIDICRACHQPGESLRHITSGCSRLANGEYLHRHNQVARIIHQRLALKYNLVEVEVPYYKYVPEPVLQNSHITLYWDRSIITDRTVVANKPDIVVIDRSERRALIVDVTIPHDENLVKAEKDKQVKYLDLAHEVVDMWNVDSAIIVPIVVSVNGLIAKSLDQHLKRLGLDGWVKGQMQKAVLLDTARIVRKFLSLEP

SEQ ID NO: 10314 - protein, 975 aa, Eilema sororculum
MPVHVRPRLPRLPIHRRNIALVSALDSLLPRYLENSENLGDTHSILYCTAVAACRMAGAKFPIKDPAIRPKSAIPAWQCRIERRMTEARVLIGKLICFRSGNTRPRVMRYVTRAFAGTDISPQDYTSRVTERIDFLKQKVYAWANRIRRYKKRVDRYTVNRMFQRDQRWVYRSWERTEESVDDVRRPDAEVTNAFWRSIWSVPVSHTEGDWMHEVERACETIPEMEEINIDAIDVDCAVRSLSNWKSPGPDGLHNFWLKWLRSSHVVLASQFQSAVESGTLPAFMTRGVTHLLHKTGSTLEPNNYRPITCLPTVYKLLTSILRAKINNHVNNNSIMCASQNGCRNGARGTKELLLIDMAISQQARRNRKDLTACWIDYKKAFDSVPHTWLLRVLELYKVNTTLCTFLRSCMGQWRTVLFYPGCRQALGGGVPITIERGIFQGDSLSPLWFCLALNPLSTLLVNSGLGYRLRREGQMVSHLFYMDDLKLFAHTNPQLITLLKITETFSNSIKMAFGVDKCAVIHVKRGRVVESEGIQLSDSTNLRSLLVTETYKYLGMSQALCINEVDMKQMLQERFFGRLKKVLNSLLSGGNKVRACNSWVMPLLMYSFGILKWTQTELDTIDRKVRTQLTAFRMHHPRSSVMRLYIPRKCGGRGFLNAKTLHNREVCNLRDYFLKSNVDMHRDVVNVDTGLTPLGLAKENWRRPTIVSTDSRREVWQSKELHGRFYRALHRPEVDLLASVSWLRFSDLFGETEGFVCAIADEVIKTNNYRKYIMRDGTIDVCRACHQPGESLRHITSGCSRLANGEYLHRHNQVARIIHQRLALKYNLVEFEVPYYRYVPEPVLENTHITLYWDRSIITDRTVVANKPDIVVIDRSERRTLIVDVTIPHDENLVKAEKDKQVKYLDLAHEVVDMWNVDSAIIVPIVVSVNGLIAKSLDQHLKRLGLDGWVKGQMQKAVLLDTARIVRKFLSLEP

SEQ ID NO: 10315 - protein, 1113 aa, Ptilodon capucinus
MRWTSSINENVMRAYYEATEGGTNLTAYRNRMLPLFQSLEPAVNVSAQRLSDQVRVIQRGNMLADTVLDRLRSEMQSRRVVPVASSQPAAQPVASATVTSRLAADSDVDRDNAPINVSNQYNELLRSTLEDVVRVYRSMPNHLRPRIPRLPMHKGNRALVGALDSLLSIYFDSSDNLADTHSILYCAAITVCRVARVKVFNTDTATRPKPAVPAWQCRIERRISEARALIGKLSCFREGNTRPRVMRFVKRAFAGTDVSPREYISRVTERIDFLKQKIYAWANRIRRYKVRVDRYSQNSMFQRDQRWVYRSWERPSEPVSELQRPDDNATTTFWRDIWSVPVTHYEGDWIGDVERMCEPIKEMEAISIGPLDVANAVRSLPNWKAPGPDGLHNFWLKWLRSSHVRLAYQFQLALQSGSLPEFITTGVTHLLHKTGSTTDPKNYRPITCLPTIYKTLTSILRAKIARHVEDNSIMSASQNGCRSGSRGTKELLLIDMTICQQARRNRKDLSTCWIDYKKAYDSVPHTWLVRVLELYKIDTTLRTFLESCMRQWKTVLLCPGSRQILGNGEPIRIERGIFQGDSLSPLWFCLALNPLSTLLEESGFGFRLRRGGQVISHLLYMDDLKLFAPTALQLTGLLKVTETFSNSIRMEFGVDKCAVMHAKQGRLVESEGIQLSDSIQLRSLAATETYKYLGMSQGLGISETDMKQLLRDRFLGRLKKVLKSILSGGNKVRAYNGWVMPVLMYSFGILKWTQTELDTLDRTVRTTLTSYRMHHPRSSVMRLYIPRKCGGRGFLNVKTLHNREICSLREYFLRADGEMHVDVVAVDNGLTPLSLAKENWRKPVVLTTDDRRLVWQGKELHGRYYRALHGPDVDLAASVAWLRFGDLFGETEGFVCAIMDEVVMTNNYRKYILRDGTIDICRACHSPGESLRHIISGCSRLANGQYLHRHNQVARIIHQQLALKYRLVTSEVPYYRYEPQPVLEEGHISLYWDRSIITDRTIVANKPDIVLIDRQERRAMIVDITVPHDENLVKAEKDKESKYLDLAHEVVDMWDIDAAIIVPIVVSAHGLLAKSLDKHLKRLALGGWIKGQIQKAVLLETARIVRKFLSLEP

SEQ ID NO: 10316 - protein, 1212 aa, Ptilodon capucinus
MTDAPRRNPRRLCRQRTVNEPNAQSTPPDPSPRSASPSPASIIRTSVTAVASSESDEYFSPPTSPPPVRRQRGRPPGHLGLLGQPAPNRVLVPSGVVRRMRWTSSINENVMRAYYEATEGGTNLTAYRNRMLPLFQSLEPAVNVSAQRLSDQVRVIQRGNMLADTVLDRLRSEMQSRRVVPVASSQPAAQPVASATVTSRLAADSDVDRDNSPIDVSNQYNDLLRSTLEDVVRVYRSMPNHLRPRIPRLPMHKGNRAIVGALDSLLSIYFDSSDNLADTHSILYCAAITVCRVARVKVFNTDTATRPKPAVPAWQCRIERRISEARALIGKLSCFREGNTRPRVMRFVRRAFAGTDVSPREYISRVTERIDLLKQKIYAWANRIRRYKVRVDRYSQNSMFQRDQRWVYRSWERPNEPVSELQRPDDNAMTTFWRDIWSVPVTHYEGDWIGDVERMCEPIKEMEAISIGPLDVANAVRSLPNWKAPGPDGLHNFWLKWLRSSHVRLASQFQSALQSGSLPEFITTGVTHLLHKSGSTTDPKNYRPITCLPTIYKTLTSILRAKIARHVEDNSIMSASQNGCRSGSRGTKELLLIDMTICPQARRNRKDLSTCWIDYKKAYDSVPHTWLVRVLELYKIDTTLRTFLESCMRQWKTVLLCPGSRQILGNGEPIRIERGIFQGDSLSPLWFCLALNPLSTLLEESGFGFRLRRGGQVISHLLYMDDLKLFAPTALQLTGLLKVTETFSNSIRMEFGVDKCAVMHAKQGRLVESEGIQLSDSIQLRSLAATETYKYLGMSQGLGINETDMKQLLRDRFLGRLKKVLKSLLSGGNKVRAYNGWVMPVLMYSFGILKWTQTELDTLDRTVRTTLTAYRMHHPRSSVMRLYIPRKCGGRGFLNVKTLHNREICSLREYFLRADGEMHADVVAVDNGLTPLSLAKENWRKPVVLTTDDRRLVWQGKELHGRYYRALHGPDVDLAASVSWLRFGDLIGETEGFVCAIMDEVVMTNNYRKYILRDGTIDICRACHRPGESLRHIISGCSRLANGQYLHRHNQVARIIHQQLALKYRLVTSEVPYYRYEPQPVLEEGHISLYWDRSIITDRTIVANKPDIVLIDRQERRAMIVDITVPHDENLVKAEKDKESKYLDLAHEVVDMWDIDAAIIVPIVVSAHGLLAKSLDKHLKRLALGGWIKGQIQKAVLLETARIVRKFLSLEP

SEQ ID NO: 10317 - protein, 1113 aa, Ptilodon capucinus
MRWTSSINENVMRAYYEATEGGTNLTAYRNRMLPLFQSLEPAVNVSAQRLSDQVRVIQRGNMLADTVLDRLRSEMQSRRVVPVASSQPAAQPVASATVTSRLAADSDVDRDNAPINVSNQYNELLRSTLEDVVRVYRSMPNHLRPRIPRLPMHKGNRALVGALDSLLSIYFDSSDNLADTHSILYCAAITVCRVARVKVFNTDTATRPKPAVPAWQCRIERRISEARALIGKLSCFREGNTRPRVMRFVKRAFAGTDVSPREYISRVTERIDFLKQKIYAWANRIRRYKVRVDRYSQNSMFQRDQRWVYRSWERPSEPVSELQRPDDNATTTFWRDIWSVPVTHYEGDWIGDVERMCEPIKEMEAISIGPLDVANAVRSLPNWKAPGPDGLHNFWLKWLRSSHVRLASQFQSALQCGSLPEFITTGVTHLLHKTGSTTDPKNYRPITCLPTIYKTLTSILRAKIARHVKDNSIMSASQNECRSGSRGTKELLLIDMTICQQARRNRKDLSTCWIDYKKAYDSVPHTWLVRVLELYKIDTTLRTFLESCMRQWKTVLLCPGSRQILGNGEPIRIERGIFQGDSLSPLWFCLALNPLSTLLEESGFGFRLRRGGQVISHLLYMDDLKLFAPTALQLTGLLKVTETFSNSIRMEFGVDKCAVMHAKQGRLVESEGIQLSDSIQLRSLAATETYKYLGMSQGLGISETDMKQLLRDRFLGRLKKVLKSLLSGGNKVRAYNGWVMPVLMYSFSILKWTQTELDTLDRTVRTTLTAYRMHHPRSSVMRLYIPRKCGGRGFLNVKTLHNREICSLREYFLRADGEMHVDVVAVDNGLTPLSLAKENWRKPVVLTTDDRRLVWQGKELHGRYYRALHGPDVDLAASVAWLRFGDLFGETEGLVCAIMDEVVMTNNYRKYILRDGTIDICRACHRPGESLRHIISGCSRLANGQYLHRHNQVARIIHQQLALKYRLVTSEVPYYRYEPQPVLEEGHISLYWDRSIITDRTIVANKPDIVLIDRQERRAMIVDITVPHDENLVKAEKDKESKYLDLAHEVVDMWDIDAAIIVPIVVSAHGLLAKSLDKHLKRLALGGWIKGQIQKAVLLETARIVRKFLSLEP

SEQ ID NO: 10318 - protein, 1199 aa, Agrochola circellaris
MLTRSATRRARLLPPDSSLSSASPPPVPSPTVSAGTTPAAAVASSSSDEYFSPPTTPPPARRRGGHRPPVGLGPRGPPASDRVPAPGGSVQRMRWTQSINENVMRSYYGATEGGNNLTAYRVRMLSLFQVLEPAAVNVSAQRLSDQVRVILRNHMLDDTVLDRLRSEMRNSHATAPPSQTVMVAPQFTINQVDEGIDDMATNVSTQYNEELRSALERAIREYRSMSPELRPRLPRLPMHNKNRALVAALDSQLSNYFDDCEDLTDTHSILYCAAVAACRVAHVKFANDSRATRPKPAVPAWQCRIERRIGGARALIGKLICFREGNTRPRVMRFVRRAFSGTDISPEDYVSRATERIDFLKQKVYAWANRIRRYKRRVERYTQNRTFQSDERRVYRAWEQPNQGVADARLPDDDAMCSFWRSIWSAPVSHTEGDWTREVERACDPIPEMGAITICPQDVARAVRPLPNWKSPGPDGLHNFWIKWFKRSHARLAAQYQTALESGSLPEFLTTGVTHLLHKSGSTADPKNYRPITCLPTVYKVLTSILRAKINKHIDTNSIMSASQNGCRNGSRGTKELLLIDMTISQQVRRSRKDLSTCWIDYKKAYDSVPHTWLMRVLELYKVDATLRTFLLSCMGQWRTVLRYPGCRNIQRNSEPIRIERGIFQGDSLSPLWFCLALNPLSTLLEGSDLGYRLRRGGQVISHLLYMDDLKLFAPNNFQLMELLKVTETFSRAIRMEFGVDKCAVMHVKRGEIVESVGTQLTDSINFRALSASETYKYLGMSETLGINVTDMKQSLKERFFGRLKKVFNSFLSGGNKVRAFNGWVMPVLMYSFGVLKWTQTELDALDRRVRTLLTGYRMHHPRSSVMRLYIPRKCGGRGFLNAKTLHNREICSLREYFLEADVGMHRDVVAVDKGLTPLSLAKENWRKPAVLDTNDRKEVWQNKELHGRYFRALHGPDVDLLASVAWLRFGDLFGETEGFVCAIMDEVMMTNNYRRFIVKDGTVDICRACHRPGESIRHIISGCSRLANEEYLHRHNLVARIIHQQLALKYSLVESEVPYYRYVPDPVLESGHITLYWDRSIITDRSIVANKPDIVVVDRAERRTMIIDITVPHDGNLVKAEKDKQIKYLDLAREVVDMWDVDSAIIVPIVVSANGLIAKSLDQHLRRLSLGGWIKGLIQKAVLLDTARIVRRFLSLEP

SEQ ID NO: 10319 - protein, 1198 aa, Agrochola circellaris
MLTRSATRRARLLSPDSSLSSASPPPVPSPTVSAGTTPAAAVASSSSDEYFSPPTTPPPARRRGGHRPPVGLGPRGPPASDRVPAPGGSVQRMRWTQSINENVMRSYYGATEGGNNLTAYRVRMLSLFQVLEPAVNVSAQRLSDQVRVILRNHMLDDTVLDRLRSEMRNSHATAPPSQTVMVAPQFTINQVDEGIDDMATNVSTQYNEELRSALERAIREYRSMSPELRPRLPRLPMHNKNRALVAALDSQLSNYFDDCEDLTDTHSILYCAAVAACRVAHVKFANDSRATRPKPAVPAWQCRIERRIGGARALIGKLICFREGNTRPRVMRFVRRAFSGTDISPEDYVSRATERIDFLKQKVYAWANRIRRYKRRVERYTQNRTFQSDERRVYRAWEQPDQGVADARLPDDDAMCSFWRSIWSAPVSHTEGDWTREVERACDPIPEMGAITICPQDVARAVRPLPNWKSPGPDGLHNFWIKWFKRSHARLAAQYQTALESGSLPQLLTTGVTHLLHKSGSTADPKNYRPITCLPTVYKVLTSILRAKINKHIDTNSIMSASQNGCRNGSRGTKELLLIDMTISQQVRRSRKDLSTCWIDYKKAYDSVPHTWLMRVLELYKVDATLRTFLLSCMGQWRTVLRYPGCRNIQRNSEPIRIERGIFQGDSLSPLWFCLALNPLSTLLEGSDLGYRLRRGGQVISHLLYMDDLKLFAPNNFQLMELLKVTETFSRAIRMEFGVDKCAVMHVKRGEIVESVGTQLTDSINFRALSASETYKYLGMSETLGINVTDMKQSLKERFFGRLKKVFNSFLSGGNKVRAFNGWVMPVLMYSFGVLKWTQTELDALDRRVRTLLTGYRMHHPRSSVMRLYIPRKCGGRGFLNAKTLHNREICSLREYFLEADVGMHRDVVAVDKGLTPLSLAKENWRKPAVLDTNDRKEVWQNKELHGRYFRALHGPDVDLLASVAWLRFGDLFGETEGFVCAIMDEVMMTNNYRRFIVKDGTVDICRACHRPGESIRHIISGCSRLANEEYLHRHNLVARIIHQQLALKYSLVESEVPYYRYVPDPVLESGHITLYWDRSIITDRSIVANKPDIVVVDRAERRTMIIDITVPHDGNLVKAEKDKQIKYLDLAREVVDMWDVDSAIIVPIVVSANGLIAKSLDQHLRRLSLGGWIKGLIQKAVLLDTARIVRRFLSLEP

SEQ ID NO: 10320 - protein, 975 aa, Agrochola circellaris
MSPELRPRLPRLPMHNKNRALVAALDSQLSNYFDDCEDLTDTHSILYCAAVAACRVAHVKFANDSRATRPKPAVPAWQCRIERRIGGARALIGKLICFREGNTRPRVMRFVRRAFSGTDISPEDYVSRATERIDFLKQKVYAWANRIRRYKRRVERYTQNRTFQSDERWVYRAWEQPDQGVADARLPDDDAMCSFWRSIWSAPVSHTEGDWTREVERACDPIPEMGAITICPQDVARAVRPLPNWKSPGPDGLHNFWIKWFKRSHARLAAQYQTALESGSLPQLLTTGVTHLLHKSGSTADPKNYRPITCLPTVYKVLTSILRAKINKHIDTNSIMSASQNGCRNGSRGTKELLLIDMTISQQVRRSRKDLSTCWIDYKKAYDSVPHTWLMRVLELYKVDATLRTFLLSCMGQWRTVLRYPGCRNIQRNSEPIRIERGIFQGDSLSPLWFCLALNPLSTLLEGSDLGYRLRRGGQVISHLLYMDDLKLFAPNNFQLMELLKVTETFSRAIRMEFGVDKCAVMHVKRGEIVESVGTQLTDSINFRALSASETYKYLGMSETLGINVTDMKQSLKERFFGRLKKVFNSFLSGGNKVRAFNGWVMPVLMYSFGVLKWTQTELDALDRRVRTLLTGYRMHHPRSSVMRLYIPRKCGGRGFLNAKTLHNREICSLREYFLEADVGMHRDVVAVDKGLTPLSLAKENWRKPAVLDTNDRREVWQNKELHGRYFRALHGPDVDLLASVAWLRFGDLFGETEGFVCAIMDEVMMTNNYRRFIVKDGMVDICRACHRPGESIRHIISGCSRLANEEYLHRHNLVARIIHQQLALKYSLVESEVPYYRYVPDPVLESGHITLYWDRSIITDRSIVANKPDIVVVDRAERRTMIIDITVPHDGNLVKAEKDKQIKYLDLAREVVDMWDVDSAIIVPIVVSANGLIAKSLDQHLRRLSLGGWIKGLIQKAVLLDTARIVRRFLSLEP

SEQ ID NO: 10321 - protein, 1240 aa, Hydraecia micacea
MLTRSRARRLPTTHPTSSGSSLSSASQLPEPAPDVSPVSPAAAVASSSSDEYFSPPTTPPPVCRRGRGRPPASLGLRGPPASERVPAPGGSVQRMRWTQTVNENVMRAYFGATEGGSNLTAYRGRMLSLFQVLEPAVNVSAQRLSDQVRVIQRNHMLDNVVLDRLRLESRNSHVTPASSLVAVQLQPSVPLRPDCVDVEDDDEAISVSSQCNARLRSALEDAFREYRSIPPGLRPRLPRLPMHKKNKALVCALDSQLSNCFNDSKDLADTHSILYCAAVAACRVAHVKFPNSDRAPRPKPAVPAWQCRIECRIGEARALIGKLICFREGNTRPRVMRFVRRAFSGTDISSRDYLSRVTERIDFLKQKICAWANRIRRYRRRVERYTQNRRFQSDERWVYRAWERPDQGVTDTRLPDDDAMCSFWRNIWSVPVSHTEGDWTGKIERACDLIPEMEALIISPQDVARAVRPLPNWKSPGPDGLHNFWIKWFKRSHDRLASQFQSALESGSLPQFLTTGITHLLYKSGSTADPKNYRPITCLPTVYKVLTSILRTKINKHIDTNSIMSVSQNGCKNGSRGTKELLLIDMTINQQVRRSRKDLSTCWIDYKKAYDSVPHTWLMRVLELYKVDTTLCTFLMSCMGQWRTVLRYPGCRNIQRNSEPIRIERGIFQGHSLSPLWFCLALNPLNTLLEDSGLGYRLRRGGQVISHLLYMDDLKLFAPNNLQLMELLKITETFSSAIRMEFGVDKCAVMHVKRGEIVESVGNQLSDSTNLRALSASDTYKYLGMSEALGINVTDMKQSLKERFFGRLKKVFNSLLSGGNKVRAFNDWVMPVLMYSFGILKWTQTELDVLDRKVRTLLTANRMHHPRSSVMRLYIPRKCGGRGFLNAKTLHNREICSLREYFLETDVGMHRDVVVVDNGLTPLSLGKENWRKPVVLDTNDRMEVWQSKELHGRFFRALHGPDVDLLASVAWLRFGDLFGETEGFVCAIMDEVMMTNNYRRFIVKDGTVDICRACHRPGESIRHIISGCSRLANGEYLHRHNLVARIIHQQLALKYSLVESEVPYYRYVPDPVLENGNITLYWDRSIITDRTIVANKPDIVVMDRLERRAMIVDITIPHDENLVKAEKDKQIKYLDLAREVVDMWDVDSAIIVPIVVTANQWIDSQEPRPTPEEALVGQLDQGLDSESSTSGHGSHCQEIPLSGALTTGSLDPVPDTGGLLFFIFLNVFIYFFYLFKYLKI

SEQ ID NO: 10322 - protein, 1203 aa, Hydraecia micacea
MLTRSRARRLPTTHPTSSGSSLSSASQLPEPAPDVSPVSPAAAVASSSSDEYFSPPTTPPPVCRRGRGRPPASLGLRGPPASERVPAPGGSVQRMRWTQTVNENVMRAYFGATEGGSNLTAYRGRMLSLFQVLEPAVNVSAQRLSDQVRVIQRNHMLDNVVLDRLRLESRNSHVTPASSLVAVQLQPSVPLRPDCVDIEDDDEAISVSSQCNARLRSALEDAFREYRSIPPGLRPRLPRLPMHKKNKALVCALDSQLSNCFNDSKDLADTHSMLYCAAVAACRVAHVKFPNSDRAPRPKPAVPAWQCRIECRIAEARALIGKLICFREGNTRPRVMRFVRRAFSGTDISSRDYLSRVTERIDFLKQKICAWANRIRRYRRRVERYTQNRRFQSDERWVYRAWERPDQGVTDTRLPDDDAMCSFWRNIWSVPVSHTEGDWTGKIERACDLIPEMEALIISPQDVARAVRPLPNWKSPGPDGLHNFWIKWFKRSHDRLASQFQSALESGSLPQFLTTGITHLLYKSGSTADPKNYRPITCLPTVYKVLTSILRTKINKHIDTNSIMSVSQNGCKNGSRGTKELLLIDMTINQQVRRSRKDLSTCWIDYKKAYDSVPHTWLMRVLELYKVDTTLCTFLMSCMGQWRTVLRYPGCRNIQRNSEPIRIERGIFQGDSLSPLWFCLALNPLSTLLEDSGLGYRLRRGGQVISHLLYMDDLKLFAPNNLQLMELLKITETFSSAIRMEFGVDKCAVMHVKRGEIVESVGNQLSDSTNLRALSASDTYKYLGMSEALGINVTDMKQSLKERFFGRLKKVFNSLLSGGNKVRAFNDWVMPVLMYSFGILKWTQTELDALDRKVRTLLTANRMHHPRSSVMRLYIPRKCGGRGFLNAKTLHNREICSLREYFLETDVGMHRDVVVVDNGLTPLSLGKENWRKPVVLDTNDRMEVWQSKELHGRFFRALHGPDVDLLASVAWLRFGDLFGETEGFVCAIMDEVMMTNNYRRFIVKDGTVDICRACHRPGESIRHIISGCSRLANGEYLHRHNLVARIIHQQLALKYSLVESEVPYYRYVPDPVLENGNITLYWDRSIITDRTIVANKPDIVVMDRLERRAMIVDITIPHDENLVKAEKDKQIKYLDLAREVVDMWDVDSAIIVPIVVTANGLIAKSLDQHLRRLSLASWIKGLIQKAVLLDTARIVRRFLSLEP

SEQ ID NO: 10323 - protein, 1204 aa, Amphipyra tragopoginis
MITRSRAKTQSTQPPPSASSLSSASQPPEPASIVSDVTPAAAVASSSSDEYYSPPTSPPPARRRGRGRPPACLGPRGPPASDRVPASGGSVQRMRWTQSMNENCMRAYFGATEGGTNLTAYRGRMLSLFQALEPAVNVSAQRLSDQVRVIQRDHRLDDAALDRLRSEMQSSHVVPLQSQTAVQSQVPSVVAPRSIPADEESDDRVTNVSTQSNEQLRSALELAFREYRSTLPDLRPRLPRLPMNNKNKALMCALDSLLSSYFDGSEDLADTHSILYCAAVAACRVAHVKVDNNDRATRPKPAVPAWQCRIERRIGEARALIGKLICFREGNTRPRVMRFVRRAFSGTDTSPRDYMSRVAERIDFLKQKVYAWANRIRRYKRRVERYTQNRMFQRDQRWVYRAWERPDQGVRDVHLPDDDAMNSFWRSIWSVPVSHAEGDWMRDVERVCEPILDMGAISIKPQDVASAVRPLPNWKSPGPDGLHNFWLKWLRSSHARLASQFQSSLETGTLPQFLTTGVTHLLHKSGSTAEPKNYRPITCLPTVYKLLTSILRCKISSHIENNSIMSASQNGCRNGSRGTKELLLIDMAISQQVRRSRKDLSTCWIDYKKAYDSVPHTWLLRVLELYKVNTTLCAFLTSCMGQWRTVLRYPGCRQIQGRGEPIRIERGIFQGDSLSPLWFCLALNPLSTLLEGSGLGYRLRRGGHVISHLLYMDDLKLFAPNNLQLMELLKVTETFSHSIRMEFGVDKCAVMHVKRGRIMESVGTQLSDSIQLRSLSSTETYKYLGMSEALGISEADMKQSLKERFCGRLKKVLKSLLSGGNKVRAFNGWVMPALMYSFGILKWTQTELDALDRRVRTLLTAYRMHHPRSSVMRLYISRKCGGRGFLNAKTLHNREVCSLREYFSQADVGMHRDVVAVDKGLTPLSLAKENWRMPVVLDTNGRRDVWRSKELHGRFYRALHGPDVDFQASVAWLRFGDLFGETEGFVCAIMDEVMMTNNYRKYVVKDGTVDICRACHCPGESIRHIVSGCSRLANGEYLHRHNLVARIIHQQLALRYNLVDAEVPYYKYVPDPVLENGHVTLYWDRSIITDRTIVANKPDIVVIDRSERRAMIVDVTVPHDENLVKAENDKKNKYLDLAHEVVDMWNVDSAVIVPIVVSANGLIAKSLNQHLMRLSLGSWIKGLIQKAVLLDTARIVRKFLSLEP

SEQ ID NO: 10324 - protein, 1198 aa, Amphipyra tragopoginis
MLTRARSKAARPPPPDSPLSSASQPPELGPPVTPAAAAASSSSDEYFSPPTSPRPVRRQGRHRPPTSLGPRGPPAPSRVLATGGCVQRMKWTQSINENVMRAYYGSTEGGTNLTAYRVRMLTLFQELEPAINVSAQRLSDQVRVIQRNHRLDDAALDRLRLEVQNSRVTPFPSQTAVHEVNINIVPPRSDYVDGDMDDRAVTVSSQYNDQLRSALEDAIREYRANPELRPRLPRLPMHNKNRALVCALDSLLSSYFESSEDLGDTHSILYCAAVAACRVANVKFNNSERATRPKPAVPAWQCRIERRIDGARALIGKLICFREGNTRPRVMRFVRRAFSGTGISPREYMSQVTERIDFLKQKVCAWASRIRRYKRRVERYTQNRMFQCDQRWVYRAWERPDQGVSDGRLPDDDAMNSFWRSIWPVPVIHTEGDWMRDIERACEPIEEMGEILISPQDVASAARPLPNWKSPGPDGLHNFWIKWLRSSHARLATQFQSSLESGSLPQFFTTGVTHLLHKSGSTAEPKNYRPITCLPTVYKLLTSILRSKINTHIENNSVMSSAQNGCRNGSRGTKELLLIDMAISQQVRRSRKNLSTCWIDYKKAYDSVPHTWLMGVLELYKINATLRTFLMSCMGQWRTVLRYPGCRPIRESGEPIRIERGIFQGDSLSPLWFCLALNPLSTLLEGSGLGYPLRRGGQVVSHLLYMDDLKLFAPTKLQLVELLKVTETFSNSIRMEFGVDKCAVMHVRRGGIMESEGLQLSDSIHLRPLSANDTYKYLGMSEGLGISEADMKQSLRERFFGRLKKVLKSLLSGGNKVRAFNGWVMPVLMYSFGILKWTQTELDALDRRVRSLLTANRMHHPRSSVMRLYIPRKCGGRGLLNAKTLHNREVCSLREYFLHADAGMHRDVVAVDKGLTPLNLAKENWRKPVVLSTNDRREIWQSKELHGRFYRALHGPDVDFQASVSWLRFGDLFGETEGFVCAIMDEVIMTNNYRKYIVKDGTVDICRACHCPGESLRHIISGCSRLANGEYLHRHNQVARIIHQQLALKYNLVESEVPYYKYVPDPVLENGHITLYWDRSIIADRTIVANKPDIVVIDRSERRTMIVDVTIQHDENLVKAEKDKQIKYLDLAHEVVNMWDVDSATIVPIVVTANGLMAKSLDQHLKRLSLGGWIKGLIQKAVLLDTARIVRRFLSLEP

SEQ ID NO: 10325 - protein, 1198 aa, Amphipyra tragopoginis
MLTRARSKAARPPPPDSPLSSASQPPELGPPVTPAAAAASSSSDEYFSPPTSPRPVRRQGRHRPPTSLGPRGPPAPSRVLATGGCVQRMKWTQSINENVMRAYYGSTEGGTNLAAYRVRMLTLFQELEPAINVSAQRLSDQVRVIQRNHRLDDAALDRLRLEVQNSRVTPFPSQTAVHEVNINIVPPRSDYVDGDMDDRAVTVSSQYNDQLRSALEDAIREYRANPELRPRLPRLPMHNKNRALVCALDSLLSSYFESSEDLGDTHSILYCAAVAACRVANVKFNNSERATRPKPAVPAWQCRIERRIDGARALIGKLICFREGNTRPRVMRFVRRAFSGTGISPREYMSQVTERIDFLKQKVCAWASRIRRYKRRVERYTQNRMFQCDQRWVYRAWERPDQGVSDGRLPDDDAMNSFWRSIWSVPVIHTEGDWMRDIERACEPIEEMGEILISPQDVASAARPLPNWKSPGPDGLHNFWIKWLRSSHARLATQFQSSLESGSLPQFFTTGVTHLLHKSGSTAEPKNYRPITCLPTVYKLLTSILRSKINTHIENNSVMSSAQNGCRNGSRGTKELLLIDMAISQQVRRSRKNLSTCWIDYKKAYDSVPHTWLMRVLELYKINATLRTFLMSCMGQWRTVLRYPGCRPIRESGEPIRIERGIFQGDSLSPLWFCLALNPLSTLLEGSGLGYPLRRGGQVVSHLLYMDDLKLFAPTKLQLVELLKVTETFSNSIRMEFGVDKCAVMHVRRGGIMESEGLQLSDSIHLRPLSANDTYKYLGMSEGLGISEADMKQSLRERFFGRLKKVLKSLLSGGNRVRAFNGWVMPVLMYSFGILKWTQTELDALDRRVRSLLTANRMHHPRSSVMRLYIPRKCGGRGLLNAKTLHNREVCSLREYFLHADAGMHRDVVAVDKGLTPLNLAKENWRKPVVLSTNDRREIWQSKELHGRFYRALHGPDVDFQASVSWLRFGDLFGETEGFVCAIMDEVIMTNNYRKYIVKDGTVDICRACHCPGESLRHIISGCSRLANGEYLHRHNQVARIIHQQLALKYNLVESEVPYYKYVPDPVLENGHITLYWDRSIITDRTIVANKPDIVVIDRSERRTMIVDVTIPHDENLVKAEKDKQIKYLDLAHEVVNMWDVDSATIVPIVVTANGLMAKSLDQHLKRLSLGGWIKGLIQKAVLLDTARIVRRFLSLEP

SEQ ID NO: 10326 - protein, 1163 aa, Noctua pronuba
MLTRRRAKLLETHPPSPGSSLSSASQPPGRATSVSAASPVAAVASSSSDEFFSPPSTPPSPRRRGRRPPAGLGPRGQQAPNRVPALFQALESAVNVSAQRLSDQVRVIQNNHRLDDATLDRLRSELRISPASNPLPSQNVTHVPAALPLRANQHAEEEDDGAVSADNLCNEELRSALEDAIREYRFTSPDLRPRLPRLPMNKKNRALVCALDALLPNFIENSANLCDTQSILYCTAIAACRVANVKFPNTDSATRPKSAVPVWQCRIERRINEARVLIGKLICFREGNTRPRVMRFVRRAFSGTDISPREYMSRVTERIDFLKQKVYAWANRVRRYRRRVDRYTQNRMFQSDERWVYRTWERPVTIQGVTDAHLPDNDAMSAFWRSIWSVPVSHTEGDWMRVVEQACDSIPEMEAISISPLDVARAVRPLPNWKSPGPDGLHNFWIKWLQRSHACLASQSQSSLETGSLPSFFTTGVTHLLHKSGSTAEPKNYRPITCLPTVYKVLTSILRAKIVRHIDSNSIMSVSQNGCRNGSRGTKELLLIDMAISQQVRRSRRDLSTCWIDYKKAYDSVPHTWLRRVLELYKIDATLRTFLVSCMGQWSTVLLYPGCRQVLGNDEPIRIERGIFQGDSLSPLWFCLALNPLSTLLEDSGLGYRLRRGGQVISHLLYMDDLKIFAPSNLQLMELLKVTETFSSAIRMEFGVDKCAVMHVKRGEIMESVGTQLSDSIYLRSLSSTETYKYLGMSEALGINSADMKQSLKERFFGRLNKVLKSLLSGGNKVRAFNGWVMPVLMYSYGILKWTQTELDALDRKVRTLLTANRMHHPRSSVMRLYIPRKCGGRGFLNAKTLHNREVCSLREYFLETDVGMHRDVVSVDKGLTPLSLANENWRKPVVLDTNDRKEVWQSKELHGRFFRALHGPDVDLLASVSWLRFGDLFGETEGFVCAIMDEVIMTNNYRKYIVKDGTVDICRACHRPGESIRHIVSGCSRLANGEYLHRHNLVARIIHQQLALQYNLGGTEVPYYKYVPDPVLENGHATLYWDRSIITDRTILANKPDIVVIDRRERRAMIVDITVPHDENLVKVENDKKIKYLDLAHEVVDMWDVDSAIIVPIVVTVNGLIAKSLDQHLRRLSLRGWVKGLVQKAVLLDTARIVRRFLSLEP

SEQ ID NO: 10327 - protein, 1204 aa, Noctua pronuba
MITRSRAKQQKAHPPSPGSSLSSASQPPGRATSVSSVSPVAAVASSSSDEFFSPPSTPSPPRRRGRGRPPAGLGPRGQQAPNRVPAAGGNVSRMRWTQSINENVMRAYYGATEGGSNLTAYRGRMLSLFQVLEPGVSVSAQRLSDQVRVIQRNHMLDDTVLDRLRFDSRSNLVTPASPMIAVQLQNVSSAPPRSDHDGEEDDDEVISVSTQCNAQLRSALEGAFREYRSIPPELRPRLPRLPMHKKNKALVCALDSQLSTCFDSSKDLADTHSILYCGAVAACRVAHVKFPNNDRATRPKLAVPAWQRRIERRIGEARALIGKLICFREGNTRPRVMRFVRRAFSGTGISFRDYLARVTERIDFLKQKICAWANRIRRYKRRVERYTQNRTFQSDERWVYRAWERPDQGVTDTRLPDADAMCLFWRSIWSVPVSHTEGDWTREVEQACDPIPEMGAIIISPQDVACVVRPLPNWKSPGPDGLHNFWIKWFQRSHARLASQFQSALESGSLPQFLTTGITHLLHKSGSTAEPKNYRPITCLPTVYKVLTSILRAKINHHIDSNSIMSASQNGCRNGSRGTKELLLIDMAISQQVRRSRRDLSTCWIDYKKAYDSVPHTWLMRVLELYKVDATLRTFLKSCMGHWRTVLRYPGCRQIQGNSEPIRIERGIFQGDSLSPLWFCLALNPLSTLLEGSGLGYRLRRGGQVISHLLYMDDLKLFAPNNLQLMKLLKVTETFSSAIRMEFGVDKCAVMHVKRGEIMESVGTQLSDSIHLRSLSSTETYKYLGMSEALGINTTDMKQSLRERFFGRLNKVLGSLLSGGNKVRAFNGWVMPVLMYSFGILKWTQTELDALDRRVRALLSANRMHHPRSSVMRLYIPRKCGGRGFLNAKTLHNREVCSLREYFLEADVGMHRDVVSVDKGLTPLSLANENWRKPRVLDTNDRKEVWQGKELHGRFYRALHGPDVDFLASVSWLRFGDLFGETEGFVCAIMDEVMMTNNYRKYIVKDGTVDICRACHRPGESIRHIISGCSRLANGEYLHRHNLVARIIHQQLALKYNLVESEVPYYKYAPDPVLDDGNITLYWDRSIITDRTIVANKPDIVVIDRLERRAMIVDITVPHDENLVKAEKDKQFKYLDLAREVVDMWDVSTAVIVPIVVSANGLIAKSLDQHLRRLSLGSWIKRLIQKAVLLDTARIVRRFLSQEP

SEQ ID NO: 10328 - protein, 1080 aa, Noctua pronuba
MLSLFQVLEPAVSVSAQRLSDQVRVIQRNHMLDDTVLDRLRSESRSNPVTPASPMIAVQLQSATSASPRSDHGGEEDDSEVISVSTQCNAQLRSALEGAFREYRSTPPELRPRLPRLPMHKKNKALMCALDSQLSNYFDSSKDLADTHSMLYCGAVAACRVAHVKFPNNDRATRPKLAVPAWQCRIERRIGEARALIGKLICFREGNTRPRVMRFVRRAFSGTDISFRDYLARVTERIDFLKQKICAWASRIRRYKRRVERCTQNRTFQSDERWVYRAWERPDQGVTDTHLPDDDAICSFWRSIWSVPVSHIEGDWTREVERACDPIPQMGAINISPQDVACAVRPLPNWKSPGPDGLHNFWIKWFQRSHVRLASQFQSALESGSLPQFLTTGITHLLHKSGSTAEPKNYRPITCLPTVYKVLTSILRAKINHHIDSNSIMSASQNGCRNGSRGTKELLLIDMAISQQVRRSRKNLSTCWIDYKKAYDSVPHTWLMRVLELYKVDATLRTFLMSCMGHWRTVLRYPGCRQIQGNSEPIRIERGIFQGDSLSPLWFCLALNPLSTLLEGSGLGYRLRRGGQVISHLLYMDDLKLFAPNNLQLMKLLKVTETFSSAISMEFVVDKCAVMHVKRGEIMESVGTQLSDSIQLRSLSSTDTYKYLGMSEALGINTADMKQSLRERFFGRLNKVLSSLLSGGNKVRAFNGWVMPVLMYSFGILKWTQSELDALDRRVRALLTANRMHHPRSSVMRLYIPRKCGGRGFLNAKTLHNREVCSLREYFLEADVGMHRDVVSVDKGLTPLSLANENWRKPRVLDTNDRKEVWQGKELHGRFYRALHGPDVDFLASVSWLRFGDLFGETEGFVCAIMDEVMMTNNYRKYIVKDGTVDICRACHRPGESIRHIISGCSRLANGEYLHRHNLVARIIHQQLALKYNLVESEVPYYKYAPDPVLDNGNITLYWDRSIITDRTIVANKPDIVVIDRLERRAMIVDITVPHDENLVKAEKDKQFKYLDLAREVVDMWDVNTAVIVPIVVSANGLIAKSLDQHLRRLALGSWIKGLIQKAVLLDTARIVRRFLSQEP

SEQ ID NO: 10329 - protein, 1111 aa, Noctua pronuba
MRWTQSINEQVMRAYYGATEGGSNLTAYRGRMLSLFQVLEPTVSVSAQRQSDQVRVIQRNHMLDDTVLDRLRSESRSNPVTPASPMIAGLLQSATSSSPRSDHGGEEDDSEVISVSTQCNAQLRSALEGAFREYRSTPPELRPLLPRLPMYTKNKALMCGLDSQLSNYFDSSKDLTDTHSILYCGAVAACRVAHVKLPNNDRATRPKLAVPAWQCRIERRIGEARALIGKLICFREGNTRPRVMRFVRRAFSGIDITFRDYLARVTERIDFLKQKICAWASRIRRYKRRVERYTQNRTFQSDERWVYRAWERPGQGVTDTRLPGDDAMCLFWRSIWSVPVSHTEGDWTREVEQACDPIQEMGAIIISPQDVACAVRPLPNWKSPGPDGLHNFWIKWFQRSHACLASQFQLALESGSLPQFLTTGITHLLHKSGSTAEPKNYRPITCLPTVYKVLTSILRAKINQHIESNSIMSASQNGCRNGSRGTKELLLIDMAISQQVRRSRKDLSTCWIDYKKAYDSVPHTWLMRVLELYKVDATLRTFLMSCMRHWRTVLRYPGCRQIQRNSEPIRIERGIFQGDSLSPLWFCLALNPLSTLLEGSGLGYRLRRGGQVISHLLYMDDLKLFAPNNLQLMKLLKVTETFSSAIRMEFGVDKCAVMHVKRGEIMESVGTQLSDSIHLRSLTSTETYKYLGMSEALGINTADMKQSLRERFFGRLNKVLGSLLSGGNKVRAFNGWVMPVLMYSFGILKWTQTELDALDRRVRALLTANRMHHPRSSVMRLYIPRKCGGRGFLNAKTLHNREVCSLREYFLEADVGMHRDVVSVDKGLTPLSLANENWRKPKVLVTNDRKEVWQSKELHGRFYRALHGPDVDFLASVSWLRFGDLFGETEGFVCAIMDEVMMTNNYRKYIVKDGTVDICRACQRPGESIRHIISGCSRLANGEYLHRHNLVARIIHQQLALKYNLVESEVPYYKYAPDPVLDNGNVTLYWDRSIITDRTIVANKPDIVVIDRLERRAMIVDITVPHDENLVKAEKDKQFKYLDLAREVVDMWDVSTAVIVPIVVSANGLIAKSLDQHLRRLALGSWIKGLIQKAVLLDTARIVRRFLSQEP

SEQ ID NO: 10330 - protein, 1200 aa, Tinea trinotella
MLTRSRARNQSAQLTSSGSSLSSASQPPGSTPTVSQVISVAAVASSSSDECFSPPTTPPSARRRGGGRPPASLEPRGPSASGGVPATSGRVQRMRWTQSINENVMRSYFGATEGGSSLTAYRGRMLTLFQVLEPAVNVSAQRLSDQVRVIQRNRMLDDVVLDRLRLESRSSHVSPVSPPVAVQLQPSALPRPKNIEENDDDVTISVSNQYNEQLRSALEDAFREYRSTPPGLRPRIPRLPMHKKNRALVCALDSQLVNHFKSSKDLADTHSILYCAAVAVCRVAHVKFPNNDRAARLAVPAWQCRIERRIGEARALIGKLISFREGNTRPRVMRFVRRAFSGTDISSRDYQTRVTERIDFLKQKIYAWANRIRRYKRRVERYTQNRTFQSNERWVYRAWERPDQDVSDMCLPDDDAMSLFWRNIWSVPVGHTEGEWTREVERACDFIPKMGAIIISPQDVACAVRPLSNWKSPGLDGLHNFWIKSFQRSHARLAAQFQSALELGSLPQFLTTGITHLLHKSGSTAEPKNYRPITCLPTVYKVLTSILRAKIDKHIDTNCIMSASQNGCRSGSRGTKELLLIDVAISQQVRRSRRDLSTCWIDYKKAYDSVPHTWLMRVLELYKVDEALRTFLVSCMGQWRTVLHYPGCRRILGNGEPIKIERGIFQGDSLSPLWFCLALNPLSTLLDGSGQGYRLRRDGQVISHLLYMDDLKLFAPNNLQLMKLLKVTETFSSAISMEFGMDKCAIMHVKRGEIMESVGTQLSDSIHLRSLCSTETYKYLGMSEALGINAVDVKQSLRDRFFGRLNKVLNSLLSGGNKVRAFNGWVMPVLMYSFGILKWTQTELDALDRRVRTLLTANRMHHPRSSVMRLYIPRKCGGRGFLNAKTLHNREVCSLREYFLKTDVGMHRDVVAVDKGLTSLSLANENWRKPVVLDANDRREVWQSKELHGRFYRALHGPDVDFLASVSWLRFGDLFGETEGFVCAIMDEVMMTNNYRKYIVKDGTVDICRACHRPGESIRHIISGCSRLANGDYLHRHNLVARIIHQQLALKYNLVESEVPYYRYVPDPVLENGNITLYWDRSIITDRTIVANKPDIVVIDRLERRTIIVDVAVPHDENLVKAEKDKQIKYLDLAREVVDMWEVDTAIIVPIVVTANGLIAKSLDEHLKRLSLGSWIKRLIQKAVLLDTARIVRRFLSQEP

SEQ ID NO: 10331 - protein, 960 aa, Tinea trinotella
MHKKNRALVCALDSQLANHFESSKHLADTHSILYCAAVAVCRVAHVKFPNNDRAARLAVPAWQCRIERRIGEARALIGKLISFREGNTRPRVMRFVRRAFSGPDISSQDYQSRVTERIDFLKQKIYAWASRIRRYKRRVERYTQNRTFQSNERWVYRAWERPDQDVSDTCLPDDDAMSLFWRNIWSVPVGHTEGEWTREVERACNLIPEMGAINISPQDVACAVRPLPNWKSPGHDGLHNFWIKYFQRSHARLAAQFQSALELGSLPQFLTTGITHLLHKSGSTAEPKNYRPITCLPTVYKVLTSILRTKINKHIDTNCIMSASQNGCRSGSRGTKELLLIDVAISQQVRRSRRDLSTCWIDYKKAYDSVPHTWLMRVLELYKIDAALRTFLGSCMGQWRTVLHYPGCRRILGNGEPIKIERGIFQGDSLSPLWFCLALNPLSTLLDGSGQGYRLRRDGQVISHLLYMDDLKLFAPNNLQLMKLLKVTETFSSAISMEFGADKCATMHVKRGEIMESVGIQLSDSIHLRSLCSTETYKYLGMSEALGINAVDVKQSFKNHFFGRLNKVLNSLLSGGNKVRAFNGWVMPVLMYSFGILKWTQTELDALDRRVRTLLTANRMHHPRSSVMRLYIPRKCGGRGFLNAKTLHNREVCSLREYFLKTDVGMHRDVVAVDKGLTSLSLANENWRKPVVLDTNDRREVWQSKELHGRFYRALHRPDVDFLASVSWLRFGDLFGETEGFVCAIMDEVMMTNNYRKYIVKDGTVDICRACHRPGESIRHIISGCSRLANGDYLHRHNLVARIIHQQLALKYNLVESEVPYYRYVPDPVLENGNITLYWDRSIITDRTIVANKPDIVVIDRLERRTMIVDVAVPHDENLVKAEKDKQIKYLDLAREVVDMWEVDAAIIVPIIVTANGLIAKSLDEHLKRLSLGSWIKRLIQKAVLLDTARIVRRFLSQEP

SEQ ID NO: 10332 - protein, 1198 aa, Spilosoma lubricipeda
MITRARVRAQLPSPDSSLRSALPSPEAIIEVPASAEASSSSSSDEFFSPPTSPTPVRRQGRGRPPSSLGSRGPLTSNRVPATGGAVRRMKWTHSINENVMRAYFRATELGTNLTAYRVRLVSLFQELEPAVNVSAQRLSDQVRAIQRCHLLDDVVLERIRSDVRSTLTVPSSSHSVDLVATTPQLPHNENVDEQVESEVMTVSTQCNDRIRRALEDAIQEYRHVDYNNRPRLPRLPIHKRNLALVSALNSLLPDYFGNSEDLSDTHSILYCAAIAVCRVAGVKFVERITTTRPKNKVPAWQCRIERRIAETRTLIGKLITFQSGNTRPRVMRFVKQAFLGTTISPQQYMSSVTERIDFLKQKVYAWANRIRRYRKRVDRFIQNRMFQRNEKWVYRKWEEPSPRVGEGRFPDENFTNTFWRNIWSAPVTHTEGDWYRDVERSCESITSMEPITISKDDIGCAVRSLPNWKSPGPDGLHNFWLKWFRSSHACLASQYQAAVDSGSLPQFLTTGITHLLYKSGSAMDPKNFRPITCLPTMYKLLTSILRLKIATHINNNLIMSVSQNGCRSGSRGTKELLIIDMTISQQVRRNRKSLATCWIDYKKAYDSVPHTWLLRVLELYKIDTTLCTFLKSCMGQWRTVLRYPGCRQTAVNDVLINIERGIFQGDSLSPLWFCLALNPLSALLEDSGLGYRLQKDDQVISHLFYMDDLKLLAPTKLQLTALLKVTENFSNSIKMEFGVDKCAVMYVKKGVIVESEGTELSDSTRLRSLSATETYKYLGFSQSLGIPEPDMKQALRERFFGRLKKVLKSLLSGGNKVRAYNGWVMPVLMYSFGILRWTQTELDAIDRRVRTLLTAFRMHHPRSSVMRLYIPRKLGGRGLLNAKTLHNREIYNLREYFIHTDVGVHRSVVTVDTGLTPLALAKENWRKPVVLSTNDRREVWKGKELHGRFYRALNGPDIDFKASTSWLRYGDLFGETEGFVCAIMDEVIMTNNYRKYILKDGTVDICRACHRPGESIRHIISGCSRLANGEYLHRHNQVARIVHQQLALKYHLVSSEVPYYRYVPDPVLENGRATLYWDRSIITDRTIVANKPDIVVIDRLERRAIIVDIAVPHDENLVKIEKEKQIKYLDLSHEIVDMWNVDSAIIVPIVVSAHGLIAKSLDQHLKRLTLEGWIKGLMQKAVLLDTARIVRRFLSLEP

SEQ ID NO: 10333 - protein, 1110 aa, Spilosoma lubricipeda
MKWTQSINENVMRAYFRATELGTNLTAYRVRLVSLFQELEPAVNVSAQRLSDQVRAIQRCHLLDDVVLERIRSDVRGTLTVPSSSHSVDLVATTPQLPHNEYVDEQVESEVMTVSTQCNDRIRRALEDAIQEYRHVDYKNRPRLPRLPIHKRNLALVSALNSLLPDYFGNSEDLSDTHSILYCAAIAVCRVAGVKFVEQITTTRPKNEVPAWQCRIERRITETRTLIGKLITFQSGNTRPRVMRFVKQAFLGTTISPQQYMSSVTERIDFLKQKVYAWANRIRRYRKRVDRFIQNRMFQRNEKWVYRKWEEPSPRVGEGRFPDENVTNTFWRNIWSVPVTHTEGDWYRDVERSCESITSMEPITISKDDIGCAVRSLPNWKSPGPDGLHNFWLKWFRSSHACLASQYQAAVDSGSLPQFLTTGITHLLYKSGSAMDPKNFRPITCLPTMYKLLTSILRLKISTHINNNLIMSVSQNGCRSGSRGTKELLIIDMTISQQVRRNRKSLATCWIDYKKAYDSVPHTWLLRVLELYKIDTTLCTFLKSCVGQWRTVLRYPGCRQTAVNDVLINIERGIFQGDSLSPLWFCLALNPLSALLEDSGLGYRLQKDDQVISHLFYMDDLKLLAPTKLQLTALLKVTENFSNSIKMEFGVDKCAVMYVKKGVIVESEGTELSDSTRLRSLSATETYKYLGFSQSLGIPEPDMKQSLRERFFGRLKKVLKSLLSGGNKVRAYNGWVMPVLMYSFGIIRWTQTELDALDRRVRTLLTAFRMHHPRSSVMRLYIPRKFGGRGLLNAKTLHNREIYNLREYFLHTDVGMHRSVVTVDTGLTPLALAKENWRKPVVLSTNDRREVWKGKELHGRFYRALNGPDIDFKASTSWLRYGDLFGESEGFVCAIMDEVIMTNNYRKYILKDGTVDICRACHRPGESIRHIISGCSRLANGEYLHRHNQVARIVHQQLALKYHLVSSEVPYYRYVPDPVLENGRATLYWDRSIITDRTIVANKPDIVVIDRLERRAMIVDIAVPHDENLVKVEKEKQIKYLDLSHEIVDMWNVDSAIIVPIVVSAHGLIAKSLDQHLKRLTLEGWIKGLMQKAVLLDTARIVRRFLSLEP

SEQ ID NO: 10334 - protein, 1199 aa, Spilosoma lubricipeda
MLTRARSRAQLLTPDSSLRSALPSSDARTEVPTVAEASSSSSSDEFFSPPTSPTPVRRQERYRPPDSLGPRGPLTSNRAPAAGGNVRRMKWTHSINENVMRAYFRATELGTNLTAYRVRLVSLFQELEPAVNVSAQRLSDQVRAIQRCHLLDDAALERIRSDIRNSLAVPSSSHVVDTIVNTTSQLPRSEYIDERVDSEIISVSTQCNDTIRSTLEDAIREYRYVDSNNRPRLSRLPIHKRNLALVSALDSLLPDYFNNSEDLSDTHSILYCAAIAVCRVAGVNFVECKTATRPKNTVPAWQCRIERRIAGTRTLIGKLISFRSGNTRPKVMRFVKQAFLGTTVSPQQYMSCVTERIDFLKQKVYAWANRIRRYRKRTDRYNQNRTFQRNEKWVYQKWEKLSPCMSDEHLPDKNATNYFWRNIWSTPVTYTEGHWCRDVERSCESITPMEPVRIDKEDVSCAVRSLANWKAPGPDGLHNFWLKWFRSSHAYLASQFQTALDSGSLPQFLTTGITHLLHKSGSTTDPKNFRPITCLPTLYKLLTSILRLKITAHINNNSIISVSQNGCRSGTRGTKELLIIDMTISQQVRRNRKSLATCWIDYKKAYDSVPHTWLLRVLELYKIDTTLCTFLKSCMGQWRTVLRYPGCRQSTMNDVRIKIERGIFQGDSLSPLWFCLALNPLSALLEDSGLGYRLQKDDQVISHLFYMDDLKLLAPTKLQLTALLKVTENFSNSIKMEFGVDKCAVMYVKKGVIVESEGTELSDSTRLRSLSATETYKYLGFSQSLGIPEPDMKQSLRERFFGRLKKVLKSLLSGGNKVRAFNGWVMPVLMYSFGILRWTQTELDAIDRRVRTLLTAFRMHHPRSSVMRLYIPRKLGGRGLLNAKTLHNREIYNLREYFLHTDVGMHRSVVTVDTGLTPLALAKENWRKPVVLSTNDRREVWKGKELHGRFYRALNGPDIDFKASTSWLRYGDLFGETEGFVCAIMDEVIMTNNYRKYILKDGTVDICRACHRPGESIRHIISGCSRLANGEYLHRHNQVARIVHQQLALKYHLVSSEVPYYRYVPDPVLENGRATLYWDRSIITDRTIVANKPDIVVIDRLERRAMIVDIAVPHDENLVKVEKEKQIKYLDLSHEIVDMWNVDSAIIVPIVVSAHGLIAKSLDQHLKRLTLEGWIKGLMQKAVLLDTARIVRRFLSLEP

SEQ ID NO: 10335 - protein, 1106 aa, Ochropleura plecta
MRWTQSINENVMRSYYGATEGGNNLTAYRVRMLSLFQVLEPAVNVSAQRLSDQVRVIQRNRMLDDTVLDRLRTEMQSSQVITSSSQVVVPPQSHQVVNHANEVSNGMATNVSTQCSEEMRSTLEGAIREYRYMSPELRPRLPRLPMQNKNRALVAALDSQLSSYFDNCENLTDAHSILYCAAVAACRVAHVKFPDDRATRPKPAIPFWQCRIERRIGAARALIGKLICFREGNTRPRVMRFVRRAFAGTDISPPDYMSRIAERIDFLKQKVYAWANRIRRYKRRVERYTQNRTFQSDERWVYRAWERPDQGVSDTHLPDDDAMCLFWRSIWSVPVSHTEGEWTREVERACDPIPEMGVLTISPQDVACAVRPLPNWKSPGPDGLHNFWIKWIQRSHVRLAALFQSALESGSLPKFLTTGITHLLHKWGSTAEPKNYRPITCLPTLYKVLTSILRAKITKHIDDNSIMSASQNGCRNGSRGTKELLLIDMAISQQVRRSRRHLSTCWIDYKKAYDSVPHTWLMRVLEMYKVDATLRTFLSSCMRQWSTVLRYPGCRQFQMNSEPIRIERGIFQGDSLSPLWFCLALNPLSTLLENSGLGYRLRRGGQVISHLLYMDDLKLFAPNDLQLMEVLKVTETFSSAIRMEFGVDKCAVMHVKRGEIVESVGTQLSDSINLRSLLATETYKYLGMSEALGINGADMKQSLKERFFGRLRKVLNSLLSGGNKVRAFNGWVMPVLMYSFGILKWTQTELDTLDRKVRTLLTAFRMHHPRSSVMRLYIPRSCGGRGFLNAKTLHNREICSLREYFLETDVGMHRDVVAVDKGLTPLSLAKENWRKPVVLDTNDRREVWQSKELHGRFFRALHGPDVDQSASVAWLRSGDLFGETEGFVCAIMDEVMMTNNYRRFIVKDGTVDICRACHRPGESIRHIISGCSRLANGEYLHRHNLVARIIHQQLALKYNLVELEVPYYRYEPDPVLEHGNITLYWDRSIITDRTIVANKPDIVVVDRSERRAMIVDITVPHDENLVKAEKDKQIKYIDLAREVVDMWDVDSAIIVPIVVTANGLIAKSLDQHLRRLSLGSWIKGLIQKAVLLDTARIVRRFLSLEP

SEQ ID NO: 10336 - protein, 1197 aa, Ochropleura plecta
MLTRSQARSARHPPPGSSLSSASPPPEPSLVVSAVTPAVAVASSSSDEYFSPPTTPPPVRRRGRHRPPDGLGPRGPPASDRVPAPGGSVQRMRWTQSINENVMRSYYGATEGGNNLTAYRVRMLSLFQVLEPAVNVSAQRLSDQVRVIQRNRMLDDTVLDRLRTEMQSSQVITSSSQAVAPPQPHQLVNRANEVSNDMATNVSTQCSEEMRSTLEGAIREYRYMSPELRPRLPRLPMHNKNRALVAALDSQLSSYFDNCENLTDAHSILYCAAVAVCRVAHVKFPDDRATRPKPAVPFWQCRIERRIGAARALIGKLICFREGNTRPRVMRFVRRAFSGTDITPPDYMSRIAERIDFLKQKVYAWANRIRRYKRRVERYTQNRTFQSDERWVYRAWERPDQGVSDTHLPDDNAMCLFWRSIWSVPVSHTEGEWTREVERACDPIPEMGALTISPQDVACAVRPLPNWKSPGPDGLHNFWIKWIQRSHVRLAALFQTALESGSLPKFLTTGITHLLHKSGSTAEPKNYRPITCLPTLYKVLTSILRAKITKHIDDNSIMSASQNGCRNGSRGTKELLLIDMAISQQVRRSRRHLSTCWIDYKKAYDSVPHTWLMRVLELYKIDATLRTFMISCMRQWSTVLRYPGCRQIQRNSEPIRIERGIFQGDSLSPLWFCLALNPLSTLLENSGLGYRLRRGGQVISHLLYMDDLKLFAHNDLQLMELLKVTETFSSSIRMEFGVDKCAVMHVKRGEIVESVGTQLSDSINLRSLSATETYKYLGMSEALGINVADMKQSLKERFFGRLRKVFNSLLSGGNKVRAFNGWVMPVLMYSFGILKWTQTELDALDRKVRTLLTTFRMHHPRSSATRLYIPRSCGGRGFLNAKTLHNREICSLREYFLETDVGMHRDVVAVDKGFTPLSLAKENWRKPVVLDTNDRREVWQSKELHGRFFRALHGPDVDQPASVAWLRSGDLFGETEGFVCAIMDEVMMTNNYRRFIVKDGTVDICRACHRPGESIRHIISGCSRLANGEYLHRHNLVARIIHQQLALKYSLVESEVPYYRYEPDPVLEHGNITLYWDRSIITDRTIVANKPDIVVVDRSERRTMIVDITVPHDENLVKAEKDKQIKYIDLAREVVDMWDVDSAIIVPIVVSANGLIAKSLDQHLRRLSLGSWIKGLIQKAVLLDTARIVRRFLSLEP

SEQ ID NO: 10337 - protein, 1198 aa, Ochropleura plecta
MITRLAARQHARLPPPDSPLSSASPPPEPSLIVSAVTPAVAVASSSSDEYFSPPTTPPPACRRGGRRPPDGLGLRGPLASDRVPAPGGSVQRMRWTSSINENVMRSYYGATEGGNNLTAYRVRMLSLFQVLEPAVNVSAQRLSDQVRVIQRNRMLDDTVLDRLRTEMQSSQVITSSSQAVVPPQSHQLVSHADEVSNDMATNVSTQCNEEMRIALEGAIREYRYISPELRPRLPRLPMHNKNRALVAVLDSQLSNYFDNCENLTDVHSILYCAAVAACRVAHVKFPDDGATRPKPAVPFWQCRIERRIGVARALIGKLICFREGNTRPRVMRFVRRAFAGTDISPPDYMSHITERIDFLKQKVYAWANRIRRYKRRVERYTLNRTFQSDERWVYRAWERPDQGVSDTHLPDDDAMCLFWRNIWSVPVSHTEGEWTREVERACDPIPEMGALTISPQDVACAVRPLPNWKSPGPDGLHNFWLKWIQRSHARLATLFQTALESGSLPKFLTTGITHLLHKSGSTTEPKNYRPITCLPTIYKVLTSILRAKITKHIDDNSIMSASQNGCRNGSRGTKELLLIDMAISQQVRRSRRHLSTCWIDYKKAYDSVPHTWLMRVLELYKVDATLCTFLSSCMRQWNTVLRYPGCRQIQRNSEPIRIERGIFQGDSLSPLWFCLALNPLSTLLEDSGLGYRLRRGGRVISHLLYMDDLKLFAPNDSQLMELLKVTETFSSAISMEFGVDKCAVMHVKRGEIVESVGTQLSDSIHLRSLSANETYKYLGMSEALGINVADMKQSLKERFFGRLRKVFNSLLSGGNKVRAFNGWVMPVLMYSFGILKWTQTELDALDRKVRTLLTAYRMHHPRSSVMRLYIPRSCGGRGFLNAKTLHNREICSLREYFLEADVGMHRDVVTVDKGFTPLSLAKENWRKPVVLDTNDRREVWQSKELHGRFFRALHGPDVDQPASVAWLRSGDLFGETEGFVCAIMDEVMMTNNYRRFIVKDGTVDICRACHRPGESIRHIISGCSRLANGEYLHRHNLVARIIHQQLALKYSLVESEVPYYRYEPDPVLEHGNITLYWDRSIITDRTIVANKPDIVVVDRSERRAMIVDITVPHDENLVKAEKDKQIKYIDLAREVVDMWDVDSAIIVPIVVSANGLIAKSLDQHLRRLSLGSWIKGLIQKAVLLDTARIVRRFLSLEP

SEQ ID NO: 10338 - protein, 1200 aa, Mythimna impura
MLTRSRAKKANTHPTSSGSSLSSASQPPGPAPTVSPEIPVAAVASSSSDEYFSPPTTPPPARRRGRGRPPASLGPRGPPASDRVLAAGGSVQRMRWTQSINENVKRSYFGATEGGSNLTAYRGRMLSLFQVLEPAVNVSAQRLSDQVRVIQRNRMLDDAVLDRLRLESRSSRVSPASPQAAVQLQSNVSLRPDHVGEDDDDGAISVSNQCNVRLRSALEDAFREYRFTPAELRPRLPRLPMHKKNRALVCALDSQLSNCFDSSEDLTDTHSILYCAAVAACRVARVKFPNSDRVTRPAVPAWQCRIERRIGEARALIGKLICFREGNTRPRVMRFVRRAFSGTNISPRDYLPHITERIDFLKQKVYAWANRIRRYKRRVERYTQNRTFQRNERWVYRAWERPDQGVIDTRLPDDDAMCSFWRSIWSVPVSHTEGDWTREIERTCDLIPEMEPITISPQDVARAVRPLPNWKSPGPDGLHNFWLKWFQRSHARLASQFQSALESGSLPQFLTTGITHLLHKSGSTAEPKNYRPITCLPTVYKVLTSILRAKINSHIETNSIMSASQNGCRNGSRGTKELLLIDVAISQQVRRSRRDLSTCWIDYKKAYDSVPHTWLMRVLELYKVDATLRTFLMSCMRQWRTALHYPGCRQIRESSEPIRIERGIFQGDSLSPLWFCLALNPLSTLLEGSGLGYRLKRGGQVISHLLYMDDLKLFASNSLQLMELLKVTETFSSAIRMEFGLDKCAVMHVKRGAIMESVGTQLSDSIYIRSLCSTETYKYLGMSEALGINAADMKQSLRERFFGRLNKVLNSLLSGRNKVRAFNGWVMPVLMYSFGILKWTQTELDALDRRVRSLLTANRMHHPRSSVMRLYIPRKCGGRGFLNAKTLHNREICSLREYFLKTDVGMHRDVVAVDKGLTPLSLVNENWRKPTVMDTNERRAVWQGKELHGRFYRALHGPDVDLLASVSWLRFGDLFGETEGFVFAIMDEVMMTNNYRKYIVKDGTVDICRACHRPGESIRHIISGCSHLANGDYLHRHNLVARIIHQQLALKYNLVESEVPYYRYVPDPVLENGSVTLYWDRSIITDRTIVANKPDIVVIDRLERRTMIVDIAVPHDENLVKAEKDKQTKYLDLAREVVDMWEVDRAVIVPIVVTANGLIAKSLEQHLRRLSLGSWIKGLIQKAVLLDTARIVRKFLSQEP

SEQ ID NO: 10339 - protein, 1200 aa, Mythimna impura
MLTRSRVREQATHPTSSGSSLSSASQPPGPAPAVSPVIPAAAVASSSSDEYFSPPTTPPPARRRGRGRPPASLRPRGPPASDRVPAAGGSVQRMRWTQSINENVMRSYFGATEGGSNLTAYRGRMLSLFQVLEPTVNVSAQRLSDQVRVIQRNRMLDDAVLDRLRLESQRSRASSATPPAAVQLQPSALPRPDHVGDADDDAAISVSTQCNERLRSALEDAFREYRSTPPGLRPRLPRLPMHKRNRALVCALDSQLSNCFDSSKDLADTHSILYCAAAAACRVAHVKFPNCDRATRPAVPAWQRRIESRIGEARALIGKLICFREGNTRPRVMRFVRRAFLGTDISPQNYLPCITERIDFLKQKVYAWASRIRRYKRRVERYTQNRTFQSNERWVYRTWERPDQDVTDTRLPDDDAMCSFWRRIWSVPVSHIEGDWIREVERTCDLLPEMGAITISPQDVARAVRPLPNWKSPGPDGLHNFWIKWFQGSHARLASQFQSALESGSLPEFLTTGITHLLHKSGSTVDPKNYRPITCLPTVYKVLTSILRAKINTHIETNSIMSASQNGCRNGSRGTKELLLIDMAISQQVRRSRKDLSTCWIDYKKAYDSVPHTWLMRVLELYKVDTTLRTFLMSCMRQWRTVLHYPGCRQIRENSEPIRIERGIFQGDSLSPLWFCLALNPLSTLLEGSGLGYRLKRGGQVISHLLYMDDLKLFAPNNLHLMELLKVTETFSNAIRMEFGVDKCAVMHVKRGEIMESVGTQLSDSIYLRSLCSTETYKYLGMSEALGINAADVKQSLKERFFGRLNRVLKSLLSGGNKVRAFNGWVMPVLMYSFGILKWTQTELDALDRRVRTLLTANRMHHPRSSVMRLYIPRKCGGRGFLNAKTLHNREVCSLREYFLETDVGMHRDVVAVDKGLTPLSLANGNWRKPIILDTNDRREVWQSKELHGRFYRALHGPDVDLLASVSWLRFGDLFGETEGFVCAIMDEVVMTNNYRKYIVKDGTADICRACHRPGESIRHIISGCSHLANGDYLHRHNLVAKIIHQQLALKYNLVESEVPYYKYVPDPVLDNGSITLYWDRSIITDRTIVANKPDIVVIDRLERRTVIVDIAVPHDDNLVKAEKDKQTKYLDLAREVVDMWEVDTAVIVPIVVTANGLISKSLDQHLRRLSLGSWIKGLIQKAVLLDTARIVRRFLSQEP

SEQ ID NO: 10340 - protein, 1200 aa, Mythimna impura
MLTRAAARRARPPPPASSLSSASPPPEPCLTVSAVTPAVAAASSSSDEYYSPPTTPPPTRRRGERRPPAWLGSRGPPASDRVPATGGCVSRMRWTQSINENVMRAYYGATEGGNNLTAYRVRMLSLFQVLEPAVNVSAQRLSDQVRVIQRNHMLDDTVLDRLRTEMGSHAIASSSQTAVPSQVLASNHLPNHADEESTDMVTHVSTQCSNELRSALECAIREYRNMPLELRPRLPRLPMCNKNKALVAALDSQLSNYFDDCEDLTDTHSIMYCAAVAACRVAHVKFPNSDVATRPKPAVPAWQCRIERRIGGARALIGKLICFREGNTRPRVMRFVRRAFSGTDISPRDYMSCVTERIDFLKQKVYAWANRIRRYKRRVERYTQNRTFRSNERWVYRAWEQPDQGVTDTRLPDDDAMSSFWRNIWSVPVSHTEGGWTREVERACEPIPEMGAITISPQDVARAVRPLPNWKSPGPDGLHNFWIKWLQRSHARLASQYQTALESGSLPEFLTTGVTHLLHKSGSTAEPKNYRPITCLPTVYKVLTSILRAKINHHVDNNDIMSASQNGCRNGSRGTKELLLIDMAISQQVRRSRKDLSTCWIDYKKAYDSVPHTWLMRVLELYKIDTTLRTFLMSCMRQWRTVLRYPGCRHIQRNSEPVRIERGIFQGDSLSPLWFCLTLNPLSTLLENSGLGYRLKRGGQVISHLLYMDDLKLFAPNNLQLMELLKVTETFSSAIRMEFGVDKCAVMHVKRGEIVESVGTQLSDSINLRSLSPTETYKYLGMSEALGINATDMKQTLRERFFGRLKKVFNSLLSGGNKVRAFNGWVMPVLMYSFGVLKWTQTELDALDRRVRTLLTAYRMHHPRSSVMRLYIPRKCGGRGFLNAKTLHNREVCSLREYFLTADVGMHRDVVAVDKGLTPLSLANESWRKPVVLDTNDRREVWQSKELHGRFFRALHGPDVDQLASVAWLRVGDLFGETEGFVCAIMDEVIMTNNYRRFIVKDGTVDICRACHRPGESIRHIISGCSRLANGEYLHRHNLVARIIHQQLALNYSLVESEVPYYRYVPDPVLDNSDITLYWDRSIITDRTIVANKPDIVVVDRRERRTMIVDISVPHDENLVKAEKDKQIKYIDLAREVVDMWDVDSAIIVPIVVSANGLIAKSLDQHLRRLALGGWIKGLIQKAVLLDTARIVRRFLSLEP

SEQ ID NO: 10341 - protein, 1200 aa, Mythimna impura
MLTRSRAKKANTHPTSSSSSLSSASQPPGPAPTVSPEIPVAAVASSSSDEYFSPPTTPPPARRRGRGRPPASLGSRGPPASDRVLAAGGSVQRMRWTQSINENVMRSYFGATEGGSNLTAYRGRMLSLFQVLEPAVNVSAQRLSDQVRVIQRNRMLDDAVLDRLRLESRSSRVSPASPQAAVQLQSNVSLRPDHVGEDDDDGAISVSNQCNVRLRSALEDAFREYRFTPAELRPRLPRLPMHKKNRALVCALDSQLSNCFDSSEDLTDTHSILYCAAVAAYRVARVKFPNSDRVTRPAVPAWQCRIERRIGEARALIGKLICFREGNTRPRVMRFVRRAFSGTDISPRDYLPHITERIDFLKQKVYAWANRIRRYKRRVERYTQNRTFQRNERWVYRAWERPDQGVIDTRLPDDDAMCSFWRSIWSVPVSHTEGDWIREIERTCDLIPEMGAITISPQDVARAVRPLPNWKSPGPDGLHNFWLKWFQRSHARLASQFQSALESGSLPQFLTTGITHLLHKSGSTAEPKNYRPITCLPTVYKVLTSILRAKINSHIETNSIMSVSQNGCRNGSRGTKELLLIDVAISQQVRRSRRDLSTCWIDYKKAYDSVPHTWLMRVLELYKVDATLRTFLMSCMRQWKTALHDPGCRQIRESSEPIRIERGIFQGDSLSPLWFCLALNPLSTLLEGSGLGYRLRRGGHVISHLLYMDDLKLFASNNLQLMELLKVTETFSSAIRMEFGLDKCAVMHVKRGEIMESVGTQLSDSIYIRSLCSTETYKYLGMSEALGINAADMKQSLRERFFGRLNKVLNSLLSGGNKVRAFNGWVMPVLMYSFGILKWTQTELDALDRRVHSLLTANRMHHPRSSVMRLYIPRKCGGRGFLNAKTLHNREICSLREYFLKTDVGMHRDVVAVDKGLTPLSLVNENWRKPTVMDTNERRAVWQGKELHGRFYRALHGPDVDLLASVSWLRFGDLFGETEGFVFAIMDEVMMTNNYRKYIVKDGTVDICRACHRPGESIRHIISGCSHLANGDYLHRHNLVARIIHQQLALKYNLVESEVPYYRYVPDPVLENGGVTLYWDRSIITDRTIVANKPDIVVIDRLERRTMIVDIAVPHDENLVKAEKDKQTKYLDLAREVVDMWEVDRAIIVPIVVTANGLIAKSLEQHLRRLSLGSWIKGLIQKAVLLDTARIVRRFLSQEP

SEQ ID NO: 10342 - protein, 1200 aa, Mythimna impura
MLTRSRAKKANTHPTSSGSSLSSASQPPGPAPTVSPEIPVAAVASSSSDEYFSPPTTPPPARRRGRGRPPASLGPRGPPASDRVLAAGGSVQRMRWTQSINENVMRSYFGATEGGSNLTAYRGRMLSLFQVLEPAVNVSAQRLSDQVRVIQRNRMLDDAVLDRLRLESRSSRVSPASPQAAVQLQSNVSLRPDHVGEDDDDGAISVSNQCNVRLRSALEDAFREYRFTPAELRPRLPRLPMHKKNRALVCALDSQLSNCFDSSEDLTDTHSILYCAAVAACRIARVKFPNSDRVTRPAVPAWQCRIERRIDEARALIGKLICFREGNTRPRVMRFVRRAFSGTNISPRDYLPHITERIDFLKQKVYAWANRIRRYKRRVKRYTQNRTFQRNERWVYRAWERPDQGVIDTCLPDDDAMCSFWRSIWSVPVSHTEGDWTREIERTCDLIPEMEPITISPQDVARAVRPLPNWKSPGPDGLHNFWLKWFQRSHARLASQFQSALESGSLPQFLTTGITHLLHKSGSTAEPKNYRPITCLPTVYKVLTSILRAKINSHIETNSIMSASQNGCRNGSRGTKELLLIDVAISQQVRRSRRDLSTCWIDYKKAYDSVPHTWLMRVLELYKVDATLRTFLMSCMRQWRTALHYPGCRQIRESSEPIRIERGIFQGDSLSPLWFCLALNPLSTLLEGSGLGYRLKRGGQIISHLLYMDDLKLFASNNLQLMELLKVTETFSSAIRMEFGLDKCAVMHVKRGEIMESVGTQLSDSIYIRSLCSTETYKYLGMSESLGINAADMKQSLRERFFGRLNKVLNSLLSGGNKVRAFNGCVMPVLMYSFGILKWTQTELDALDRRVRSLLTANRMHHPRSSVMRLYIPRKCGGRGFLNAKTLHNREICSLREYFLKTDVGMHRDVVAVDKGLTPLSLVNENWRKPTVMDTNERRAVWQGKELHGRFYRALHGPDVDLLASVSWLRFGDLFGETEGFVFAIMDEVMMTNNYRKYIVKDGTVDICRACHRPGESIRHIISGCSHLANGDYLHRHNLVARIIHQQLALKYNLVESEVPYYRYVPDPVLENGSVTLYWDRSIITDRTIVANKPDIVVIDRLERRTMIVDIAVPLDENLVKAEKDKQTKYLDLAREVVDMWEVDRAVIVPIVVTANGLIAKSLEQHLRRLSLGSWIKGLIQKAVLLDTARIVRRFLSQEP

SEQ ID NO: 10343 - protein, 951 aa, Mythimna impura
MHKRNRALVCALDSQLSNCFDSSKDLADTHSILYCAAAAACRVAHVKFPNCDRATRPAVPVWQRRIERRIGEARALIGKLICFREGNTRPRVMRFVRRAFLGTDISPQNYLPCVTERIDFLKQKVYAWASRIRRYKRRVERYTQNRTFQSNERWVYRTWDRLPDDDAMCSFWRRIWSVPVSHIEGDWIREVERTCDLLPEMGAITISPQDVARAVRPLPNWKSPGPDGLHNFWIKWFQGSHARLASQFQSALESGSLPEFLTTGITHLLHKSGSTADPKNYRPITCLPTVYKVLTSILRAKINTHIETNSIMSASQNGCRNGSRGTKELLLIDMAISQQVRRSRKDLSACWIDYKKAYDSVPHTWLMRVLELYKVDTTLRTFLMSCMRQWKTVLHYPGCRQIRVNSEPIRIERGIFQGDSLSPLWFCLALNPLSTLLEGSGLGYRLKRGGQVISHLLYMDDLKLFAPNNLHLMELLKVTETFSNAMRMEFGVDKCAVMHVKRGEIMESVGTQLSDSIYLRSLCSTETYKYLGMSEALGINAADVKQSLKERFFGRLNRVLKSLLSGGNKVRAFNGWVMPVLMYSFGILKWTQTELDALDRRVRTLLTANRMHHPRSSVMRLYIPRKCGGRGFLNAKTIHNREVCSLREYFLETDVDMHRDVVAVDKGLTPLSLANGNWRKPIILDTNDRREVWQSKELHGRFYRALHGPDVDLLASVSWLRFGDLFGETEGFVCAIMDEVVMTNNYRKYIVKDGTADICRACHRPGESIRHIIPGCSHLANGDYLHRHNLVAKIIHQQLALKYNLVESEVPYYKYVPDPVLDNGSITLYWDRSIITDRTIVANKPDIVVIDRLERRTVIVDIAVPHDDNLVKAEKDKQTKYLDLAREVVDMWEVDTAVIVPIVVTANGLISKSLDQHLRRLSLGSWIKGLIQKAVLLDTARIVRRFLSQEP

SEQ ID NO: 10344 - protein, 868 aa, Mythimna impura
MRFVRRAFSGTDISPRDYMSCVTERIDFLKQKVYAWANRIRRYKRRVERYTQNRTFRSNERWVYRAWEQPDQSVTDTRLPDDDAISSFWRNIWSVPVSHTEGGWTREVERACEPIPEMGAITISPQDVARAVRPLPNWKSPGPDGLHNFWIKWLQRSHARLASQYQTALESGSLPEFLTTGVTHLLHKSGSTAEPKNYRPITCLPTVYKVLTSILRAKINHHVDNNAIMSASQNGCRNGSRGTKELLLIDMAISQQVRRSQKDLSTCWIDYKKAYDSVPHTWLMRVLELYKIDTTLRTFLMSCMRQWRTVLRYPGCRHIQRNSEPVRIERGIFQGDSLSPLWFCLALNPLSTLLENSGLGYRLKRGGQVISHLLYMDDLKLFAPNNLQLMELLKVTETFSSAIRMEFGVDKCAVMHVKRGEIVESVGTQLSDSINLRSLSSTETYKYLGMSEALGINATDMKQTLRERFFGRLKKVFNSLLSGGNKVRAFNGWVMPVLMYSFGVLKWTQTELDALDRRVRTLLTAYRMHHPRSSVMRLYIPRKCGGRGFLNAKTLHNREVCSLREYFLAADVGMHRDVVAVDKGLTPLSLANESWRKPVVLDTNDRREVWQSKELHGRFFRALHGSDVDQLASVAWLRVGDLFGETEGFVCAIMDEVIMTNNYRRFIVKDGMVDICRACHRPGESIRHIISGCSRLANGEYLHRHNLVARIIHQQLALKYSLVESEVPYYRYMPDPVLDNGDITLYWDRSIITDRTIVANKPDIVVVDRRERRTMIVDISVPHDENLVKAEKDKQIKYVDLAREVVDMWDVDSAIIVPIVVSANGLIAKSLDQHLRRLALGGWIKGLIQKAVLLDTARIVRRFLSLEP

SEQ ID NO: 10345 - protein, 1200 aa, Mythimna impura
MLTRAAARRARPPPPASSLSSASPPPESSPTVSAVTPAVAVASSSSDEYFSPPTSPPPARRRRGRRPPSGLGPRGPPVSDRVPAPSGSVQRMRWTQSINENVMRAYYGATEGGNNLTAYRVRMLSLFQVLEPAVNVSAQRLSDQVRVIQRNHMLDDTVLDRLRTEMSNHAIAPSSQSVVPVMVPSSYHLSDHADEAITDMVTHVSTQCNNELRSALECAIREYRNMPLELRPRLPRLPMHNKNKALVAALDLQLSNYFDDCKDLTDTHSIMYCAAVAACRVAHVKFPNCDVATRPKPAVPAWQCRIERRIGGARALIGKLICFREGNTRPRVMRFVRRAFSGTDISPRDYMSRVTERIDFLKQKVYAWANRIRRYKRRVERYTQNRTFRSNERWVYRAWERPDQGVTDACLPDDDAMSSFWRSIWSVPVSHTEGDWTREVERACDPIPQMGAIDISPQDVARAVRPLPNWKSPGPDGLHNFWIKWFTRSHARLAYQFQSALESGLLPQFLTTGITHLLHKSGSTAEPKNYRPITCLPTVYKVLTSILRSKINSHIDKNLIMSPSQNGCRNGSRGTKELLLIDMTISQQVRRSRKDLSTCWIDYKKAYDSVPHTWLMRVLELYKIDTTLRTFLMSCMRQWSTVLRYPGCRHTQRNSEPVRIERGIFQGDSLSPLWFCLALNPLSTLLENSGLGYRLKRGGQVISHLLYMDDLKLFAPNNLQLMELLKVTETFSSAIRMEFGVDKCAVMHVKRGEVVESVGTQLTDSINLRSLSPTETYKYLGMSEALGINITDMKQSLKERFFGRLKKVLNSLLSGGNKVRAFNGWVMPVLMYSFGVLKWTQKELDALDRRVRTLLTAYRMHHPRSSVMRLYIPRKCGGRGFLNAKTLHNREVCSLREYFLAADVGMHRDVVAVDKGLTPLSLANENWRKPVVLDTNDRREIWQSKELHGRFFRALHGPDVDQLASVAWLRFGDLFGETEGFVCAIMDEVIMTNNYRRFIVKDGTVDICRACHRPGESIRHIISGCSRLANGEYLHRHNLVARIIHQQLALKYSLVESEVPYYRYEPDPVLDNGHITLYWDRSIITDRTIVANKPDIVMVDRSERRAMIVDISVPHDENLVKAEKDKQIKYIDLAREVVDMWDVDSAIIVPIVVSANGLIAKSFDQHLRRLALGGWIKGLIQKVVLLDTARIVRRFLSLEP

SEQ ID NO: 10346 - protein, 1200 aa, Mythimna impura
MLTRAAARRARLPPPASSLSSASPPPEPSPTVSAVTPAVAVASSSSDEYFSPPTSPPPARRRRGRRPPSGLGPRGPPASDRVPAPGGSVQRMRWTQSINENVMRAYYGATEGGNNLTAYRVRMLSLFQVLEPAVNVSAQRLSDQVRVIQRNHMLDDTVLDRLRTEMSNHAIAPSSQSVVPVMVPPSYHLSGHVDEEITDMVTHVSTQCNNELRSALECAIREYRNMPLELRPRLPRLPMHNKNKALVAALDLQLSNYFDDCKDLTDTHSIMYCAAVAACRLAHVKFPNCDVATRPKPAVPAWQCRIERRIGGARALIGKLICFREGNTRPRVMRFVRRAFSGTDISPRDYMSRVTERIDFLKQKVYAWANRIRRYKRRVDRYTQNRTFRSNERWVYRAWERPDQCVTDACLPDDDAMSSFWRSIWSVPVSHTEGDWTREVERACDPIPQMGAIDISPQDVARAVRPLPNWKSPGPDGLHNFWIKWFTRSHARLAYQFQSALESGSLPQFLTTGITHLLHKSGSTAEPKNYRPITCLPTVYKVLTSILRSKINSHIDKNLIMSPSQNGCRNGSRGTKELLLIDMTISQQVRRSRKDLSTCWIDYKKAYDSVPHTWLMRVLELYKIDTTLRTFLMSCMRQWSTVLRYPGCRHTQRNSEPVRIERGIFQGDSLSPLWFCLALNPLSTLLENSGLGYRLKRGGQVISHLLYMDDLKLFAPNNLQLMELLKVTETFSSAIRMEFGVDKCAVMHVKRGEVVESVGTQLTDFINLRSLSPTETYKYLGMSEALGINITDMKQSLKERFFGRLKKVFNSLLSGGNKVRAFNGWVMPVLMYSFGVLKWTQTELDALDRKVRTLLTAYRMHHPRSSVMRLYIPRKCGGRGFLNAKTLHNREVCSLREYFLAADVGMHRDVVTVDKGLTPLSLANENWRKPVVLDTNDRREVWQSKELHGRFFRALHGPDVDQLASVAWLRSGDLFGETEGFVCAIMDEVIMTNNYRRFIVKDGTVDICRACHRPGESIRHIISGCSRLANGEYLHRHNLVARIIHQQLALKYSLVESEVPYYRYEPDPVLDNGHITLYWDRSIITDRTIVANKPDIVVVDRSERRAMIVDISVPHDENLVKAEKDKKIKYIDLAREVVDMWDVDSAIIVPIVVSGNGLIAKSLDQHLRRLALGDWIKGLIQKAVLLDTARIVRRFLSLEP

SEQ ID NO: 10347 - protein, 1200 aa, Phlogophora meticulosa
MLTRSAARRARPPPLASSLSSASPPPESSPIVSTVTPAVAIASSSSDEYFSPPTSPPPARRRRGRRPPDSIGPRGPPASDRVPASGGSVQRMRWTQSINENVMRSYYGATEGGTNLTAYRGRMLSLFQMLEPAVNVSAQRLSDQVRVIQRNHMLDDVVLDRLRLNSRIYHVTPALPPAAVQLQSLPSVSPRPDYVGEEDDDAAISVSSQCNVRLRSALEDAFREYRSTPPELRSRLPRLPMHKKNKALMSALDSLLTKSFDNSKDLTDTHSILYCAAAAACRVANVKFPNTERATRPTVPAWQCRIQRRIDEARALIGKLICFREGNTRPRVMRFVRRAFSGTDISSRDYLTRVTERIDFLKQKICAWANRIRRYKRRVERYTQNRTFRSDERWVYRAWERSDQGVTDTCLPDDEAMCSFWRSIWSVPVSHTEGNWTREIERACEPLPEMGAINISPQDVASAVRPLPNWKSPGPDGLHNFWIKWLQSSHARLACQFQSALESGSLPQFLTTGITHLLHKSGSTAEPRNYRPITCLPTVYKVLTSILRSKINNHIDSNLIMSFSQNGCRNGSRGTKELLLIDTAISQQVRRSRKDLSTCWVDYKKAYDSVPHTWLMRVLELYKVDATLRTFLMSCMGQWRTVLRYPGCQQTRENSEPIRIERGIFQGDSLSPLWFCLALNPLSTLLEGSGLGYRLRTGGQVISHLLYMDDLKLFAPNNLQLMELLKVTETFSSAIRMDFGVDKCAVMHVKRGEIVESVGTQLSDSIYLRSLSSTETYKYLGMSEALGINATDMKQSLKERFFGRLNKVLNSLLSGGNKVRAFNGWVMPVLMYSFGILKWTQTELDALDRRVRTLLTANRMHHPRSSVMRLYIPRKCGGRGFLNAKTLHNREICSLREYFLKADVGMHRDVVAVDKTFTPLSLANKNWRKPIVLDTADRMEIWKSKELHGRFYRVLHGPDVDLVASISWLRFGDLFGETEGFVCAIMDEVIMTNNYRKYIVKDGTVDICRACHRPGESIRHIISGCSRLANGDYLHRHNLVARIIHQQLALKYNLVDLEVPYYKYVPDPVLENGSITLYWDRSIITDRTIVANKPDIVVIDRSERRTMIIDITVPHDENLVKAEKEKQMKYLDLAREVVDMWDVNTAVIVPIVVTANGIIAKSLDQHLKRLSLGSWIKGLIQKAVLLDTARIVRRFLSQEP

SEQ ID NO: 10348 - protein, 1107 aa, Phlogophora meticulosa
MRWTQSINENVMRSYYGATEGGSNLTAYRVRMLSLFQVLEPAVNVSAQRLSDQVRVIQRNHMLDDVVLDRLRTEMQSSRVITSPSHTVVPPQYNIVLSSFADGEGSDKVTNVSTQYNEELRSALEGAIREYRFMLPALRPRLPRLPMHNKNRALVAALDSQLSNYFDNCDDLTDAHSILYCAAVAACRVAHVKFPYDIATRPKPAVPAWQCRIERRIAGARALIGKLVCYREGNTRPRVMRYVRRAFLGTDISPRDYMSRVTERIDFLKQKVYAWASRIRRYKRRVERYTQNRTFQSNERWVYRAWERPVQGVTDTHLPDDDVMCSFWRNIWSVPVSHTEGDWTREVERACDPIPQMGAITISPQDVARAVRPLPNWKSPGPDGLHNFWIKWLQKSHARLASQFQSALETGSLPQFLTTGITHLLHKSGSTAEPKNYRPITCLPTVYKVLTSILRVKINNHIDSNSIMSASQNGCRNGSRGTKELLLIDTAISQQVRRSRKDLSTCWIDYKKAYDSVPHTWLKRVLELYKVDATLHSFLTSCMGQWRTVLRYPGCRQIQRNSEPIRIERGIFQGDSLSPLWFCLALNPLSTLLEDSGLGYRLKRGGQVVSHLLYMDDLKLFAPSDLQLMELLTVTKTFSSAIRMEFGVDKCAVMHVKRGKIVESVGTQLPDFINFRALSPIETYKYLGMSEALGINAADMKQSLKERFFGRLKKVCNSLLSGGNKVRAFNGWVMPVLMYSFGILKWTQTELDALDRRVRTFLTASRMHHPRSSVMRLYIPRKCGGRGFLNAKTLHNREICSLRDYFLETDVGMHRDVVAVDQGLTPLSLAKENWRKPVVLDTNDRKEVWQSKELHGRFFQALHGPDVDQLASVSWLRFGDLFGETEGFVCAIMDEVIMTNNYRRFIVKDGTVDICRACHRPGESIRHIISGCSRLANEEYLHRHNLVARIIHQQLALKYSLVESEVPYYKYVPDPVLENGSVTLYWDRSIITDRTIVANKPDIVVMDRIERRATIIDVTVPHDGNLVKAEKDKQIKYLDLAREVVDMWDVDSAIVVPIVVSANGLIAKSLDQHLRRLALGSWIKGLIQKAVLLDTARIVRRFLSLEP

SEQ ID NO: 10349 - protein, 1202 aa, Phlogophora meticulosa
MLTRSRARVLNAPITSSGSSLSSASQLPGPAPDVSPVTPAAAVASSSSDEYYSPPTSPPPVRRCGRGRPPASLGIRGPPASARVPASGGSVQRMRWTQSINENVMRSYYGATEGGTNLTAYRSRMLSLFQVLEPAVNVSAQRLSDQVRVIQRNHMLDDTVLDRLRLNSRSNRVMPASPLVAVQLPSLPIVSPRPDYVGEEDDDAAISVSSQCNVRLRSALEDAFREYRSTPPELRQRLPRLPMHKKNKALMCALDSLLSNSFDNSKDLADTHSILYCAAAAACRVANVKFPNSKKATRPAVPAWQCRIERRIGEARVLIGKLICFREGNTRPRVMRFVRRAFSGTDISSRDYLTRVTERIDFLKQKICAWANRIRRYKRRVERYTQNRTFRSDERWVYRAWERPDRGVIDTCLPDDEAMYSFWRSIWSVPVSHTEGDWTREVERACEPLPVMGTINISPQDVACAVCPLPNWKSPGPDGLHNFWIKWLKSSRARLATQFQSALESGSLPQFLTTGITHLLHKSGSTAEPKNYRPITCLPTVYKVLTSILRSKINNHIETSSIMSVSQNGCKNGSCGTKELLLIDMAISQQVRRSRKDLSTCWIDYKKAYDSVPHTWLMRVLELYKIDATLRTFLESCMRQWRTVLHYPGCRQFRENSDPIRIERGIFQGDSLSPLWFCLALNPLSTQLEGSGLGYRLRRGTQVISHLLYMDDLKLFAPNNLQLMELLKVTETFSSAIRMDFGVDKCAVMHVKRGGIVESAGTQLSDSIYLRSLSSTETYKYLGMSEALGINAADMKQSLKERFFCRLNKVLNSLLSGSNKVRAFNGWVMPVLMYSFGILKWTQTELDALDRRVRTLLTANRMHHPRSSVMRLYISRKCGGRGFLNAKTLHNREVCSLRKYFIEADVGMHRDVVAVDKGLTPLSLANENWRKPIVLDTTDRMEIWKSKELHGRFYRVLHGPDVDLLASISWLRFGDLFGETEGFVCAIMDEVIMTNNYRKYIVKDGTVDICRACHRPGESIRHIISGCSRLANGEYLHRHNLVARIIHQQLALKYNLVELEVPYYKYVPDPVLENGNITLYWDRSIITDRTIVANKPDIVVIDRSERRTMIVDITVPHDENLVKAEKEKQMKYLDLAREVVDMWEVNTAVIVPIVVTANGIIAKSLDQHLRRLSLGSWIKGLIQKAVLLETARIVRRFLSQEP

SEQ ID NO: 10350 - protein, 1198 aa, Phlogophora meticulosa
MLTRSAARRARPPPPASSLSSASSPPAPSPIVSTVKPAVPVASSSSDEYFSPPTSPPPARRRRGRRPPDGLGPRGPPASDRVPAPGGSVQRMRWTQSINENVMRSYYGATEGGSNLTAYRVRMLSLFQVLEPAVNVSAQRLSDQVRVIQRNHMLDDVVLDRLRTEMQSSRVITSPSHTVVPPQYNIVLSSFADGEGSDKVTNVSTQYNEELRSALEGAIREYRFMLPALRPRLPRLPMHNKNRALVAALDSQLSNYFDNCDDLTDAHSILYCAAVAACRVAHVKFPYDLATRPKPAVPAWQCRIERRIAGARALIGKLVCYREGNTRPRVMRYVRRAFLGTDISPRDYMSRVTERIGFLKQKVYAWASRIRRYKRRVERYTQNRTFQSNERWVYRAWERPVQGVTDTHLPDDDVMCSFWRNIWSVPVSHTEGDWTREVERACDPIPQMGAITISPQDVARAVRPLPNWKSPGPDGLHNFWIKWLQKSHARLASQFQSALETGSLPQFLTTGITHLLHKSGSTAEPKNYRPITCLPTVYKVLTSILRVKINNHIDSNSIMSASQNGCRNGSRGTKELLLIDTAISQQVRRSRKDLSTCWIDYKKAYDSVPHTWLKRVLELYKVDATLRTFLTSCMGQWRTVLRYPGCRQIQRNSEPIRIERGIFQGDSLSPLWFCLALNPLSTLLEDSGLGYRLKRGGQVVSHLLYMDDLKLFAPSDLQLMELLTVTKTFSSAIRMEFGVDKCAVMHVKRGKIVESVGTQLPDFINFRALSPIETYKYLGMSEALGINAADMKQSLKERFFGRLKKVCNSLLSGGNKVRAFNGWVMPVLMYSFGILKWTQTELDALDRRVRTFLTASRMHHPRSSVMRLYIPRKCGGRGFLNAKTLHNREICSLRDYFLETDVGMHRDVVAVDQGLTPLSLAKENWRKPVVLDTNDRKEVWQSKELHGRFFQALHGPDVDQLASVSWLRFGDLFGETEGFVCAIMDEVIMTNNYRRFIVKDGTVDICRACHRPGESIRHIISGCSRLANEEYLHRHNLVARIIHQQLALKYSLVESEVPYYKYVPDPVLENGSVTLYWDRSIITDRTIVANKPDIVVMDRIERRATIIDVTVPHDGNLVKAEKDKQIKYLDLAREVVDMWDVDSAIVVPIVVSANGLIAKSLDQHLRRLALGSWIKGLIQKAVLLDTARIVRRFLSLEP

SEQ ID NO: 10351 - protein, 1202 aa, Phlogophora meticulosa
MLTRSRARVLNAPKTSSGSSLSSASQLPGPAPDVSPVTPAAAVASSSSDEYYSPPTSPPPVRRCGRGRPPASLGLRGPPASARVPASGGSVQRMRWTQSINENVMRSYYGATEGGTNLTAYRSRMLSLFQVLEPAVNVSAQRLSDQVRVIQRNHMLDDTVLDRLRLNSRSNRVMPASPLVAVQLPSLPIVSPRPDYVGEEDDDAAISVSSQCNVRLRSALEDAFREYRSTPPELRQRLPRLPMHKKNKALMCALDSLLSNSFDNSKDLADTHSILCCAAAAACRVANVKFPNSKKATRPAVPAWQCRIERRIGEARVLIGKLICFREGNTRPRVMRFVRRAFSGTDISSRDYLTRVTERIDFLKQKICAWANRIRRYKRRVERYTQNRTFRSDERWVYRTWERPDQGVTDTFLPDDEAMCLFWRSIWSVPVSHTEGDWTREVERTCEPLPEMGAINISPQDVACAVRPLPNWKSPGPDGLHNFWIKWLKSSHARLASQFQSALESGSLPQFLTTGITHLLHKSGSTAEPKNYRPITCLPTVYKVLTSILRSKINNHIDSTSIMSVSQNGCKNGSRGTKELLLIDMAISQQVRRSRKDLSTCWIDYKKAYDSVPHTWLMRVLELYKIDATLRTFLKSCMGQWRTVLHYPGCRQFQENSEPIRIERGIFQGDSLSPLWFCLALNPLSTLLEGSGLGYRLRRGGQVISHLLYMDDLKLFAHNNLQLMKLLKVTETFSSAIRMDFGVDKCAVMHVKRGGIVESAGTQLSDSIYLRSLSSTETYKYLGMSEALGINTADMKQSLKERFFGRLNKVLNSLLSGGNKVRAFNGWVMPVLMYSFGILKWTQTELDALDRRVRTLLTANRMHHPRSSVMRLYISRKCGGRGFLNAKTLHNREVCSLREYFLETDVGMHRDVVAMDKALTPLSLANENWRKPIVLDTTDRMEIWKSKELHGRFYRVLHGPDVDLSASVSWLRFGDLFGETEGFVCAIMDEVIMTNNYRKYIVKDGTVDICRACHRSGESIRHIISGCSRLANGDYLHRHNLVAKIIHQQLALKYNLVESEVPYYKYVPDPVLENGNITLYWDRSIITDRTIVANKPDIVVIDRLERRTMIVDITVPHDDNLVKAEKEKQIKYLDLAREVVDMWDVNTAVIVPIVVTANGIIAKSLDQHLRRLSLGSWIKGLIQKAVLLDTARIVRRFLSQEP

SEQ ID NO: 10352 - protein, 974 aa, Xestia xanthographa
MQPDLRPRIPRLPMHNRNRALVAVLDSQLSNYFDNCEDLTDVHSILYCAAVAACRVAHVKFPSDRATRPKPAVPAWQYRIERRIGGARALIGKLVCFREGNTRPRVMRFVRQAFSGTDISPRDYMSRVTERIDFLKQKVYAWANRIRRYKRRVDRYTQNRTFQKDERWVYRAWERPDQGVADTHLPDDDAMCSFWRSIWSVPVSHAEGEWTRVIERACDPISEMGAINISPQDVARAVRPLPNWKSPGPDGLHNFWIKWFTRSHARLATLFQSALESGSLPEFLTTGITHLLHKSGSTAEPKNYRPITCLPTVYKVLTSILRTKISKHIDDNSVMSASQNGCRNGSRGTKELLLIDMAISHQVRRSRKDLSTCWIDYKKAYDSVPHTWLMRVLELYKVDATLRTFLMSCMGQWRTVLRYPGCRQIQRNSEPIRIERGIFQGDSLSPLWFCLALNPLSTLLEDSGLGYRLRKDGQVISHLLYMDDLKLFAPNDLRLMELLKVTETFSNAIRMEFGVDKCAVMHVKRGEIVESVGTQLSDSITLRSLSATETYKYLGMSEALGVNVADMKQSLKERFFGRLKKVLNSLLSGGNKVRAFNGWVMPVLMYSFGILKWTQTELDALDTKVRKLLTAYRMHHPRSSVMRLYIPRKCGGRGFLNAKTLHNREICSLREYFLGTDVGMHRDVVTMDKGFTPLSLAKENWRKPPVLDTNDRREVWQSKELHGRFFRALHGPDVDLSASVAWLRSGDLFGETEGFVCAIMDEVMMTNNYRRFIVKDGTVDICRACHRPGESIRHIISGCSRLANGEYLHRHNLVARIIHQQLALKYNLVESEVPYYRYVPDPVLDNGCITLYWDQSIITDRTIVANKPDIVVVDRSERRAMIVDITVPHDENLVKAEKDKQIKYLDLAREVVDMWEVDSAIIVPIVVLAHGLIAKSLDQYLRRLSLGSWIKGLIQKAVLLDTARIVRRFLSLEP

SEQ ID NO: 10353 - protein, 1209 aa, Xestia xanthographa
MITRSRAKQHQEAHPPSPGSSLSSASQPPGRATPVSIVSPVAAVASSSSDEFFSPPSTPSPSPRRGRRRGRGRPPAGLGPRGQQAPSRVPAAGGNVSRIRWTQSMNENVMRAYYGATEGGINLTAYRGQMLSLFQVLEPGVSASAQRLSDQVRVIQRNHMLDDTVLDRLRSESRSNLVTPASPLIAVQVQNVSSAPPRSDRDGEEDDSEVISVSTQCNAQLRSALESAFREYRSTPPELRPRLPRLPMHNKNKALVCALDSQLSNCFDSSKDLADTHSILYCGAMAACRVARVKFPNNDRATRPKLTAPAWQCRIERRIGEARALIGKLICFREGNTRPRVMRFVRRAFSGTDISFRDYLARVAERIDSLKQKICAWASRIRRYKRRVERYTQNRTFQSDERWVYRAWERPDQGVTDMRLPDDSAMCSFWRSIWSVPVSHTEGDWTREVEQACDPIPEMGAIVISPQDVARAVRPLPNWKSPGPDGLHNFWIKWFQRSHACLASQFQSALESGSLPQFLTTGITHLLHKSGSVAEPKNYRPITCLPTVYKVLTSILRAKINQHIESNSIMSASQNGCRNGSRGTKELLLIDMAISQQVRRSRKNLSTCWIDYKKAYDSVPHTWLMRVLELYKVDATLRTFLMSCMGQWRTVLRYPGCRQIQGNSEPIRIERGIFQGDSLSPLWFCLALNPLSTLLERSGLGYLLRRDGQVISHLLYMDDLKLFAPNNLQLMKLLKVTETFSSAIRMEFGVDKCAVMHVKRGEIMESVGTQLSDSIHLRPLSSTETYKYLGMSEALGINTADMKQSLRERFFGRLNKVLGSLLSGGNKVRAFNGWVMPVLMYSFGILKWTQTELDALDRRVRTLLTANRMHHPRSSVMRLYIPRKCGGRGFLNAKTLHNREVCSLREYFLEADGEMHRDVVSVDKGLTPLSLANENWRKPKVLDTNDRKVEWQGKELHGRFYRALHGPDVDFLASVSWLRFGDLFGETEGFVCAIMDEVMMTNNYRKYIVKDGTVDICRACHRPGESIRHIISGCSSLANGEYLHRHNLVARIIHQQLALKYNLVESEVPYYKYAPDPVLDNGHITLYWDRPITTDRTVVANRPDIVVIDRLERRTMIVDITIPHDENLVKAEKDKQFKYLDLAREVVDMWDVDTAVIVPIVVSANGLIAKSLDQHLRRLSLGSWIKGLIQKAVLLDTARIVRRFLSQEP

SEQ ID NO: 10354 - protein, 1211 aa, Xestia xanthographa
MSPMLTRHRAKLQKEAHPPSPGSSLSSASQPPERATPVSTVSPVAAVASSSSDEFFSPPSTPSPPPRGRRRGRGRPPAGLGPRGQQAPSRVPAAGGNVSRMRWTHSINENVMRAYYGATEGGSNLTAYRSRMLSLFQVLEPAVSVEAQRLSDQVRVIQRNHMLDDTVLDRLRSESRSNLVTPASPMIAVQQQNIPSAPPRSDYDGEEDRDEVISVSTQCNAQLRSALEGAFREYRSTPPELRPRLPRLPMHNKNKALMCALDSQLSNCFDSSKDLADTHSILYCGAVAACRVAHVKFPNNDRATRPKLAVPAWQCRIERRIGEARALIGKLICFREGNTRPRVMRFVRRAFSGTDISFRDYLARVTERIDSLKQKICAWASRIRRYKRRVERYTQNRTFQSDERWVYRAWERPDQGVTDTRLPNESATYSFWRNIWSVPVSHTEGDWTREVEQACDPIPEMGAIIISPQDVARAVRPLPNWKSPGPDGLHNFWIKWFQRSHARLASQFQSALESGSLPQFLTTGITHLLHKSGSVAEPKNYRPITCLPTVYKVLTSILRAKINQHIDSNSIISASQNGCRNGSRGTKELLLIDMAISQQVRRSRKNLSTCWIDYKKAYDSVPHTWLMKVLELYKIDATLRTFLMSCMGHWRTVLRYPGCRQIQGNSEPIRIERGIFQGDSLSPLWFCLALNPLSTLLERSGLGYLLRRDGQVISHLLYMDDLKLFAPNNLQLMKLLKVTETFSSAIRMEFGVDKCAVMHVKRGEIMESVGTQLSDSIHLRSLSSTETYKYLGMSEALGINTADVKQSLRERFFGRLNKVLGSLLSGGNKVRAFNGWVMPVLMYSFGILKWTQTELDALDRRVRTLLTANRMHHPRSSVMRLYIPRKCGGRGFLNAKTLHNREVCSLREYFLEADGEMHRDVVSVDKGLTPLSLANENWRKPKVLDTNDRKVEWQGKELHGRFYRALHGPDVDFLPSVSWLRFGDLFGETEGFICAIMDEVMMTNNYRKYIVKDGTVDICRACHRPGESIRHIISGCSSLANGEYLHRHNLVARIIHQQLALKYNLVESEVPYYKYAPDPVLDNGHITLYWDRPITTDRTVVANRPDIVVIDRLEGRTMIVDITIPHDENLVKAEKDKQFKYLDLAREVVDMWDVGTAVIVPIVVSANGLIAKSLDQHLRRLSLGSWIKGLLQKAVLLDTARIVRRFLSQEP

SEQ ID NO: 10355 - protein, 1205 aa, Cosmia trapezina
MLTRSRAQQLRNTQPTSSGSSLSSASQLPEPAPDVSQVIPAAAVASSSSDEYFSPPTTPPPVRRRGRGRPPASLGPRGPSASDRVPAPGGSVQRMRWTQTVNENVMRAYFGATEGGSNLTAYRGRMLSLFQVLEPAVNVSAQRLSDQVRVIQRNHMLDDVVLDRLRLESRNSRVTSVSPMVAVQLQNLPSASPRPDCVGEEDDSGAISVSSQCNVQLRSALEDAFREYRSAPPGLRPRLPRLPMHKKNKALVGALDSQLSNCFDGSKDLADTHSILYCAAVAACRVAHVKFPNSDRVPRPKPAVPAWQCRIERRIGEARALIGKLICFREGNTRPRVMRFVRRAFSGTDISPRDYFTCVTERIDFLKQKICAWANRIRRYRRRVERYTQNRTFQSDERWVYRAWERPDQGVADTQLPDDDAMCSFWRSIWSVPVSHTEGDWTREVERACDHIPQMGALTISPQDVARAVRPLPNWKSPGPDGLHNFWIKWFQRSHARLASQFQSALQSGSLPRFLTTGITHLLHKSGSTAEPRNYRPITCLPTVYKVLTSILRAKINKHIDANSIMSASQNGCRNGSRGTKELLLIDMTINQQVRRSRKDLSTCWIDYKKAYDSVPHTWLMRVLELYKIDATLRTFLMSCMGQWRTVLRYPGCRNIQRNSEPIRIERGIFQGDSLSPLWFCLALNPLSTLLEDSGLGYRLRRGGQVISHLLYMDDLKLFAPNNLQLMELLKVTETFSSAIRMEFGVDKCAVMHVKRGEIVESVRTQLSDSIHLRSLSSLETYKYLGMSEALGINAADMKQSLRERFFGRLNKVLNSLLSGGNKVRAFNGWVMPVLMYSFGILKWTQTELDALDRRVRTLLTANRMHHPRSSVMRLYIPRKCGGRGFLNAKTLHNREVCSLREYFLEADVGMHRDVVSVDKGLTPLSLANENWRKPVVLDTNDRREVWQSKELHGRFYRVLHGPDVDFLASVSWLRFGDLFGETEGFVFAIMDEVMMTNNYRKYIVKDGTVDICRACHRPGESIRHIISGCSRLANGDYLHRHNLVARIIHQQLALKYSLVESEVPYYRYVPDPVLENGNITLYWDRSIITDRTIVANKPDIVVIDRLERRTMIVDIAVPHDENLVKAEKDKQIKYLDLAREVIDMWDVDTAIIVPIVVTANGIIAKSLDQHLRRLSLGGWIKGLIQKAVLLDTARIVRRFLSQQP

SEQ ID NO: 10356 - protein, 1205 aa, Cosmia trapezina
MLTRSRAQHLRNTHPTSSGSSLSSASQLPEPAPDVSQVIPAAAVASSSSDEYFSPPTTPPPVRRRGRGRPPASLGPRGPPASDRVPAPGGSVQRMRWTQTVNENVMRAYFGATEGGSNLTAYRGRMLSLFQVLEPAVNVSAQRLSDQVRVIQRNHMLDDVVLDRLRLESRNSRVTSDSPMVAVQLQNLPSASPRPDRVGEEDDSGAISVSSQCNVQLRSALEDAFREYRSTPPGLRPRLPRLPMHKKNKALVCALDSQLSNCFDGSKDLADTHSILYCAAVAACRVAHVKFHNNDRVTRPKPAVPTWQCRIERRIGEARALIGKLICFREGNTRPRVMRFVRRAFSGMDISPRDYLTCVTERIDFLKQKICAWANRIRRYRRRVERYTQNRTFQSDERWVYRAWERPDQGVADTQLPDDDAMCSFWRSIWSVPVSHTEGDWTREVERACDHIPQMGALTISPQDVARAVRPLPNWKSPGPDGLHNFWIKWFQRSHARLASQFQSALQSGSLPQFLTTGITHLLHKSGSTAEPRNYRPITCLPTVYKVLTSILRAKINKHIDTNSIMSASQNGCGNGSRGTKELLLIDMTISQQVRRSRKDLSTCWIDYKKAYDSVPHTWLMRVLELYKIDATLRTFLMSCMGQWRTVLRYPGCRNIQRNSEPIRIERGIFQGDSLSPLWFCLALNPLSTLLEDSGLGYRLRRGGQVISHLLYMDDLKLFAPNNLQLMELLKVTETFSSAIRMEFGVDKCAVMHVKRGEIVESVRTQLSDSIHLRSLSSLETYKYLGMSEALGINAADMKQSLRERFFGRLNKVLNSLLSGGNKVRAFNGWVMPVLMYSFGILKWTQTELDALDRRVRTLLTANRMHHPRSSVMRLYIPRKCGGRGFLNAKTLHNREVCSLREYFLEADVGMHREVVSVDKGLTPLSLANENWRKPIVLDTNDRREVWQSKELHGRFYRVLHGPDVDFLASVSWLRFGDLFGETEGFVFAIMDEVMMTNNYRKYIVKDGTVDICRACHRPGESIRHIISGCSRLANGDYLHRHNLVARIIHQQLALKYSLVESEVPYYRYVPDPVLENGNITLYWDRSIITDRTIVANKPDIVVIDRLERRTVIVDIAVPHDENLVKAEKDKQIKYLDLAREVVDMWDVDTAIIVPIVVTANGIIAKSLDQHLRRLSLGGWIKGLIQKAVLLDTARIVRRFLSQQP

SEQ ID NO: 10357 - protein, 1205 aa, Cosmia trapezina
MLTRSRAQQLRNTQPTSSGSSLSSASQLPEPAPDVSQVIPAAAVASSSSDEYFSPPTTPPPVRRRGRGRPPASLGPRGPSASDRVPAPGGSVQRMRWTQTVNENVMRAYFGATEGGSNLTAYRGRMLSLFQVLEPAVNVSAQRLSDQVRVIQRNHMLDDVVLDRLRLESRNSRVTSVSPMVAVQLQNLPIASPRPDCVGEEDDSGAISVSSQCNVQLRSALEDAFREYRSAPPGLRPRLPRLPMHKKNKALVGALDSQLSNCFDDSKDLADTHSILYCAAVAACRVAHVKFPNSDRVPRPKPAVPAWQCRIERRIGEARALIGKLICFREGNTRPRVMRFVRRAFSGTDISPRDYFACVTERIDFLKQKICAWANRIRRYRRRVERYTQNRTFQSDERWVYRAWERPDQGVADTQLPDDDAMCSFWRSIWSVPVSHTEGDWTREVERACDHIPQMGALTISPQDVARAVRPLPNWKSPGPDGLHNFWIKWFQRSHARLASQFQSALQSGSLPQFLTTGITHLLHKSGSTAEPRNYRPITCLPTVYKVLTSILRAKINKHIDTNSIMSASQNGCGNGSRGTKELLLIDMTINQQVRRSRKDLSTCWIDYKKAYDSVPHTWLMRVLELYKIDATLRTFLMSCMGQWRTVLRYPGCRNIQRNSEPIRIERGIFQGDSLSPLWFCLALNPLSTLLEDSGLGYRLRRGGQVISHLLYMDDLKLFAPNNLQLMELLKVTETFSSAIRMEFGVDKCAVMHVKRGEIVESVRTQLSDSIHLRSLSSLETYKYLGMSEALGINAADMKQSLRERFFGRLNKVLNSLLSGGNKVRAFNGWVMPVLMYSFGILKWTQTELDALDRRVRTLLTANRMHHPRSSVMRLYIPRKCGGRGFLNAKTLHNREVCSLREYFLEADVGMHRDVVSVDKGLTPLSLANENWRKPVVLDTNDRREVWQSKELHGRFYRVLHGPDVDFLASVSWLRFGDLFGETEGFVFAIMDEVMMTNNYRKYIVKDGTVDICRACHRPGESIRHIISGCSRLANGDYLHRHNLVARIIHQQLALKYSLVESEVPYYRYVPDPVLENGNITLYWDRSIITDRTIVANKPDIVVIDRLERRTMIVDIAVPHDENLVKAEKDKQIKYLDLAREVVDMWDVDTAVIVPIVVTANGIIAKSLDQHLRRLSLGGWIKGLIQRAVLLDTARIVRRFLSQQP

SEQ ID NO: 10358 - protein, 1204 aa, Cosmia trapezina
MMQTRAKTRIQAHPPSPDSSLSSASQPVRASTVSAVSPVAAVASSSSDEFFSPPSSPTPPRRRGRGRPPAGLGPRGQPAPNRVPAAGGNVSRMRWTQSINENVMRAYYGATEGGINLTAYRGRMLSLFQVLEPAVNVSAQRLSDQVRVIQHNHRLDNATLDRLRSEMQSSSASNPPPSQNVMHVPAEIPLRANQRDEEENARAISADNLCNVEIRSALEDAIREYRFTSPDLRPRLPRLPMNKKNRALVCALDALLPNFIESSADLCDTHSILYCTAVAACRVACVKFPNTDRATRPKPAAPAWQCRIERRINEARVLIGKLICFREGNTRPRVMRFVRQAFSGTNVSPQEYVSRVTERIDFLKQKVYAWANRIRRYRRRVDRYSQNRMFQSDERWVYRAWERPIPTQGVTDVRPPDNETMSAFWRSIWSVPVSHTEGDWMRIVEQACDSIPNMDAVTISPLDVACAVRPLPNWKSPGPDGLHNFWIKWLQRSHACLASQFQSSLETGSLPLLFTTGVTHLLHKSGSTAEPKNYRPITCLPTVYKVLTSILRAKIAHHIYNNSIMSVSQNGCRNGSRGTKELLLIDMTISQQVRRSRKDLSTCWIDYKKAYDSVPHTWLIRVLELYKIDATLRTFLMSCMGQWKTVLLCPGCRRIPGIDEPIRIERGIFQGDSLSPLWFCLALNPLSTLLEDSGLGYRLRRGGQVISHLLYMDDLKLFAPNNLRLMELLKVTENFSSAIRMEFGVDKCAVMHVKRGEIMESVGTQLSDSIHLRSLSSTETYKYLGMSEALGINVADMKQSLKERFFGRLKKVFNSLLSGGNKVRAFNGWVMPVLMYSFGVLKWTQTELDALDRRVRTLLTAYRMHHPRSSVMRLYIPRKCGGRGFLNAKTLHNREICSLREYFLEADVGMHRDVVAVDKGLTPLSLAKENWRKPAVLDTNDRREVWQGKELHGRFFRALHGPDVDFLASVSWLRFGDLFGETEGFVCAIMDEVIMTNNYRKYIVKDGTVDICRACHHPGESIRHIVSGCSRLANGEYLHRHNLVARIIHQQLALQYNLVESEVPYYRYVPDPVLENGQATLYWDRSIITDRTIVANKPDIVVIDRRERRAIIVDIAVPHDENLVKAEKDKKIKYLDLAHEVVDMWDVDSAIIVPIIVTVNGLIAQSLDQHLRRLSLRGWIKGLIQRAVLLDTARIVRRFLSLEP

SEQ ID NO: 10359 - protein, 1204 aa, Cosmia trapezina
MMQTRAKTRIQAHPPSPDSSLSSASQPVRASTVSAVSPVAAVASSSSDEFFSPPSSPTPPRRRGRGRPPAGLGPRGQPAPNRVPAAGGNVSRMRWTQSINENVMRAYYGATEGGINLTAYRGRMLSLFQVLEPAVNVSAQRLSDQVRVIQHNHRLDNATLDRLRSEMQSSSASNPPPSQNVMHVPAEIPLRANQRDEEENARAISADNLCNVEIRSALEDAIREYRFTSPDLRPRLPRLPMNKKNRALVCALDALLPNFIESSADLCDTHSILYCTAVAACRVACVKFPNTDRATRPKPAAPAWQCRIERRINEARVLIGKLICFREGNTRPRVMRFVRRAFSGTNVSPQEYVSRVTERIDFLKQKVYAWANRIRRYRRRVDRYSQNRMFQSDERWVYRAWERPIPTQGVTDVRPPDNETMSAFWRSIWSVPVSHTEGDWMRIVEQACDSIPNMDAVTISPLDVACAVRPLPNWKSPGPDGLHNFWIKWLQRSHACLASQFQSSLETGSLPLLFTTGVTHLLHKSGSTAEPKNYRPITCLPTVYKVLTSILRAKIAHHIYNNSIMSVSQNGCRNGSRGTKELLLIDMTISQQVRRSRKDLSTCWIDYKKAYDSVPHTWLIRVLELYKIDATLRTFLMSCMGQWKTVLLYPGCRRIPRIDEPIRIERGIFQGDSLSPLWFCLALNPLSTLLEDSGLGYRLRRGGQVISHLLYMDDLKLFAPNNLRLMELLKVTENFSSAIRMEFGVDKCAVMHVKRGEIMESVGTQLSDSIHLRSLSSTETYKYLGMSEALGINVADMKQSLKERFFGRLKKVFNSLLSGGNKVRAFNGWVMPVLMYSFGVLKWTQTELDALDRRVRTLLTAYRMHHPRSSVMRLYIPRKCGGRGFLNAKTLHNREICSLREYFLEADVGMHRDVVAVDKGLTPLSLAKENWRKPAVLDTNDRREVWQGKELHGRFFRALHGPDVDFLASVSWLRFGDLFGETEGFVCAIMDEVIMTNNYRKYIVKDGTVDICRACHHPGESIRHIVSGCSRLANGEYLHRHNLVARIIHQQLALQYNLVESEVPYYRYVPDPVLENGQATLYWDRSIITDRTIVANKPDIVVIDRRERRAIIVDIAVPHDENLVKAEKDKKIKYLDLAHEVVDMWDVDSAIIVPIIVTVNGLIAQSLDQHLRRLSLRGWIKGLIQKAVLLDTARIVRRFLSLEP

SEQ ID NO: 10360 - protein, 1200 aa, Mamestra brassicae
MLTRSRARAQTAQPTSSGSSLSSASQPPGPAPAVSPEIPVAAVASSSSDEYFSPPTTPPPARRRGRGRPPTSLGPRGPPASDRVPAIGGSVQRMRWTQTINENVMRSYYGATEGGTNLTAYRGRMLSLFQVLEPAVNVSAQRLSDQVRVILRNRMLDDAVLDRLRLESRSGRVSPASPPAAVQIQSSISPRSNNVGEDDDDGAISVSTQCNERLRSALEDAFREYRSTPPELRPRLPRLPMHNKNRALVCALDSQLTNCFDSSEDLADTHSILYCAAAAACRVAHVKFLNSDRATRPAVPAWQCRIERRIGEARALIGKLICFREGNTRRRVMRFVRRAFSGTDTSPRDYLTRVTERIDFLKQKIYAWANRIRRYKRRVERYTQNRTFQSNERWVYRAWERPDQGMTDTRLPDDDVMCSFWRNIWSVPVSHTEGDWIREVERACDPILEMGATTISPQDVARAVRPLPNWKSPGPDGLHNFWIKWFTGSHARLASQFQSALESGSLPQFLTTGITHLLHKSGSTAEPKNYRPITCLPTVYKVLTSILRAKINHHIESNSIMSASQNGCRNGSRGTKELLLMDIAISQQVRRSRKDLLTCWIDYKKAYDSVPHTWLMRVLELYKVDAVLRTFLMSCMGQWRTVLRYPGCRQIQVNGDPIRIERGIFQGDSLSPLWFCLALNPLSTLLEGSGQGYRLRRGGQVISHLLYMDDLKLFAPNNLQLMELLKVTETFSSAISMEFGVDKCAVMHVKRGEIMESVGTQLSDSIHLRSLSSTETYKYLGMSEALGINANDMKQSLKERFFGRLNKVLNSLLSGGNKVRAFNGWVMPVLMYSFGILKWTQTELDALDRRVRSLLTANRMHHPRSSVMRLYIPRKCGGRGFLNAKTLHNREICSLREFFLEADVGMHRDVVAVDKGLTALSLANENWRKPVVLDTNDRREVWQSKELHGRFYRVLHGPDVDFLASVAWLRFGDLFGETEGFVCAIMDEVMMTNNYRKYTVKDGTVDICRACHRPGESIRHIISGCSSLANGDYLHRHNLVARIIHQQLALKYNLVESEVPYYRYVPDPVLENGNCTLYWDRSIITDRTIVANKPDIVVIDRLERRAMIVDIAVPHDENLVKTEQDKQTKYLDLAREVVDMWDVNTAVIVPIVVTANGIIAKSLDQHLKRLSLGSWIKGLIQKAVLLDTARIMRRFLFQGP

SEQ ID NO: 10361 - protein, 1087 aa, Mamestra brassicae
MHIKIQHRIIIIIIRFQVLEPAVNVSAQRLSDQVRVIQRNRMLDDAVLDRLRLESRNGRVSAASPSAAVQIQFSVSPRPNIVGEDDDDGAISVSTQCNERLRSALEDAFREYRSTPPELRPRLPRLPMHNKNRALVCALDSQLANCFDSSEDLADTHSILYCAAAAACRVAHVKFPNSDRATRPAVPAWQCRIERRIGEARALIGKLICFREGNTRRRVMRFVRRAFSGTDTSPRDYLTRVTERIDFLKQKIYAWANRIRRYKRRVERYTQNRTFQSNERWVYRAWERPDQGVTDTRLPDDDVMCSFWRNIWSVPVSHTEGDWTREVERACDPIPEMGAITISPQDVARAVRPLPNWKSPGPDGLHNFWIKWFKRSHACLASQFQSALESGSLPQFLTTGITHLLHKSGSTAEPKNYRPITCLPTVYKVLTSILRAKINQHIETNSIMSASQNGCRNRSRGTKELLLIDVAISQQVRRSRRDLSTCWIDYKKAYDSVPHTWLMRVLELYKVDAVLRTFLMSYMGQWRTVLRYPGCRQIQANSDPIRIERGIFQGDSLSPLWFCLALNPLSTLLEGSGQGYRLRRGGQVISHLLYMDDLKLFAPNNLQLMKLLKVTETFSSAISMEFGVDKCAVMHVKRGEIMESVGTQLSDSIHLRSLSSTETYKYLGMSEALGINANDVKQSLKERFFGRLNKVLNSLLSGGNKVRAFNGWVMPVLMYSFGILKWTQTELDALDRRVRSLLTANRMHHPRSSVMRLYIPRKCGGRGFLNAKTLHNREICSLREFFLEADVGMHRDVVAVDKGLTALSLANENWRKPVVLDTNDRREVWQSKELHGRFYRVLHGPDVDFLASVAWLRFGDLFGETEGFVCAIMDEVMMTNNYRKYIVKDGTVDICRACHRPGESIRHIISGCSSLANGDYLHRHNLVARIIHQQLALKYNLVESEVPYYRYVPDPVLENGNCTLYWDRSIITDRTIIANKPDIVVIDRLERRAMIVDIAVPHDVNLVKTEKDKQTKYLDLAREVVDMWDVNTAVIVPIVVTANGIIAKSLDQHLKRLSLGSWIKGLIQKAVLLDTARIVRRFLSQGP

SEQ ID NO: 10362 - protein, 1198 aa, Mamestra brassicae
MLTRAAAQRARLPPPASSLSSASPPPEPSPTVSAVIPAVAVASSSSDEYFSPPTSPPPARRRRGRRPPDGLGPRGPPASDRVPAPGGSVQRMRWTQTINENVMRSYYGATEGGTNLTAYRGRMLSLFQVLEPAVNVSAQRLSDQVRVIQRNRMLDDAVLDRLRLESRNGRVSAASPPAAVQIQFSVSPRPNIVGEDDDDGAISVSTQCNERLRSALEDAFREYRSTPPELRPRLPRLPMHNKNRALVCALDSQLANCFDSSEDLADTHSILYCAAAAACRVAHVKFPNSDRATRPAVPAWQCRIERRIGEARALIGKLICFREGNTRRRVMRFVRRAFSGTDTSPRDYLTRVTERIDFLKQKIYAWANRIRRYKRRVERYTQNRTFQSNERWVYRAWERPDQGVTDTRLPDDDVMCSFWRNIWSVPVSHTEGDWTREVERACDPIPEMGAITISPQDVARAVRPLPNWKSPGPDGLHNFWIKWFKKSHARLASQFQSALESGSLPQFLTTGITHLFHKSGSTAEPKNYRPITCLPTVYKVLTSILRAKINQHIETNSIMSASQNGCRNRSRGTKELLLIDVAISQQVRRSRRDLSTCWIDYKKAYDSVPHTWLMRVLELYKVDAVLRTFLMSCMGQWRTVLRYPGCRQIQANSDPIRIERGIFQGDSLSPLWFCLALNPLSTLLEGSGQGYRLRRGGQVISHLLYMDDLKLFAPNNLQLMKLLKVTETFSSAISMEFGVDKCAVMHVKRGEIMESVGTQLSDSIHLRSLSSTETYKYLGMSEALGINANDVKQSLKERFFGRLNKVLNSLLSGGNKVRAFNGWVMPVLMYSFGILKWTQTELDALDRRVRSLLTANRMHHPRSSVMRLYIPRKCGGRGFLNAKTLHNREICSLREFFLEADVGMHRDVVAVDKGLTALSLANENWRKPVVLDTNDRREVWQSKELHGRFYRVLHGPDVDFLASVAWLRFGDLFGETEGFVCAIMDEVMMTNNYRKYIVKDGTVDICRACHRPGESIRHIISGCSSLANGDYLHRHNLVARIIHQQLALKYNLVESEVPYYRYVPDPVLENGNCTLYWDRSIITDRTIIANKPDIVVIDRLERRAMIVDIAVPHDVNLVKTEKDKQTKYLDLAREVVDMWDVNTAVIVPIVVTANGIIAKSLDQHLKRLSLGSWIKGLIQKAVLLDTARIVRRFLSQGP

SEQ ID NO: 10363 - protein, 1106 aa, Noctua fimbriata
MRWTQSINENVMRSYYGATEGGNNLTAYRVRMLSLFQVLEPAVNVSAQRLSDQVRVIQRNRMLDDTVLDRLRTEMQSSHVITPSAQAVVLPQSSTITNRDNDVSNDMVTNVSTQCNEEMRSALEGAIREYRFMQPDLRPRIPRLPMHNKNRALVAVLDSQLSNYFDNCEDLTDAHSILYCAAVAACRVAHVKFFDDRATRPKPVVPPWQYRIERRIGGARALIGKLICFREGNTRPRVMRFVRRAFSGTDISPRDYMSRITERIDFLKQKVYAWASRIRRYKRRVNRYTHNRTFQRDERWLYRTWERPDQGVADTRIPDDDAMCSFWRSIWSVPVSHTEGEWTREVERACDLVPEMGAITISPQDVVRAVRPLPNWKSPGPDGLHNFWIKWFTRSHARLAILFQSALESGSLPEFLTTGITHLLHKSGSTAEPKNYRPITCLPTVYKVLTSILRAKINKHIDDNSIMSASQNGCRNGSRGTKELLLIDMAISQQVRRSRRDLSTCWIDYKKAYDSVPHTWLMRVLELYKVDATLRTFLMSCMGQWRTVLRYPGCRQIQRNSEPIRIERGIFQGDSLSPLWFCLALNPLSTLLEDSGLGYQLRRGGQVISHLLYMDDLKLFAPNDLQLMELLKVTETFSSAIRMEFGVDKCAVMHVKRGEIVESVGTQLSDSINLRSLSATETYKYLGMSEALGINVADMKQSLKERFFGRLKKVFNSLLSGGNKVRAFNGWVMPVLMYSFGILKWTQTELDALDRRVRTLLTAYRMHHPRSSVMRLYIPRKCGGRGFLNAKTLHNREICSLREYFLETDVGMHRDVVAMDKGLTPLSLAKENWRKPLVLDTNDRMEVWQSKELHGRFFRALHGPDVDLSASVAWLRSGNLFGETEGFVCAIMDEVMMTNNYRRFIVKDGTVDICRACHRPGESIRHIISGCSRLANGEYLHRHNLVARIIHQQLALKYNLVESEVPYYKYVPDPVLENGSITLYWDQSIITDRTIVANKPDIVVVDRSERRTMIVDITVPHDENLVKAEKDKKIKYLDLAREVVDMWDVDSAIIVPIVVSAHGLIAKSLDQYLRRLSLGSWIKGLIQKAVLLDTARIVRRFLSLEP

SEQ ID NO: 10364 - protein, 1198 aa, Noctua fimbriata
MLTRSAARRARLSPPDPSLSSASPPPESSPVVSAVTPAVAVASSSSDEYFSPPTTPPPVRRRGGRRPPDGLGPRGPPASDRVPAPGGSVQRMRWTQSINANVMRAYYGATEGGNNLTGYRVRMLSLFQVLEPAVNVSAQRLSDQVRVIQRNRMLDDTVLDRLRTEMQSSHVIATPPPQAVVPPQSTIIPNRDNDVSNDIVTNVSTQCNEEMRSALEGAIREYRFMQPDLRPRIPRLPMHNKNRALVAVLDSQLSNYFDNCEDLTDAHSILYCAAVAACRVAHVKFSKDRATRPKPAVPPWQYRIERRIGGARALIGKLICFREGNTRPRVMRFVRRAFSGTDISPRDYMSRITERIDFLKQKVYAWANRIRRYKRRVDRYTQNRTFQRDERWVYRAWERPDQGVADTRLPDDDAMCSFWRSIWSVPVSHTEGEWTQGVERACDLVPEIGAITISPQDVVRAVRPLPNWKSPGPDGLHNFWIKWFTRSHARLAILFQSALESGSLPEFVTTGITHLLHKSGSTAEPKNYRPITCLPTVYKVLTSILRAKINKHIDDNSIMSASQNGCRNGSRGTKELLLIDMAISQQVRRSRSDLSTCWIDYKKAYDSVPHTWLMRVLELYKVDATLRTFLMSCMGQWRTVLRYPGCRQIQRNSEPIRIERGIFQGDSLSPLWFCLALNPLSTLLEDSGLGYRLRRGGQVISHLLYMDDLKLFAPNDLQLMELLKVTETFSSAIRMEFGVDKCAVMHVKRGEIVESVGTQLSDSINLRSLSATETYKYLGMSEALGINVADMKHSLKERFFGRLKKVFNSLLSGGNKVRAFNGWVMPVLMYSFGILKWTQTELDALDRRVRTLLTAYRMHHPRSSVMRLYIPRKCGGRGFLNAKTLHNREICSLTEYFLETDVGMHRDVVAVDKGLTPLSLAKENWRKPLVLDTNDRMEVWQSKELHGRFFRALHGPDVDLSASVAWLRCGDLFGETEGFVCAIMDEVMMTNNYRRFIVKDGTVDICRACHRPGESIRHIISGCSRLANGEYLHRHNLVARIIHQQLALKYNLVESEVPYYKYVPDPVLENGSITLYWDQSIITDRTIVANKPDIVVVDRSERRTMIVDITVPHDENLVKAEKDKKIKYLDLAREVVDMWDVDSAIIVPIVVSAHGLIAKSLDQYLRRLSLGSWIKGLIQKAVLLDTARIVRRFLSLEP

SEQ ID NO: 10365 - protein, 1198 aa, Noctua fimbriata
MLTRSAARRARLSPPDPSLSSASPPPESSPVVSAVTPVVAVASSSSDEYFSPPTTPPPVRRRGGRRPPDGLGPRGPPASDRVPAPGGSVQRMRWTQSINANVMRAYYGATEGGNNLTAYRVRMLSLFQVLEPAVNVSAQRLSDQVRVIQRNRMLDDTVLDRLRTEMQSSHVIATPPPQAVVPPQSTIIPNRDNDVSNDIVTNVSTQCNEEMRSALEGAIREYRFMQPDLRPRVPRLPMHNKNRALVAVLDSQLSNYFDNCEDLTDAHSILYCAAVAACRVAHAKFYDDRATRPKPVVPPWQYRIERRIGGARALIGKLICFREGNTRPRVMRFVRRAFSGTDISPRDYMSRITERIDFLKQKVYAWASRIRRYKRRVDRYTQNRTFQRDERWVYRAWERPDQGVADTRIPDDDAMCSFWRSIWSVPVSHTEGEWTRGVERACDLVPEMGAITISPQDVVRAVRPLPNWKSPGPDGLHNFWIKWFTRSHARLAILFKSALESGSLPEFLTTGITHLLHKSGSTAEPKNYRPITCLPTVYKVLTSILRAKINKHIDDNSIMSASQNGCRNGSRGTKELLLIDMAISQQVRRSRSDLSTCWIDYKKAYDSVPHTWLMRVLELYKVDATLRTFLMSCMGQWRTVLRYPGCRQIQRNSEPIRIERGIFQGDSLSPLWFCLALNPLSTLLEDSGLGYRLRRGGQVISHLLYMDDLKLFAPNDLQLMELLKVTETFSSAIRMEFGVDKCAVMHVKRGEIVESVGTQLSDSINLRSLSATETYKYLGMSEALGINVADMKQSLKERFFGRLKKVFNSLLSGGNKVRAFNGWVMPVLMYSFGILKWTQTELDALDRRVRTLLTAYRMHHPRSSVMRLYIPRKCGGRGFLNAKTLHNREICSLREYFLETDVGMHRDVVAVDKGLTPLSLAKENWRKPLVLDTNDRMEVWQSKELHGRFFRALHGPDVDLSASVAWLRCGDLFGETEGFVCAIMDEVMMTNNYRRFIVKDGTVDICRACHRPGESIRHIISGCSRLANGEYLHRHNLVARIIHQQLALKYNLVESEVPYYKYVPDPVLENGSITLYWDQSIITDRTIVANKPDIVVVDRSERRTMIVDIAVPHDENLVKAEKDKKIKYLDLAREVVDMWDVDSAIIVPIVVSAHGLIAKSLDQYLRRLSLGSWIKGLIQKAVLLDTARIVRRFLSLEP

SEQ ID NO: 10366 - protein, 1198 aa, Noctua fimbriata
MLTRSAAARRARLLSPDPPLSSASPPPESSPIVSAVTPAVAVASSSSDEYFSPPTTPPPVRRRGGRRPPDGLGPRGPTASDRVPAPGGSVQRMRWTQSINENVMRSYYGATEGGNNLTAYRVRMLSLFQVLEPAVNVSAQRLSDQVRVIQRNRMLDDTVLDRLRTEMQSSHVITPSAQAVVLPQSSTITNRDNDVSNDMVTNVSTQCNEEMRSALEGAIREYRFMQPDLRPRIPRLPMHNKNRALVAVLDSQLSNYFDNCEDLTDAHSILYCAAVAACRVAHVKFFDDRATRPKPVVPSWQYRIERRIGGARALIGKLICFREGNTRPRVMRFVRRAFSGTDISPRDYMSRITERIDFLKQKVYAWASRIRRYKRRVDRYTQNRTFQRDERWLYRTWERPDQGVADTRIPDDDAMCSFWRSIWSVPVSHTEGEWTREVERACDLVPEMGAITISPQDVVRAVRPLPNWKSPGPDGLHNFWIKWFTRSHARLAILFQSALESGSLPEFLTTGITHLLHKSGSTAEPKNYRPITCLPTVYKVLTSILRAKINKHIDDNSIMSASQNGCRNGSRGTKELLLIDMAISQQVRRSRRDLSTCWIDYKKAYDSVPHTWLMRVLELYKVDATLRTFLMSCMGQWRTVLRYPGCRQIQRNSEPIRIERGIFQGDSLSPLWFCLALNPLSTLLEDSGLGYQLRRGGQVISHLLYMDDLKLFAPNDLQLMELLKVTETFSGAIRMEFGVDKCAVMHVKRGEIVESVGTQLSDSINLRSLSATETYKYLGMSEALGINVADMKQSLKERFFGRLKKVFNSLLSGGNKVRAFNGWVMPVLMYSFGILKWTQTELDALDRRVRTLLTAYRMHHPRSSVMRLYIPRKCGGRGFLNAKTLHNREICSLREYFLETDVGMHRDVVAMDKGLTPLSLAKENWRKPLVLDTNDRMEVWQSKELHGRFFRALHGPDVDLSASVAWLRSGNLFGETEGFVCAIMDEVMMTNNYRRFIVKDGTVDICRACHRPGESIRHIISGCSRLANGEYLHRHNLVARIIHQQLALKYNLVESEVPYYKYVPDLLLENGSITLYWDQSIITDRTIVANKPDIVVVDRSERRTMIVDITVPHDENLVKAEKDKKIKYLDLAREVVDMWDVDSAIIVPIVVSAHGLIAKSLDQYLRRLSLGSWIKGLIQKAVLLDTARIVRRFLSLEP

SEQ ID NO: 10367 - protein, 1198 aa, Noctua fimbriata
MLTRSAARRARLSPPDPSLSSASPPPESSPVVSAVTPAVAVASSSSDEYFSPPTTPPPVRRRGGRRPPDGLGPRGPPASDRVPAPGGSVQRMRWTQSINANVMRAYYGATEGGNNLTAYRVRMLSLFQVLEPAVNVSAQRLSDQVRVIQRNRMLDDTVLDRLRTEMQSSHVIATPPPQAVVPPQSTIIPNRDNDVSNDIVTNVSTQCNEEMRSALEGAIREYRFMQPDLRPRIPRLPMHNKNRALVAVLDSQLSNYFDNCEDLTDAHSILYCAAVAACRVAHVKFSDDRATRPKPAVPPWQYRIERRIGGARALIGKLICFREGNTRPRVMRFVRRAFSGTDISPRDYMSRITERIDFLKQKVYAWANRIRRYKRRVDRYTQNRTFQRDERWVYRAWERPDQGMADTRLPDDDAMCSFWRSIWSVPVSHTEGEWTQGVERACDLVPEMGAITISPQDVVRAVRPLPNWKSPGPDGLHNFWIKWFTRSHVRLAILFQSALESGSLPEFLTTGITHLLHKSGSTAEPKNYRPITCLPTVYKVLTSILRAKINKHIDDNSIMSASQNGCRNGSRGTKELLLIDMAISQQVRRSRSDLSTCWIDYKKAYDSVPHTWLMRVLELYKVDATLRTFLMSCMGQWRTVLRYPGCRQIQRNSEPIRIERGIFQGDSLSPLWFCLALNPLSTLLEDSGLGYRLRRGGQVISHLLYMDDLKLFAPNDLQLMELLKVTETFSSAIRMEFGVDKCAVMHVKRGEIVESVGTQLSDSINLRSLSATETYKYLGMSEALGINVADMKQSLKERFFGRLKKVFNSLLSGGNKVRAFNGWVMPVLMYSFGILKWTQTELDALDRRVRTLLTAYRMHHPRSSVMRLYIPRKCGGRGFLNAKTLHNREICSLREYFLETDVGMHRDVVAVDKGLTPLSLAKENWRKPLVPDTNDRMEVWQSKELHGRFFRALHGPDVDLSASVAWLRCGDLFGETEGFVCAIMDEVMMTNNYRRFIVKDGTVDICRACHRPGESIRHIISGCSRLANGEYLHRHNLVARIIHQQLALKYNLVESEVPYYKYVPDPVLENGSITLYWDQSIITDRTIVANKPDIVVVDRSERRTMIVDITVPHDENLVKAEKDKKIKYLDLAREVVDMWDVDSAIIVPIVVSAHGLIAKSLDQYLRRLSLGSWIKSLIQKAVLLDTARIVRRFLSLEP

SEQ ID NO: 10368 - protein, 979 aa, Atethmia centrago
MEWPPGLRPRLPRLPMHKKNKALVCALDSQLSNYFDSSKDLTDTHSILYCAAVAACRVAQVKFPNSDRAPRSKPAVPAWQSRIERHIGETRALIGKLICFREGNTRPRVMRFVKRAFAGTDILSSRDYLTRVTERIDFLKQKICAWANRIRRYRRRMERYTQNRTFQNDERWVYRTWERPDQGVADKRLPDDDYDICSFWRNIWSVPVNHTEGDWTKRIERACDLIPEMGALTILPQDVAHAVRPLPNWKSPGPDGLHNFWIKWFQRSHARLASQFQSALESGSLPLFLTTGITHLLHKSGSTAEPKNYRPITCLPTVYKVLTSILRAKINKHIETNLIMSASQNGCKNGSRGTKELLLIDIAISQQVRRSRKDLSTCWIDYKKAYDSVPHTWLMRVLELYKVDATLRTFLMSCMGQWRTVFCYPGCRYIQRNSEPIRIKRGIFQGDSLSPLWFCLALNPLSTLLENSGLGYRLRRGGQVISHLLYMDVLKLFAPNNLQLMELLKVTKTFSSAIRMEFGVDKCAVMHVKRGGIVESVGTQLSDSIHLRSLSSTETYKYLGMSEALGINAADMKQSLRERFFCRLNKVLNSLLSGGNKVRAFNGWVMPVFMYSFGILKWTQTELDALDRRVRTLLTANRMHHPRSSVMRLYIPRKCGGRGFLNAKTLHNREICSLREYFLETNVVMHRDVVSVDKGLTPLSLADENWRKPIILDTNDRREVWQSKELHGHFYRVLHGPDVDLLASVSWLRFGDLFGETEGFVFAIMDEVIMTNNYRKYIVKDGTVDICRACHRPGESIRHIISGCSRLANGDYLHRHNLVAKIIHQQLALKYSLVESEVPYYRYAPDPVLENGNITLYWDRSIITDRTIVANKPDIVVIDRLTRRTMIIDIAVPHDENLVKAEKDKQIKYLDLAHEVVDMWDVNTAIIVPIVVTANGIIPKSLDQHLKRLSLGSWIKGLIQRAVLLDTARIVRRFLSQEP

SEQ ID NO: 10369 - protein, 975 aa, Atethmia centrago
MSPEVRPRLPRLPMHKKNRALVAVLDSQLSNYFDDCEDLTDTHSILYCAAVAVCRVAHVIFPNDSRATRPKPTVPIWQCRIERRIGGARALIGKLICFREGNTRPRVMRFVRRAFSGTDISPQDYMSRVTERIDFLKQKVYAWANRIRRYKRRVDRYTQNRTFQSDERWVYRGWEQRDQGVTDTRLPDDDVMCSFWRSIWSVPVSHTEGDWARKVERACDPLPEMGAITICPQDVARAVRPLPNWKSPGPDRLHNFWLKWFLGSHARLAAQYQTALESGSLPQFLTIGVTHLLHKSGSTAEPKNYRPITCLPTVYKVLTSILRAKINKHIDTNSIMSASQNGCRNGSRSTKELLLIDMTISQQVRRFRKDLLTCWIDYKKAYDSVPHRWLMRVLELYKVDANLRTFLMSCMGQWRTVLRYPGCRNIQRNSEPIRIERGIFQGDSLSPLWFCLAFNPLSTLLEDSGLGYRLRRGGQVISHLLYMDDLKLFASNNLQLMELLKITETFSSAIWMEFGVDKCAVMHVKRGEIVESVGTQLSDSINLRALSASETYKYLGMSEALGINVTDMKQSLKQRFFDRLKKVFNSLLSGGNKVRAFNGWVMPVLMYSFGVLKWTQTELDALDRRVRTLLTAYRMHHPRSSVMRLYIPRKCGGRGFLNAKTLHNREVCSLREYFLEADVGMHRDVVAVDKGLTPLSLAKENWRKLVVLDTNDRREVWQSKELHGRFFRALHEPDVDFQASVAWLRFGDLFGETEGFVCAIMDEVITTKNYRRFIVKDGTVDMCRACHRPGESIRHIISGCSRLANEEYLHRHNVVARIIHQQLALKYSLVESEVPYYRYVPDLVLDNGNITLYWDRSIITDRTIVVNKPDIVVVDRTERRAMIVDITVPHDGNLVKAEKDKQIKYLDLAREVVDMWDVDSAIIVPIVVSANGLIAKSLDQHLRRLTLDGWIKGLIQKAVLLDTARIVRRFLSLEP

SEQ ID NO: 10370 - protein, 1045 aa, Mesoligia furuncula
MLDDTVLDRLRIEMQSSHVIAPQPQTAVLLPQCNTIHADEGSNDRATNVSTQCNEELRSALEDAIREYRFMSPEHRPRLPRLPMHNKNRALVAALDSQLSNYFDDCEDLTDTHSILYCAAVAACRVAHVKFANDSRGTRPKPAIPAWQCRIERRIGGARALIGKLICFREGNTRPRVMRFVRRAFLGTDISPRDYMSYVTERIDFLKQKVYAWANRIRRYKRRVERYTQNRTFQSDERWVYRDWERPDQSVADTCLPDDEAMCSFWRSIWSVPVSHTEGDWAREVERACDPIPEMGAITICPQDVARAVRPLPNWKSPGPDGLHNFWIKWFLRSHARLASQFQTALESGSLPQFLTTGITHLLHKSGSTAEPKNYRPITCLPTVYKVLTSILRAKIDKHINTNSIMSVSQNGCKNGSRGTKELLLIDMAISQQVRRSRKDLSTCWIDYKKAYDSVPHTWLMRVLELYKVDATLRTFLMSCMGQWRTVLRYPGCRNIQRNSEPIRIERGIFQGDSLSPLWFCLALNPLSTLLEDSGLGYRLRRGGQVISHLLYMDDLKLFAPNNLQLMELLKVTQTFSSAIRMEFGVDKCAVMHVKRGEIVESVGTQLSDSTNLRALSASETYKYLGMSEALGINVTDMKQSLKERFFGRLKKVLNSLLSGGNKVRAFNGWVMPVLMYSFGILKWTQTELDALDRRVRTLLTANRMHHPRSSVMRLYIPRKCGGRGFLNAKTLHNREICSLREYFLETDVGMHRDVVAVDKGLTPLSLAKENWRKPVVLDTNDRMEVWQSKELHGRFFRALHGPDVDLLASVAWLRFGDLFGETEGFVCAIMDEVMMTNNYRRFIVKDGTVDICRACHRPGESIRHIISGCSRLANGEYLHRHNLVARIIHQQLALKYSLVESEVPYYRYVPDPVLENGNISLYWDRSIITDRTIVANKPDIVVVDRSERRAMIVDITVPHDENLVKAEKDKQIKYLDLAREVVDMWDVDSAIIVPIVVTANGLIAKSLDQNLRRLSLGSWIKGLIQRAVLLDTARIVRRFLSLEP

SEQ ID NO: 10371 - protein, 1206 aa, Mesoligia furuncula
MLTRSRARNLLKNTHPTSSGSSLSSASQLPDPAPDVSSVRPAAAVASSSSDEYFSPPTTPPPVCRRGRGRPPASLGLRGPPASDRVPAPGGSVQRMRWTQTVNENVMRAYFGATEGGSNLTAYRGRMLSLFQVLEPAVNVSAQRLSDQVRVIQRNHMLDNVVLDRLRLESRNSQVTPASSLIAVQLQNVPSVSPRPDHVYVEDDDEAISVSSQCNARLRSALEDAFREYRSIPPGLRPRLPRLPMHKKNKALVCALDSQLSNCFNNSKDLADTHSILYCAAVAACHVAHVKFPNSDRAPRPKPAVPAWQCRIECRIGEARALIGKLICFREGNTRPRVMRFVRRAFSGTDISSRDYLSRVTERIDFLKQKIYAWANRIRRYRRRVERYTQNRTFQNDERWVYRAWERPDQGVTDTRLPDDDAMCSFWRNIWSVPVSHTEGDWTAKIERACDLIPEMGVLTISPQDVARAVRPLPNWKSPGPDGLHNFWIKWFQGSHARLASQFQSALESGSLPQFLTTGITHLLHKSGSTADPKNYRPITCLPTVYKVLTSILRAKINKHIDTNSIMSVSQNGCGNGSRGTKELLLIDMTISQQVRRSRKDLSTCWIDYKKAYDSVPHTWLMRVLELYKVDTTLRTFLMSCMGQLRTVLRYPGCRNIQRNSEPIRIERGIFQGDSLSPLWFCLALNPLSTLLEDSGLGYRLRRGGQVISHLLYMDDLKLFAPNNLQLMELLKITETFSSAIRMEFGVDKCAVMHVKRGEIVESVGTQLSDSTNLRALSASETYKYLGMSEALGINVTDMKQSLKERFFGRLKKVFNSLLSGGNKVRAFNGWVMPVLMYSFGILKWTQTELDALDRKVRTLLTANRMHHPRSSVMRLYIPRKCGGRGFLNAKTLHNREICSLREYFLETDVGMHRDVVAVDKGLTPLSLGKENWRKPVVLDTNDRMEVWQSKELHGRFFRALHGPDVDLLASVAWLRFGDLFGETEGFVYAIMDEVMMTNNYRRFIVKDGTVDICRACHRPGESIRHIISGCSRLANGEYLHRHNLVARIIHQQLALKYSLVESEVPYYRYVPDPVLENGNITLYWDRSIITDRTIIANKPDIVVVDRSERRAMIVDITVPHDENLVKAEKDKQVKYLDLAREVVDMWDVDSAIIVPIVVTANGLIAKSLDQHLKRLSLGSWIKGLIQKAVLLDTARIVRRFLSLEP

SEQ ID NO: 10372 - protein, 1198 aa, Mesoligia furuncula
MLTRLAARRARLLPPDSSLSSASPPPVPSPTVSAVMTPAAAVASSSSDEYFSPPTTPPPARRRRGRRPPDGLGLRGPPASDRVPAPGGSVQRMRWTQSINENVMRSYYGATEGGNILTAYRVRMLSLFQVLEPAVNVSAQRLSDQVRVIQRNHMLDDTVLDRLRSEMQSSHVIAPQSQTAVILPQPNIGHADEGSNDRAINVSTQCNEELRSALEDAIQEYRFMSPELRPRLPRLPMHNKNRALVAALDSQLSKYFDTCEDLIDTHSILYCAAVAACRVAHIKFANDSRATRPKQAVPAWQCRIERRIGGARTLIGKLICFREGNTCPRVMRFVRRAFSGTDISPQDYMSCVTERIDFLKQKVYAWANRIRRYRRRVERYTQNRTFQSDERWVYRGWERPDQGVAETCLPDDDAMCSFWRNIWSVPVSHTEGDWARKVERACDPIPEMGAITICPQDVARAVRPLPNWKSPGPDGLHNFWIKWFPRSHARLASQFQTALKSGSLPQFLTTGITHLLHKSGSTAEPKNYRPITCLPTVYKVLTSILRTKINKHIDTNSIMSASQNGCRNGSRGTKELLLIDMAISQQVRRFRKDLSTCWIDYKKAYDSVPHTWLMRVLELYKVDTTLRTFLMSCMGQWRTVLRYPGCRNIQRNSEPIRIERGIFQGDSLSPLWFCLALNPLSTLLEDSGLGYRLRRGGQVISHLLYMDDLKLFAPNNLQLMELLKITETFSSAIRMEFGVDKCAVMHVKRGEIVESVGTQLSDSTNLRALSASETYKYLGMSEALGINVTDMKQSVKERFFGRLKKVLNSLLSGGNKVRAFNGWVMPVLLYSFGILKWTQTELDALDRRVRTLLTANRMHHPRSSVMRLYIPRKYGGRGFLNAKTLHNREICSLREYFLETDVGMHRDVVIVDNGLTPLSLAKENWRKPVVLDTNDRMEVWQSKELHGRFLRALRGPDVDLQASVAWLRFGNLFGETEGFVCAIMDEVMMTNNYRRFIVKDGTVDICRACHRPGESIRHIISGCSRLANGEYLHRHNLVARIIHQQLALKYNLVESEVPYYRYVPDPVLENGNITLYWDRSIITDRTIVANKPDIVVVDRSERRAMIVDITVPHDENLVKAEKDKQIKYLDLAREVVDMWDVDTAIIVPIVVTANGLIAKSLDQHLRRLSLGSWIKGLIQRAVLLDTARIVRRFLSLEP

SEQ ID NO: 10373 - protein, 1107 aa, Mesoligia furuncula
MYCLQMALRVLLTNLPIAIIYLYGARRPHRVRMLSLFQVLEPAVNVSAQRLSDQVRVIQRNHMLDDTVLDRLRSEMQSSHVIAPQSQTAVILPQPNISHADEGSNDRAINVSTQCNEELRSALEDAIQEYRFMSPELRPRLRRLPMHNRNRALVAALDSQLSKYFDTCEDLIDTHSILYCAAVAACRVAHVKFANDSRATRPKQAVPAWQCRIERHIGGARTLIGKLICFREGNTRPRVMRFVRRAFSGTDISPQDYMSCVTERIDFLKQKVYAWANRIRRYRRRVERYTQNRTFQSDERWVYRGWERLDQGVAETCLPDDDAMCSFWRNIWSVPVSHTEGEWAREVERACDPIPEMGAITICPQDVARAVRPLPNWKSPGPDGLHNFWIKWFPRSHALLASQFQTALKSGSLPQFLTTGITHLLHKSGSTAEPKNYRPITCLPTVYKVLTSILRTKINKHIDTNSIMSASQNGCRNGSRGTKELLLIDMAISQQVRRFRKDLSTCWIDYKKAYDSVPHTWLMRVLELYKVDTTLRTFLMSCMGQWRTVLRYPGCRNIQRNSEPIRIERGIFQGDSLSPLWFCLALNPLSTLLEDSGLGYRLRRGGQVISHLLYMDDLKLFAPNNLQLMELLKITETFSSAIRMEFGVDKCAVMHVKRGEIVESVGTQLSDSTNLRALSASETYKYLGMSEALGINVTDMKQSVKERFFGRLKKVLNSLLSGGNKVRAFNGWVMPVLMYSFGILKWTQTELDALDRRVRTLLTANRMHHPRSSVMRLYIPRKCGGRGFLNAKTLHNREICSLREYFLETDVGMHRDVVIVDKGLTPLSLAKENWRKPVVLDTNDRMEVWQSKELHGRFLRALRGPDVDLQASVAWLRFGNLFGETEGFVCAIMDEVMMTNNYRRFIVKDGTVDICRACHRPGESIRHIISGCSRLANGEYLHRHNLVARIIHQQLALKYNLVESEVPYYRYVPDPVLENGNITLYWDRSIITDRTIVANKPDIVVVDRSERRAMIVDITVPHDENLVKAEKDKQIKYLDLAREVVDMWDVDTAIIVPIVVTANGLIAKSLDQHLRRLSLGSWIKGLIQRAVLLDTARIVRRFLSLEP

SEQ ID NO: 10374 - protein, 962 aa, Mesoligia furuncula
MHNKNRALVAALDSQLSKYFDTCEDLIDTHSILYCAAVAACRVAHVKFANNSRATRPKQAVPAWQCRIERRIGGARTLIGKLICFREGNTRPRVMRFVRRAFSGTDISPQDYMSCVTERIDFLKQKVYAWANRIRRYRRRVERYTQNRTFQSDERWVYRGWERPDQGVAETCLPDDDAMCSFWRNIWSVPVSHTEGDWAREVERACDPIPEMGAITICPQDVARAVRPLPNWKSPGPDGLHNFWIKWFPRSHALLASQFQTALKSGSLPQFLTTGITHLLHKSGSTAEPKNYRPITCLPTVYKVLTSILRTKINKHIDTNSIMSASQNGCRNGSRGTKELLLIDMAISQQVRRFRKDLSTCWIDYKKAYDSVPHTWLMRVLELYKVDTTLRTFLMSCMGQWRTVLRYPGCRNIQRNSEPIRIERGIFQGDSLSPLWFCLALNPLSTLLEDSGLGYRLRRGGQVISHLLYMDDLKLFAPNNLQLMELLKITETFSSAIRMEFGVDKCAVMHVKRGEIVESVGTQLSDSTNLRALSASETYKHLGMSEALGINVTDMKQSVKERFFGRLKKVLNSLLSGGNKVRAFNGWVMPVLMYSFGILKWTQTELDALDRRVRTLLTANRMHHPRSSVMRLYIPRKCGGRGFLNAKTLHNREICSLREYFLETDVGMHRDVVIVDKGLTPLSLAKENWRKPVVLDTNDRMEVWQSKELHGRFLRALRGPDVDLQASVAWLRFGNLFGETEGFVCAIMDEVMMTNNYRRFIVKDGTVDICRACHRPGESIRHIISGCSRLANGEYLHRHNLVARIIHQQLALKYNLVESEVPYYRYVPDPVLENGNITLYWDRSIITDRTIVANKPDIVVVDRSERRAMIVDITVPHDENLVKAEKDKQIKYLDLAREVVDMWDVDTAIIVPIVVTANGLIAKSLDQHLRRLSLGSWIKGLIQRAVLLDTARIVRRFLSLEP

SEQ ID NO: 10375 - protein, 1199 aa, Spilarctia lutea
MLTRARRRAQLSPPDSSLRSALPSPEEAIEVPAGAEASSSSSSDEFFSPPTSPIPVRRQGRGRPPTSLGSRGPLTSNRAPAAGGDVRRMKWTHSINENVMRAYFRATELGTNLTACRVRLVSLFQELEPAVNVSAQRLSDQVRAIQRCHLLDDAALERIRSDIRNSLTVPSSSHVLNVVTNSTPQVPQNDDISELVDSEIISVSTQYNDRIRSTLEDAIREYRYVNLNNRPRLSRLPIHKRNLALVSALDSLLPKYFSNSEDLSDTHSILYCAAIAVCRVAGVKFAEYTTTTRQENTLPAWQYRIERRIAEARTLIGKLMSFRSGNTRPRVMRFVKRAFLGTTISPQEYMSCVTERIDFLKQKVYAWANRIRRYRKRVDRYNQNRMFQRNEKWVYRKWENLSPCMSDGQVPDENATNSFWRNMWSVPVTHTEGDWYRDVERSCESLLPMEPISIDEEDVSCAVRSLPNWKAPGPDGLHNFWLKWFRSSHACLASQFQTALDSGSLPQFLTTGITHLLYKSGDAMDPKNFRPITCLPTLYKLLTSILRLKSTTHINHNSILSISQNGCRSGTRGTKELLIIDMTISQQVRRNRKSLATCWIDYKKAFDSVPHTWLLKVLELYKIDTTLCTFLKVCMGQWRTALRYPGCRQSAMNDVLIKIERGIFQGDSLSPLWFCLALNPLSTLLEGSGLGYRLQKDDRVISHLFYMDDLKLLAPTKLQLTALLKVTENFSNSIKMEFGVDKCAVMYVKKGEIVESEGIELSDSTKLRSLSATETYKYLGFSQSLGMPESDMKQTLRERFFSRLKKVLKSLLSGGNKVRACNGWVMPVLMYSFGVLRWTQTELDAIDRRVRTLLTAFRMHHPRSSVMRLYIPRRLGGRGLLNIKTLHNREVYNLREYFLQTDVGVHRSVVTVDTGLTPLALAKENWRKPVVLGTNDRREVWKGKVLHGRFYRALNGPDIDFKASTSWLRYSDLFGETEGFVCAIMDEVIMTNNYRKYILKDGTVDICRACHRPGESVRHIISGCSRLANGEYLHRHNQVARIVHQQLALKYNLVISEVPYYRYVPDPVLENGRATLYWDRSIITDRTIVANKPDIVVIDRLERRAMIVDIAVPHDENLVKVEKEKQIKYLDLSHEIVDMWNVDSVIIVPIVVSAHGLIAKSLDQHLKRLTLGGWIKGLIQKAVLLDTARIVRRFLSLEP

SEQ ID NO: 10376 - protein, 1198 aa, Xestia c-nigrum
MLTRSAARRALLPPPDPSLSSASPPPEPSPIVSAVTPAVAVASSSSDEYFSPPTTPPPARRRGGRRPPDGLGPRGPPASDRVPAPGGSVQRMRWTQSNNENVMRAYYGATEGGNNLTAYRVRMLSLFQVLEPAVNVSAQRLSDQVRVIQRNRMLDDTVLDRLRTEVQSSHVTATPPSQAVVPPQSTVITDRDDDVCSDMITNVATQCSEDMRSALEGAIREYRFVTPELRPRLPRLPMNNKNRMLVAVLDSQLSNYFDDCEDLTDVHSVLYCAAVAACRVARVKFSDDRATRPKPAVPAWQYRIEQRIGGARALIGKLICFREGNTRPRVMRFVRRAFSGTDISPRDYMSRVTERIDFLKQKVYAWASRIRRYKRRVDRYTQSRTVQRDERWVYRAWERPDQGVADTHLPDDDAMCSFWRSIWSVPVSHAEGEWTRVIERACDPVPEMGAITISPQDVACAVRPLPNWKSPGPDGLHNFWIKWFTGSHARLATLFQSALESGSLPEFLTTGLTHLLHKSGSTAEPKNYRPITCLPTVHKVLTSILRTKICKHIDDNSVMSASQNGCRNGSRGTKELLLIDMAISQQVRRSRKDLSTCWIDYKKAYDSVPHTWLMRVLELYKVDATLRTFLMSCMRQWRTVLRYPGCRQIQRNSEPIRIERGIFQGDSLSPLWFCLALNPLSTLLEDSGLGYQLRKDGRVISHLLYMDDLKLFAPNDLQLMELLKVTETFSSAIRMEFGVDKCAVMHVKRGEIVESVGTQLSDSINLRSLSATETYKYLGMSEALGINVADMKQSLKERFFGRLKKVFNSLLSGGNKVRAFNGWVMPVLMYSFGILKWTQTELDALDTKVRKLLTAFRMHHPRASVMRLYIPRKCGGRGFLNAKTLHNREICSLREYFQEADVEMHRDVVAMDKGLTPLSLAKENWRKPIVLTTDDRRKEWQGKQLHGRFYRALHGPDIDFLASVSWLRSGDLFGETEGFVCAIMDEVMMTNNYRRFIVKDGTVDICRACHRPGESIRHIISGCSRLANGEYLHRHNLVARIIHQQLALKYNLVESEVPYYRYVPDPVLVNGNITLYWDQSIITDRTVIANRPDIVVMDRSERRAMIVDITVPHDENLVKAEKDKQIKYLDLAREVVDMWEVDSAIIVPIVVSAHGLIAKSLDQHLRRLSLGSWIKGLIQKAVLLDTARIVRRFFSLEP

SEQ ID NO: 10377 - protein, 1198 aa, Xestia c-nigrum
MLTRSAACRALLPPPDPSLSSASPPPEPSPIVSAVTPAVAVASSSSDEYFSPPTTPPPARRRGGRRPPDGLGPRGPPASDRVPAPGESVQRMRWTQSNNENVMRAYYGATEGGNNLTAYRVRMLSLFQVLEPAVNVSAQRLSDQVRVIQRNRMLDDTVLDRLRTEVQSSHVTATPPSQAVVPPQSTVITDRDDDVCSDMITNVATQCSEDMRSALEGAIQEYRFVTPELRPRLPRLPMNNKNRMLVAVLDSQLSNYFDDCEDLTDVHSVLYCAAVAACRVARVKFSDDRATRPKPAVPAWQYRIEQHIGGARALIGKLICFREGNTRPRVMRFVRRAFSGTDISPRDYMSRVTERIDFLKQKVYAWASRIRRYKRRVDRYTQNRTFQRDERWVYRAWERPDQGVADTHLPDDDAMCSFWRSIWSVPVSHAEGEWTRVIERACDPVPEMGAITISPQDVACAVRPLPNWKSPGPDGLHNFWIKWFTGSHARLATLFQSALESGSLPEFLTTGLTHLLHKSGSTAEPKNYRPITCLPTVYKVLTSILRTKICKHIDDNSVMSASQNGCRNGSRGTKELLLIDMAISQQVRRSRKDLSTCWIDYKKAYDSVPHTWLMRVLELYKVDATLRTFLMSCMRQWRTVLRYPGCRQIQRNSEPIRIERGIFQGDSLSPLWFCLALNPLSTLLEDSGLGYQLRKDGRVISHLLYMDDLKLFAPNDLQLMELLKVTETFSSAIRMEFGVDKCAVMHVKRGEIVESVGTQLSDSINLRSLSATETYKYLGMSEALGINVADMKQSLKERFFGRLKKVFNSLLSGGNKVRAFNGWVMPVLMYSFGILKWTQTELDALDTKVRKLLTAFRMHHPRSSVMRLYIPRKCGGRGFLNAKTLHNREICSLREYFQEADVEMHRDVVAMDKGLTPLSLAKENWRKPIVLTTDDRRKEWQGKQLHGRFYRALHGPDIDFLASVSWLRSGDLFGETEGFVSAIMDEVMMTNNYRRFIVKDGTVDICRACHRPGESIRHIISGCSRLANGEYLHRHNLVARIIHQQLALKYNLVESEVPYYRYVPDPVLVNGNITLYWDQSIITDRTVIANRPDIVVMDRSERRAMIVDITVPHDENLVKAEKDKQIKYLDLAREVVDMWEVDSAIIVPIVVSAHGLIAKSLDQHLRRLSLGSWIKGLIQKAVLLDTARIVRRFFSLEP

SEQ ID NO: 10378 - protein, 1199 aa, Xestia c-nigrum
MLTRAAARRARLPPPDPSLSSASPPPEPSPIVSAVTPAVAVASSSSDEYFSPPTTPPPARRRGGRRPPDGLGPRGPPASDRVPAPGGSVQRMRWTQSNNENVMRAYYGATEGGNNLTAYRVRMLSLFQVLEPAVNVSAQRLSDQVRVIQRNRMLDDTVLDRLRTEVQSSRVTATPPSQAVVPPQSTVTTPYCVGDVSSDMVTNVSIQCSEDMRSALEGAIREYRFMTPKLRPRLPRLPMHNKNKMLVAVLDSQLSNYFDSCEDLTDIRSILYCAAVAACRVAHVKFSDDRATRPKPAVPAWQYRIEQRIGGARALIGKLICFREGNTRPRVMRFVRRAFSGTDISPRDYMSRVTERIDFLKQKVYAWASRIRRYKRRVDRYTQNRTFQRDERWIYRAWERPDQGVADTRLPDDDAMCSFWRSIWSVPVSHAEGEWTRVVERACDPVPEMGAITISPQDVACAVRPLPNWKSPGPDGLHNFWIKWFTRSHARLATLFQSALESGSLPEFLTTGITHLLHKSGSTAEPKNYRPITCLPTVYKVLTSILRAKITKHIDKNSVMSASQNGCRNGSRGTKELLLIDMAISQQVRRSRKDLSTCWIDYKKAYDSVPHTWLRRVLELYKVDATLRTFLMSCMGQWRTVLRYPGCRQIQRNSEPIRIERGIFQGDSLSPLWFCLALNPLSTLLEDSGLGYQLRKDGRVISHLLYMDDLKLFAPNDLQLMELLKVTETFSSAIRMEFGVDKCAVMHVKRGGIVESVGTQLLDSINLRSLSATETYKYLGMSEALGISVADMKQSLRERFFGRLKKVFNSLLSGGNKVRAFNGWVMPVLMYSFGILKWTQTELDALDTKVRKLLTASRMHHPRSSVMRLYIPRKCGGRGFLNAKTLHNREICSLREYFLEADVEMHRDVVAMDKGLTPLSLAKENWRKPVVLTTDDRRKEWQGKELHGRFYRALHGPDVDFLASVSWLRSGDLFGETEGFVCAIMDEVMMTNNYRRFIVKDGTVDICRACHRPGESIRHIISGCSRLANGEYLHRHNLVARIIHQQLALKYNLVESEVPYYRYVPDPVLVNGSITLYWDQSIITDRTVIANRPDIVVMDRSERRAMIVDITVPHDDNLVKAEKDKQIKYLDLAREVVDMWEVDSAIIVPIVVSAHGLIAKSLDQYLRRLSLGSWIKGLIQKAVLLDTARIVRRFLSLEP

SEQ ID NO: 10379 - protein, 962 aa, Griposia aprilina
MHNKNRVLVAALDAQLSNYFDDCVDLTDTHSILYCAAVAACRVAHVKFANDSRATRPKPAVPAWQCRIEHRIGGARALIGKLICFREGNTRPRVMRFVRRAFAGTNISPQDYMSCVTERIDFLKQKVYAWANRIRRYKRRVERYTQNRTFQRDERWVYRDWERPDQGVADTCLPDDDAMCSFWRNIWSVPVSHTEGDWAREVERACDPIPEMGAISICPQDVTRAVRPLPNWKSPGPDGLHNFWIKWFGRSHARLAAQYQVALESGSLPQFLTTGVTHLLHKSGSTAEPKNYRPITCLPTVYKVLTSILRAKINKHIDTNSIMSPSQNGCRNGSRGTKELLLIDMAISQQVRRSRKDLSTCWIDYKKAYDSVPHTWLVRVLELYKVDATLRTFLKSCMGQWRTVLHYPGCRNIQRNNEPIRIERGIFQGDSLSPLWFCLALNPLSTLLEDSGLGYRLRRGGQVISHLLYMDDLKLFAPNNLQLMELLKVTETFSSAIRMEFGVDKCAVMHVKRGEIVESVGTQLSDSINLRTLSAFETYKYLGMSEALGINGTDMKQLLKERFFGRLKKVFNSLLSGGNKVRAFNGWVMPVLIYSFGILKWTQTELDALDRKVRTLLTANRMHHPRSSVMRLYIPRKCGGRGFLNAKTLHNREICSLREYFLEADVGMHRDVVTVDKGLTPLSLAKENWRKPVVLDTNDRMEVWQSKELHGRFFRALHGPDVDQLASVAWLRFGDLFGETEGFVCAIMDEVILTNNYRRHIMKDGTVDVCRACHRPGESIRHIISGCSRLANEEYLHRHNLVARIIHQQLALKYSLVESEVPYYRYVPDPVLENGHITLYWDRSIITDRTIVANKPDIVMVDRLERRAMIVDITVPHDGNLVKAEKDKQIKYLDLAREVVDMWDVDSAIIVPIVVTANGLIAKSLDQHLRRLSLGSWIKGLIQKAVLLDTARIVRRFLSLEP

SEQ ID NO: 10380 - protein, 1198 aa, Griposia aprilina
MLTRSAARRARPPPPDSSLSSASLPPVSSPTVSAVTTPAAVVASSSSDEYFSPPTTPPPVRRRGGHRPPDGLGPRGPPASDRVPAPGGSVQRMRWTRSINENVMRSYYGATEGGNNLTAYRVRMLSLFQVLEPAVNVSAQRLSDQVRVIQRNHMLDDTVLDRLRNEMQSSHVIAPPSQTVVVLPQSNTSQADEESDDRATNVSTQCNDELRSALEDAIREYRFISPELRPRLPRLPMHNKNRVLVAALDAQLSNYFDDCVDLTDTHSILYCAAVAACRVAHVKFANDSRATRPKPAVPAWQCRIERRIGGARALIGKLICFREGNTRPRVMRFVRRAFAGTNISPQDYMSCVTERIDFLKQKVYAWANRIRRYKRRVERYTQNRTFQRDERWVYRGWERPDQGVADTCLPDDDAMCSFWRNIWSVPVSHTEGDWAREVERACDPIPEMGAISICPQDVTRAVRPLPNWKSPGPDRLHNFWIKWFGRSHARLAAQYQVALESGSLPQFLTTGVTHLLHKSGSTAEPKNYRPITCLPTVYKVLTSILRAKINKHIDTNSIMSASQNGCRNGSRGTKELLLIDMAISQQVRRSQKDLSTCWIDYKKAYDSVPHTWLMRVLELYKVDATLRTFLKSCMGQWRTVLRYPTCRNTQRNSEPIRIERGIFQGDSLSPLWFCLALNPLSTLLEDSGLGYRLRRGGRVISHLLYMDDLKLFAPNNLQLIELLKVTETFSSAIRMEFGLDKCAVMHVKRGEIVESVGTQLSDPMNLRALSACETYKYLGMSEALGVNNTDMKQSLKERFFGRLKKVFNSLLSGGNKVRAFNGWVMPVLMYSFGILKWTQTELDTLDRRVRTLLTANRMHHPRSSVMRLYIPRKCGGRGFLNAKTLHNREICSLREYFLEADVGMHRDVVAVDKGLTPLSLAKENWRKPVVLDTNDRMEVWQSKELHGRFFRALHGPDVDVQASVAWLRFGDLFGETEGFVCAIMDEVMMTNNYRRFIVKDGTVDICRACHRPGESIRHIISGCSRLANEEYLHRHNLVARIIHQQLALKYSFVESEVPYYRYVPDPVLENGTITLYWDRSIITDRTIIANKPDIVLVDRRERRAMIVDITIPHDGNLVKAEKDKQIKYLDLAREVVDMWDVDSAIIVPIVVTANGLIAKSLDQHLRRLSLSSWIKGLIQKAVLLDTARIVRRFLSLEP

SEQ ID NO: 10381 - protein, 1198 aa, Griposia aprilina
MLTRSAARRARPPPPDSSLSSASLPPVSSPTVSAVTTPAAVVASSSSDEYFSPPTTPPPVRRRGGHRPPDGLGPRGPPASDRVPAPGGSVQRMRWTRSINENVMRSYYGATEGGNNLTAYRVRMLSLFQVLEPAVNVSAQRLSDQVRVIQRNHMLDDTVLDRLRNEMQSSHVIAPPSQTVVVLPQSNTSQADEESDDRATNVSTQCNDELRSALEDAIREYRFISPELRPRLPRLPMHNKNRVLVAALDAQLSNYFDDCVDLADTHSILYCAAVAACRVAHVKFANDSRATRPKPAVPAWQCRIERRIGEARALIGKLICFREGNTRPRVMRFVRRAFAGTNISPQDYMSCVTERIDFLKQKVYAWANRIRRYKRRVERYTQNRTFQRDERWVYRGWERPDQGVADTCLPDDDAMCSFWRNIWSVPVSHTEGDWTREVERACDPIPEMGAITICPQDVTRAVRPLPNWKSPGPDGLHNFWIKWFGRSHARLAAQYQVALESGSLPQFLTTGVTHLLHKSGSTAEPKNYRPIACLPTVYKVLTSILRDKINKHIDTNYIMSPSQNGCRNGSRGTKELLLIDMAISQQVRRSRKDLSTCWIDYKKAYDSVPHTWLMRVLELYKVEATLRTFLMSCMGQWRTVLHYPACRNTQRNSEPIRIERGIFQGDSLSPLWFCLALNPLSTLLEDSGLGYWLRRGGQVISHLLYMDDLKLFAPNNSQLLDLLKVTETFSSAIRMEFGVDKFAVIHVKRGEIVESVGTQLSDSIHIRALSASETYKYLGMSEALGINGTDMKQSLKDRFLGRLKKVFNSLLSGGNKVRAFNGWVMPVLMYSFGILKWTQTELDALDRKVRTLLTANRMHHPRSSVMRLYIPRKCGGRGFLNAKTLHNRKICSLREYFLEADVGMHRDVVTVDKGLTPLSLAKENWRKPVVLDTNDRMEVWQSKELHGRFFRALHGPDVDQLASVAWLRFGDLFGETEGFVCAIMDEVMMTNNYRRFIVKDGTVDICRACHRPGESIRHIISGRSRLANEEYLHRHNLVARIVHQQLALKYSLVESEVPYYRYVPDPVLENGHITLYWDRSIITDRTIVANKPDIVMVDRLERRAMIVDITVPHDGNLVKAEKDKQIKYLDLAREVVDMWDVDSAIIVPIVVTANGLIAKSLDQHLRRLSLGSWIKGLIQKAVLLDTARIVRRFLSLEP

SEQ ID NO: 10382 - protein, 1198 aa, Griposia aprilina
MLTRSAARRARPPPPDSSLSSASLPPVSSPTVSAVTTPAAVVASSSSDEYFSPPTTPPPVRRRGGHRPPDGLGPRGPPASDRVPAPGGSVQRMRWTRSINENVMRSYYGATEGGNNLTAYRVRMLSLFQVLEPAVNVSAQRLSDQVRVIQRNHMLDDTVLDRLRNEMQSSHVIAPPSQTVVVLPQSNTSQADEESDDRATNVSTQCNDELRSALEDAIREYRFISPELRPRLPRLPMHNKNRVLVAALDAQLSNYFDDCVDLTDTHSILYCAAVAACRVAHVKFANDSRATRPKPAVPAWQCRIERRIGEARALIGKLICFREGNTRPRVMRFVRRAFAGTNISPQDYMSCVTERIDFLKQKVYAWANRIRRYKRRVERYTQNRTFQRDERWVYRGWERPDQGVADTCLPDDDAMCSFWRNIWSVPVSHTEGDWTREVERACDPIPEMGAITICPQDVTRAVRPLPNWKSPGPDGLHNFWIKWFGRSHARLAAQYQVALESGSLPQFLTTGVTHLLHKSGSTAEPKNYRPIACLPTVYKVLTSILRDKINKHIDTNYIMSPSQNGCRNGSRGTKELLLIDMAISQQVRRSRKDLSTCWIDYKKAYDSVPHTWLMRVLELYKVEATLRTFLMSCMGQWRTVLHYPACRNTQRNSEPIRIERGIFQGDSLSPLWFCLALNPLSTLLEDSGLGYRLRRGGQVISHLLYMDDLKLFAPNNSQLMDLLKVTETFSSAIRMEFGVDKCAVMHVKRGEIVESVGTQLSDSINLRALSASETYKYLGMSEALGINGTDMKQSLKERFFGRLKKVFNSLLSGGNKVRAFNGWVMPVLMYSFGILKWTQTELDALDRKVRTLLTANRMHHPRSSVMRLYIPRKCGGRGFLNAKTLHNREICSLREYFLEADVGMHRDVVTVDKGLTPLSLAKENWRKPVVLDTNDRMEVWQSKELHGRFFRALHGPDVDQLASVAWLRFGDLFGETEGFVCAIMDEVMMTNNYRRFIVKDGTVDICRACHRPGESIRHIISGCSRLANEEYLHRHNLVARIIHQQLALKYSLVESEVPYYRYVPDPVLENGHITLYWDRSIITDRTIVANKPDIVMVDRLERRAMIVDITVPHDGNLVKAEKDKQIKYLDLAREVVDMWDVDSAIIVPIVVTANGLIAKSLDQHLRRLSLGSWIKGLIQKAVLLDTARIVRRFLSLEP

SEQ ID NO: 10383 - protein, 1197 aa, Griposia aprilina
MLTRSAALRARLPTPDSSLSSASPPPVSSPIVSAVTTPAAVVASSSSDEYFSPPTTPPPARRRGGHRPPDGLGPRGPPASDRVPAPGGSVQRMRWTQSINENVMRSYYGATEGGNNLTAYRVRMLSLFQVLEPAVNVSAQRLSDQVRVIQRNHMLDDTVLDRLRSEMQSSHVIAPLSQTVVVLPHPITSHDEGSDDRATNVSTQCNEELRSALEGAIREYRFMSPELRPRLPRLPMHNKNRALVAALDSQLSNYFDDCVDLTDTHSILYCAAVAACRVAHVKFANDSRATRPKPAVPAWQCRIERRIGGARALIGKLICFREGNTRPRVMRFVRRAFAGTDVSPQDYISCVTERIDFLKQKVYAWASRIRRYKRRVERYTQNRTFQRDERWVYRDWERPDQGVADTYLPDDDAMCSFWHNIWSVPVSHTEGDWTREVERACEPIPEMGAITICPQDVARAVRPLPNWKSPGPDGLHNFWIKWFLKSHARLAAQFQAALESGSLPQFLTTGVTHLLHKSGSIAEPKNYRPITCLPTVYKVLTSILRAKINKHIDTNSIMSASQNGCRNGSRGTKELLLIDMAISQQVRRSRKDLSTCWIDYKKAYDSVPHTWLMRVLELYKVDATLRTFLKSCMGQWRTVLRYPTCRNTQRNSEPIRIERGIFQGDSLSPLWFCLALNPLSTLLEDSGLGYRLRRGGRVISHLLYMDDLKVFAPNNLQLIELLKVTETFSSAIRMEFGLDKCAVMHVKRGEIVESVGTQLSDSMNLRALSASETYKYLGMSEALGVNNTDMKQSLKERFFGRLKKVFNSLLSGGNKVRAFNGWVMPVLMYSFGILKWTQTELDTLDRRVRTLLTANRMHHPRSSVMRLYIPRKCGGRGFLNAKSLHNREICSLREYFLEADVGMHRDVVAVDKGLTPLSLAKENWRKPVVLDTNDRMEVWQSKELHGRFFRALHGPDVDVQASVAWLRFGDLFGETEGFVCAIMDEVMMTNNYRRFIVKDGTVDICRACHRPGESIRHIISGCSRLANEEYLHRHNLVARIIHQQLALKYSFVESEVPYYRYVPDPVLENGTITLYWDRSIITDRTIIANKPDIVLVDRRERRAMIVDITIPHDGNLVKAEKDKQIKYLDLAREVVDMWDVDSAIIVPIVVTANGLIAKSLDQHLRRLSLGSWIKGLIQKAVLLDTARIVRRFLSLEP

SEQ ID NO: 10384 - protein, 1197 aa, Griposia aprilina
MLTRSAALRARLPTPDSSLSSASPPPVSSPIVSAVTTPAAVVASSSSDEYFSPPTTPPPARRRGGHRPPDGLGPRGPPASDRVPAPGGSVQRMRWTQSINENVMRSYYGATEGGNNLTAYRVRMLSLFQVLEPAVNVSAQRLSDQVRVIQRNHMLDDTVLDRLRSEMQSSHVIAPPSQTVVVLPQPITSHDEGSDDRATNVSTQCNEELRSALEGAIREYRFMSPELRPRLPRLPMHNKNRALVAALDSQLSNYFDDCVDLTDTHSILYCAAVAACRVAHVKFANDSRATRPKPAVPAWQCRIERRIGGARALIGKLICFREGNTRPRVMRFVRRAFAGTDVSPQDYISCVTERIDFLKQKVYAWASRIRRYKRRVERYTQNRTFQRDERWVYRDWERPDQGVADTYLLDDDAMCSFWHNIWSVPVSHTEGDWTREVERACEPIPEMGAITICPQDVARAVRPLPNWKSPGPDGLHNFWIKWFLKSHARLAAQFQAALESGSLPQFLTTGVTHLLHKSGSIAEPKNYRPITCLPTVYKVLTSILRAKINKHIDTNSIMSASQNGCRNGSRGTKELLLIDMAISQQVRRSRKDLSTCWIDYKKAYDSVPHTWLMRVLELYKVDATLRTFLKSCMGQWRTVLRYPTCRNTQRNSEPIRIERGIFQGDSLSPLWFCLALNPLSTLLEDSGLGYRLRRGGRVISHLLYMDDLKVFAPNNLQLIELLKVTETFSSAIRMEFGLDKCAVMHVKRGEIVESVGTQLSDSMNLRALSASETYKYLGMSEALGVNNTDMKQSLKERFFGRLKKVFNSLLSGGNKVRAFNGWVMPVLMYSFGILKWTQTELDTLDRRVRTLLTANRMHHPRSSVMRLYIPRKCGGRGFLNAKSLHNREICSLREYFLEADVGMHRDVVAVDKGLTPLSLAKENWRKPVVLDTNDRMEVCQSKELHGRFFRALHGPDVDVQASVAWLRFGDLFGETEGFVCAIMDEVMMTNNYRRFIVKDGTVDICRACHRPGESIRHIISGCSRLANEEYLHRHNLVARIIHQQLALKYSFVESEVPYYRYVPDPVLENGTITLYWDRSIITDRTIIANKPDIVLVDRRERRAMIVDITIPHDGNLVKAEKDKQIKYLDLAREVVDMWDVDSAIIVPIVVTANGLIAKSLDQHLRRLSLGSWIKGLIQKAVLLDTARIVRRFLSLEP

SEQ ID NO: 10385 - protein, 1198 aa, Omphaloscelis lunosa
MLTRSAARRARLPPPDSPLSSASSPPVLSPTVNAVMTPAAAVASSSSDEYFSPPTTPQSARRRGGRRPPDGLGPRGPPASDRVPAPGGSVQRMRWTRSINENVMRSYYGATEGGINLTAYRVRMLSLFQVLEPPVNVSAQRLSDQVRVIQRNHMLDDTVLDRLRSEMQSSHVIASPVRSVIIPSQIITSQADERIDDRATNVSTQCNEELRSALEGAIQEYRFMSPELRPRLPRLPMHNKNKALVAVLDSQLSNYFDDCEDLTDTHSILYCAAVAACRVAHVKFANDSRATRPKPAAPAWQCRIERRIGGARTLIGKVICFREGNTRPRVMRFVRRAFLGTDISPQDYLTRVTERIDFLKQKVYAWANRIRRYKRRVERYTQNRTFQSDERWVYRAWERPDQGVADTHRPDDDAMCSFWRSIWSVPVNHTEGDWTREVERACDPIPEMGAITICPQDVARAVRPLPNWKSPGPDGLHNFWIKWFLRSHARLAAQYQTALESGSLPQFLTTGVTHLLHKSGSTAEPKNYRPITCLPTVYKVLTSILRAKINKHIDTNSIMSASQNGCRNGSRGTKELLLIDMAINQQVRRSRKDLSTCWIDYKKAYDSVPHTWLMRVLELYKVDTTLRTFLMSCMGQWRTVLRYPGCRNIQRNSEPIRIERGIFQGDSLSPLWFCLALNPLSTLLEASGLGYRLRRGGQVISHLLYMDDLKLFAPNNLQLMELLKVTETFSNAIRMEFGVDKCAVMHVKRGEIVESVGTQLSDSINLRALSASETYKYLGMSEALGINVTDMKQSLKERFFGRLKKVLNSLLSGGHKVRAFNGWVMPVLIYSFGILKWTQTELDALDRRVRTLLTAYRMHHPRSSVMRLYIPRKCGGRGFLNAKTLHNREICNLREYFLGVDVGMHRDVVVVDKGLIPLSLAKENWRKPVVLDTKDRMEIWQSKELHGRYFRALHGPDVDLPASVTWLRFGDLFGETEGFVCAIMDEVMMMNNYRRFIVKDGTVDICRACHRPGESIRHIISGCSRLANEEYLHRHNLVARIIHQQLALKYSLVESEVPYYRYVPDPVLENGNIKLYWDRSIITDRTIVANKPDIVVVDRGERRTMIIDITVPHDENLVKAEKDKQIKYLDLAREVVDMWDVDSAIIVPIVVTANGLIAKSLDQHLRRLSLGSWIKGLIQRAVLLDTARIVRRFLSLEP

SEQ ID NO: 10386 - protein, 868 aa, Omphaloscelis lunosa
MRFVKRAFSGTDISFQDYLTRVTERIDFLKQKIYAWANRIRRYRRRVERYTQNRTFQSDERWVYRAWERLDQGVIDTHLPDDDAMCSFWRSIWSAPVSHTEGDWTREIERACEQIPEMEALTISPQDIARAVRPLPNWKSPGPDGLHNFWIKWFQRSHARLASQFQSALESGSLPQFLTTGITHLLHKSGSTAEPKNYRPITCLPTVYKVFTSILRTKINKHIDTNSIMSASQNGCRNGSRGTKELLLIDMAINQQVRRSRRDLSTCWIDYKKAYDSVPHTWLMRVLELYKVNATLRTFLMSCMGQWRTVLRYPGCRQILRNSEPIRIERGIFQGDSLSPLWFCLALNPLSTLLEDSGLGYRLKRGGQVISHLLYMDDLKLFAPNNLQLLELLKVTETFSSAIRMEFGVDKCAVMHVKRGEIVESVETQLSDSIQLRSLSSIETYNYLGMSEALGVNAADMKQSLKERFFNRLNKVLNSLLSGGNKVRAFNGWVMPVSMYSFGILKWTQTELDALDRRVRTLLTANRMHHPRSSVMRLYIPRKCGGRGFLNAKTLHNREVCSLREYFLEADVGMHRDVVTVDKGLTPLSLANENWRKPIVLDTNDRREVWQSKELHGRFYRALHGPDVDLLASVSWLRFGDLFGETEGFVFAIMDEVMMTNNYRKYIVKDGTVDICRACHRPGESIRHIISGCSRLANGDYLHRHNLVARIIHQQLALKYSLVESEVPYYRYVPDPVLENGNITLYWDRSIITDRTIVANKPDIVVIDQLERRTMIIDIAVPHDENLVKAEKDKQIKYLDLAREVVDMWDVDTAIIVPIVVTANGIIAKSLDQHLKRLSLGSWIKGLIQKAVLLDTARIVRRFLSQEP

SEQ ID NO: 10387 - protein, 1201 aa, Sesamia nonagrioides
MLTRSAARKRARPPSPDSLLSSASPPPVSSPTVSAVTTPAAAVASSSSGEYFSPPTTPPPVRRRGGRRPPDRLGPRGPSASDRVPAPGGSVQRMRWTQSINENVMRSYYGATEGENNLTAYRVRMLSLFQVLEPGVNVSAQRLSDQVRVIQRNHMLDDVVLDRLRLESRNSHVTPASSLVAVQLNSVSPRPNRVDEEDDDRAISVSPQCIEKLRSALEDAFCEYRSTPPELRPRLPRLPMHKKNKALVCALDSQLSYYLKDSKDLTDTHSILYCGALAICRVAHVKFPDSDRATRPKSAVPAWQCRIERRIGETRALIGKLTSFREGNTRPRVMRFVRRAFSGTDTSTRDYLFRVTERIDFFKQKIYAWANRIRRYKRRVERYSQNRNFQSDERRVYRAWERSDQGVTDTCLPDDDAMCSFWRNIWSVPVSHTEGSWTRVVERACDPVPEMGAITICPQDVARAVRPLPNWKSPGPDGLHNFWIKWFSGSHARLASQFQTALESGSLPQFLTTGVTHLLHKSGSTAEPKNYRPITCLPTVYKVLTSILKSKINTHIDSNSIMSASQNGCRSGSRGTKELLLIDMAISQQVRRSRKDLSTCWIDYKKAYDSVPHTWLMRVLELYKVDATLRTFLMTCMRTWRTVLRYPGCRNIQRNSEPIRIERGIFQGDSLSPLWFCLALNPLSTLLEDSGLGYRLRRGGQVISHLLYMDDLKLFAHTDSQLKELLKITETFSSSIRMEFGVDKCAVMHVKRGEIMESVGTQLTSSINLRALSASETYKYLGMSEALGINVTDMKQSLKERFFGRLKKVLNSLLSGGNKVRAFNGWVMPVLMYSFGILKWTQTELDALDQRVRTLLTANRLHHPRSSVMRLYIPRKCGGRGFLNAKTLHNREVCSLREYFLETDVGMHRDVVAADKGLTPLSLAKENWRKPVVLDTNDRLEVWKSKELHGRFFRALHGPDVDFRASVAWLRFGDLFGETEGFVFAIMDEVMMTNNYRRFIVKDGTVDICRACHRPGESIRHIISGCSRLANGEYLHRHNLVARIIHQQLALKYNLVESEVPYYRYMPDPVLENGHITLYWDRSIITDRTIVANKPDIVLVDRSERRAMIVDITIPHDENLVKAEKDKQIKYLDLAHEVVDMWEVDSAIIVPIVVTANGLIAKSLDQHLRRLSLGSWIKGLIQKAVLLDTARIVRKFLSLEP

SEQ ID NO: 10388 - protein, 1197 aa, Sesamia nonagrioides
MLTRSAARRARPPSPDSLLSSASPPPVSSPTVSAVTTPAATVASSSSDEYFSPPTTPPPVRRRGGRRPPDCLGPRGPSASDRVPAPGGSVQRMRWTQSINENVMRSYYGATEGGTNLTAYRVRMLSLFRVLEPAVNVSAQRLSDQVRVIQRNHMLDDTVLDRLRNEMQSSRVITHQSQSAEIPPQPTNYADEGSNDRATNVSTQCNEELRNALEAAIREYRSISAELRPRLPRLPMHNRNRALMAALDAQLSNYFDTCEDLTDTHSILYCAAVAACRVAHVKFPSDSRATRPKPVVPAWQRRIERRIGGARALIGKLICFREGNTRPRVMRFVRRAFSGTNTSPQNYMARVTERIDFLKQKVYAWANRIRRYKRRVERYTQNRTFQSNERRVYRDWERSEQGVTDTCLPDDDAMCSFWRSIWSVPVSHTEGDWARDVERACDPIPEMGAITICPQDVAHAVRPLPNWKSPGPDGLHNFWIKWFPRSHARLASQFQTALVSGSLPQFLTTGITHMLHKSGSTAEPKNYRPITCLPTVYKVLTSILKTKINKHIDSNSILSASQNGCRSGSRGTKELLLIDMAISQQVRRSRKDLSTCWIDYKKAYDSVPHTWLMRVLELYKVDATLRTFLMTCMRTWRTVLRYPGCRNIQRNSEPIRIERGIFQGDSLSPLWFCLALNPLSTLLEDSGLGYRLRRGGQVISHLLYMDDLKLFAPNNSQLNELLKITEIFSSSIRMEFGVDKCAVMHVKRGEIMEPVGTQLTSSINLRALSASETYKYLGMSEALGINVTDMKQSLKERFFGRLKKVLNSLLSGGNKVRAFNGWVMPVLMYSFGILKWTQTELDALDQRVRTLLTANRLHHPRSSVMRLYIPRKCGGRGFLNAKTLHNREICSLRDYFLETDVGMQRDVVAADKGLTPLSLANENWRKPVVLDTNDRMEVWKSKELHGRFFRALHGPDVDFQASVAWLRFGDLFGETEGFVFAIMDEVMMTNNYRRFIVKDGTVDICRACHRPGESIRHIISGCSRLANGEYLHRHNLVARIIHQQLALKYKLVESEVPYYRYMPDPVLENGHITLYWDRSIITDRTIIANKPDIVLVDRSERRAMIVDITIPHDENLVKAEKDKQTKYLDLAHEVVDMWEVDSAIIVPIVVTANGLIAKSLDQHLRRLSLGSWIKGLIQKAVLLDTARIVRKFLSLEP

SEQ ID NO: 10389 - protein, 1197 aa, Sesamia nonagrioides
MLTRSAARRARPPSPDSLLSSASPPPVSSPTVSAVTTPAATVASSSSDEYFSPPTTPPPVRRRGGRRPPDCLGPRGPSASDRVPAPGGSVQRMRWTQSINENVMRSYYGATEGGTNLTAYRVRMLSLFQVLEPAVNVSAQRLSDQVRVIQRNHMLDDIVLDRLRNEMQSSRVITHQSQSAEIPPQPTNYADEGSNDRATNVSTQCNEELRNALEAAIREYRSISAELRPRLPRLPMHNRNRALMAALDAQLSNYFDTCEDLTDTHSILYCAAVAACRVAHVKFPSDSRATRPKPVVPAWQRRIERRIGGARALIGKLICFREGNTRPRVMHFVRRAFSGTNTSPQNYMARVTERIDFLKQKVYAWANRIRRYKRRVERYTQNRTFQSNERRVYRDWERSEQGVTDTCLPDDDAMCSFWRSIWSVPVSHTEGDWARDVERACDPIPEMGAITICPQDVACAVRPLPNWKSPGPDGLHNFWIKWFPRSHARLASQFQTALVSGSLPQFLTTGITHLLHKSGSTAEPKNYRPITCLPTVYKVLTSILKTKINKHIDSNSILSASQNGCRSGSRGTKELLLIDMAISQQVRRSRKDLSTCWIDYKKAYDSVPHTWLMRVLELYKVDATLRTFLMTCMRTWRTVLRYPGCRNIQRYSEPIRIERGIFQGDSLSPLWFCLALNPLSTLLEDSGLGYRLRRGGQVISHLLYMDDLKLFAPNNSQLNELLKITEIFSSSIRMEFGVDKCAVMHVKRGEIMEPVGTQLTSSINLRALSASETYKYLGMSEALGINVTDMKQSLKERFFGRLKKVLNSLLSGGNKVRAFNGWVMPVLMYSFGILKWTQTELDALDQRVRTLLTANRLHHPRSSVMRLYIPRKCGGRGFLNAKTLHNREICSLRDYFLETDVGMQRDVVAADKGLTPLSLANENWRKPVVLDTNDRMEVWKSKELHGRFFRALHGPDVDFQASVAWLRFGDLFGETEGFVFAIMDEVMMTNNYRRFIVKDGTVDICRACHRPGESIRHIISGCSRLANGEYLHRHNLVARIIHQQLALKYKLVESEVPYYRYMPDPVLENGHITLYWDRSIITDRTIIANKPDIVLVDRSERRAMIVDITIPHDENLVKAEKDKQTKYLDLAHEVVDMWEVDSAIIVPIVVTANGLIAKSLDQHLRRLSLGSWIKGLIQKAVLLDTARIVRKFLSLEP

SEQ ID NO: 10390 - protein, 1197 aa, Sesamia nonagrioides
MLTRSAARRARPPSPDSLLSSASPPPASSATVSAVTTPAAAVASSSSDEYFSPPTTPPPARRRGGRRPPDRLGPRGPSASDRVPAPGGSVQRMRWTQSINENVMRSYYGATEGGNNLTAYRVRMLSLFQVLEPAVNVSAQRLSDQVRVIQRNHMLDDTVLDRLRNEMQSSRIIAHQSQTAEIPPRPTNYADEGSNDRATNVSTQCNEELINALEAAIREYRFTPAELRPRLPRLPMHNRNRALMAALDAQLSDYFDTCEDLTDTHSILYCAAVAACRVAHVKFPSDSRATRPKPVVPAWQHRIERRIGGARALIGKLICFREGNTRPRVMRFVRQAFAGTNISPQNYMARVTERIDFLKQKVYAWANRIRRYKRRVERYTQNRTFQSNERWVYRDWERPEQGVTDTCLPDDDAMCSFWRSIWSVPVSHTEGDWARDVERACDPIPEMGVITICPQDIACAVRPLPNWKSPGPDGLHNFWIKWFPRSHARLASQFQTALVSGSLPQFLTTGITHLLHKSGSTAEPKNYRPITCLPTVYKVLTSILKTKINKHIDSNSIMSASQNGCKSGSRGTKELLLIDMAISQQVRRSRKDLSTCWIDYRKAYDSVPHTWLMRVLELYKVDATLRTFLMSCMKTWRTVLRYPGCRNIQRNSEPIRIERGIFQGDSLSPLWFCLALNPLSTLLEDSGLGYRLRRGGQVISHLLYMDDLKLFAPNNSQLRELLKITETFSSSIRMEFGVDKCAVMHVKRGEIMESVGTQLTDSINLRALSASETYKYLGMSEALGINVTDMKQSLKERFFGRLKKVLNSLLSGGNKARAFNGWVMPVLMYSFGILKWTQTELDALDQRVRTLLTANRLHHPRSSVMRLYIPRKCGGRGFLNAKTLHNREVCSLRDYFLVTDVGMHRDVVAADKGLTPLSLAKENWRKPVVLDTNDRMEVWKSKELHGRFFRALHGPDVDLQASVAWLRFGDLFGETEGFVFAIMDEVMMTNNYRRFIVKDGTVDICRACHRPGESIRHIISGCSRLANGEYLHRHNLVARIIHQQLALKYNLVESEVPYYRYTPDPVRENGYITLYWDRSIITDRTIVANKPDIVMVDRSERRAMIVDITIPHDENLVKAEKDKQIKYLDLAHEVVDMWKVDSAIIVPIVVTANGLMAKSLDQHLRRLSLGSWIKGLIQKAVLLDTARIVRKFLSLEP

SEQ ID NO: 10391 - protein, 1077 aa, Sesamia nonagrioides
MLSLFQVLEPAVNVSAQRLSDQVRVIQRNHMLDDVVLDRLRLESRNSHVTPASSLVAVQLNSVSPRPNHVDEEDDDRAISVSPQCNEKLRSALEDAFREYRSIPPEFRPRLPRLPMHKKNKALVCALDSQLSNYLKDSNDLNDTHSILYCGAVAICRVAHVKFPDSDRATRPKSAVPAWQCRIERRIGETRALIGKLISFREGNTRPRVMRFVRRAFSGTDTSTRDYLFRVTERIDFFKQKIYAWANRIRRYRRRVERYSQNRNFQSDERRVYRAWERSDQGVTDTCLPDDDATCSFWRNIWSVPVSHTEGSWTRVVERACDAVPEMGAITICPQDVARAVRPLPNWKSPGPDGLHNFWIKWFSGSHARLASQFQTALESGSLPQFLTTGVTHLLHKSGSTAEPKNYRPITCLPTVYKVLTSILKSKINTHIDSNSIMSASQNGCRSGSRGTKELLLIDMAISQQVRRSRKDLSTCWIDYKKAYDSVPHTWLMRVLELYKVDATLRTFLMTCMRTWRTVLRYPGCRNIQRNSELIRIERGIFQGDSLSPLWFCLALNPLSTLLEDSGLGYRLRRGGQVISHLLYMDDLKLFAHTDSQLKELLKITETFSSSIRMEFGVDKCAVMHVKRGEIMESVGTQLTSSINLRALSASETYKYLGMSEALGINVTDMKQSLKERFFGRLKKVLNSLLSGGNKVRAFNGWVMPVLMYSFGILKWTQTELDALDRRVRTLLTANRLHHPRSSVMRLYIPRKCGGRGFLNAKTLHNREICSLRQYFLTTDVGMHRDVVAVDKGLTPLSLAKENWRKPVVLDTNDRMEVWKSKELHGRFFKALHGPDVDLQASVAWLRFGDLFGETEGFVCAITDEVMMTNNYRRFIVKDGTVDICRACHRPGESIRHIISGCSRLANGEYLHRHNLVARIIHQQLALKYNLVESEVPYYRYTPDPVLENDHITLYWDRSIITDRTIVANKPDIVLVDRSERRAMIVDITIPHDENLVKAEKDKQIKYLDLAHEVVDMWEVDSAIIVPIVVTANGLIAKSLDQHLRRLSLGSWIKGLIQKAVLLDTARIVRKFLSLEP

SEQ ID NO: 10392 - protein, 983 aa, Sesamia nonagrioides
MLSVSTALLRLNLDHVYLDCPCIKKNKALVCALDSQLSNYLKDSKDLADTHSILYCGAVAICRVAHVKFPDSDRATRPKSTVPAWQCRIERRIGETRALIGKLISFREGNTRPRVMRFVRRAFSGTDVSTRDYLLRVTERIDFLKQKIYAWANRIRRYRRRVERYSQNRNFQSDERWVYRALERSDQGVTDTCLPDDDATRSFWRNIWSVPVSHTEGGWTRDVERACDSVPEMGAITICPQDVARAVRPLPNWKSPGPDGLHNFWIKWFSGSHACLASQFQTALESGSLPQFLTTGITHLLHKSGSTAEPKNYRPITCLPTVYKVLTSILKAKINTHIDSNSIMSASQNGCRNGSRGTKELLLIDMAISQQVRRSRKDLSTCWIDYKKAYDSVPHTWLMRVLELYKVDATLRTFLMTCMSQWRTVLRYPGCRNIPRNSEPIRIERGIFQGDSLSPLWFCLALNPLSTLLEDSGLGYRLRRGGQVISHLLYMDDLKLFAPNNLQLKELLKITETFSSAIRMEFGVDKCAVMHVQRGEIVESVGTQLTGSINLRSLSASETYKYLGMSEALGINVTDMKQSLKERFFGRLKKVLNSLLSGGNKVRAFNGWVIPVLMYSFGILKWTQTELDALDQRVRTLLTANRLHHPRSSVMRLYIPRKCGGRGFLSAKTLHNREVCSLREYFLETDVGMHRDVVAADKGLTPLSLAKENWRKPVVLDTNDRMEVWKSKELHGRFFRALHGPDVDFQASVAWLRFGDLFGETEGFVFAIMDEVMMMNNYRRFIVKDGTVDICRACHRPGESIRHIISGCSRLANGEYLHRHNLVARIIHQQLALKYNLVESEVPYYRYMPDPVLENGHITLYWDRSIINDRTIVANKPDIVLVDRSERRAMIVDITIPHDENLVKAEKDKQIKYLDLAHEVVDMWEVDSSIIVPIVVTANGLIAKSLDQHLRRLSLGCWIKGLIQKAVLLDTARIVRKFLSLEP

SEQ ID NO: 10393 - protein, 1201 aa, Sesamia nonagrioides
MLTRSAARKHARPPSPDSLLSSASPPPVSSPTVSAVTTPAAAVASSSSDEYFSPPTTPPPVRRRGGRRPPDRLGPRGPSASDRVPAPGGSVQRMRWTQSINENVMRSYYGATEGGNNLTAYRVRMLSLFQVLEPAVNVSAQRLSDQVRVIQRNHMLDDVVLDRLRLESRNSHVTPASSLVAVQLNSVSPRPNHVDEEDDDRAISVSPQCNEQLRSALEDAFREYRSTPPELRPRLPRLPMHKKNKALVCALDSQLSNYLKDSKDLTDTHSILYCGAVAICRVAHVKFPDSDRATRPKPAVPAWQCRIERRIGETRALIGKLISFREGNTRPRVMRFVRRAFSGTDISTRDYLLRVTERIDFLKQKIYAWANRIRRYRRRVERYSQNRNFQSDERRVYRAWERSDQGVTDTCLPDDDATCSFWRNIWSVPVSHTEGGWTRDVERACDPVPEMGAITICPQDVARAVRPLPNWKSPGPDGLHNFWIKWFSGSHACLASQFQTALESGSLPQFLTTGITHLLHKSGSTAEPKNYRPIACLPTVYKVLTSILKAKINTHIDSNSIMSASQNGCRNGSRGTKELLLIDMTISQQVRRSRKDLSTCWIDYKKAYDSVPHTWLMRVLELYKVDATLRTFLMTCMSQWRTVLRYPGCRNIQRNSEPIRIERGIFQGDSLSPLWFCLALNPLSTLLEDSGLGYRLRRGGQVISHLLYMDDLKLFAHTNSQLKELLKITETFSSAIRMEFGVDKCAVMHVQRGEIVESVGTQLTGSINLISLSASETYKYLGMSEALGINVTDMKQSLKERFFGRLKKVLNSLLSGGNKVRAFNGWVMPVLMYSFGILKWTQTELDALDQRVRTLLTANRLHHPRSSVMRLYIPRKCGGRGFLNAKTLHNREICSLREYFLKTDVGMHRDVVAVDKGLTPLSLAKENWRKPVVLETNDRMEVWQSKELHGRFFRALRGPDVDFQASVAWLRCGDLFGETEGFVCAIMDEVMMTNNYRRFIVKDGTVDICRACHRPGESIRHIISGCSRLANGEYLHRHNLVARIIHQQLALKYNLVESEVPYYRYMPDPVLENGHITLYWDRSIITDRTIVANKPDIVMVDRSERRAMIVDITIPHDENLVKAEKDKQIKYLDLAHEVVDMWEVDSAIIVPIVVTANGLIAKSLDQHLRRLSLGGWIKGLIQKAVLLDTARIVRKFLSLEP

SEQ ID NO: 10394 - protein, 1200 aa, Sesamia nonagrioides
MLTRSAARRARSPPPDSSPSSASPPPVSSPTVNAVMTPAAAVALSSSDEYFSPPTTPPPVRRRGGRRPPDCLGPRGPPASDRAPATGGNVQRMKWTQSINENVMRAYFGATEGGSNLTAYRGRMLSLFQVLEPAVNVSAQRLSDQVRVIQRNHMLDDVVLDRLRLESRNSHVTPASSLVAVQLNSVPSRPNLVDEEDDDEAISVTPQCNEKVRSALEDAFREYRSTPPELRPRLPRLPMHKKNKALVCALDSQLSNYLKDSKDLADTHSILYCGAVAICRVAHVKFPDSDRATRPKPAVPAWQCRIERRIGETRALIGKLISFREGNTRPRVMRFVRRAFSGTDVSTRDYLLRVTERIDFLKQKIYAWANRIRRYRRRVERYSQNRNFQSDERWVYRAWERSDQGVTDTCLPDDDATRSFWRNIWSVPVSHTEGGWTRDVERACDPVPEMGAITICPQDVARAVRPLPNWKSPGPDGLHNFWIKWFSGSHACLASQFQTALESGSLPQFLTTGITHLLHKSGSTAEPKNYRPITCLPTVYKVLTSILKAKINTHIDSNSIMSASQNGCRNGSRGTKELLLIDMAISQQVRRSRKDLSTCWIDYKKAYDSVPHTWLMRVLELYKVDATLRTFLMTCMSQWRTVLRYPGCRNIQRNSEPIRIERGIFQGDSLSPLWFCLALNPLSTLLEDSGLGYRLRRGGQVISHLLYMDDLKLFAHTNSQLKELLKITETFSSAIRMEFGVDKCAVMHVQRGEIVESVGTQLTGSINLRSLSASETYKYLGMSEALGINVTDMKQSLKERFFGRLKKVLNSLLSGGNKVRAFNGWVMPVLMYSFGILKWTQTELDALDQRARTLLTANRLHHPRSSVMRLYIPRKCGGRGFLNAKTLHNREVCSLREYFLKTDVGMHRDVVAVDKGLTPLSLAKENWRKPVVLETNDRMEVWQSKELHGRFFRALRGPDVDFQASVAWLRYGDLFGETEGFVCAIMDEVMMTNNYRKFIVKDGTVDICRACHRPGESIRHIISGCSRLANGEYLHRHNLVARIIHQQLALKYNLVESEVPYYRYMPDPVLENGHITLYWDRSIITDRTIVANKPDIVMVDRSERRAMIVDITIPHDENLVKAEKDKQIKYLDLAHEVVDMWEVDSAIIVPIVVTANGLIAKSLDQHLRRLSLGGWIKGLIQKAVLLDTARIVRKFLSLEP

SEQ ID NO: 10395 - protein, 1200 aa, Sesamia nonagrioides
MLTRSAARRARSPPPDSSPSSASPPPVSSPTVNAVMTPAAAVALSSSDEYFSPPTTPPPVRRRGGRRPPDCLGPRGPPASDRAPATGGNVQRMKWTQSINENVMRAYFGATEGGSNLTAYRGRMLSLFQVLEPAVNVSAQRLSDQVRVIQRNHMLDDVVLDRLRLESRNSHVTPASSLVAVQLNSVPSRPNLVDEEDDDEAISVTPQCNEKVRSALEDAFREYRSTPPELRPRLPRLPMHKKNKALVCALDSQLSNYLKDSKDLADTHSILYCGAVAICRVAHVKFPDSNRATRQKPAVPAWQCRIERRIGETRALIGKLISFREGNTRPRVMRFVRRAFSGTDVSTRDYLLRVTERIDFLKQKIYAWANRIRRYRRRVERYSQNRNFQSDERWVYRAWERSDQGVTDTCLPDDDATRSFWRNIWSVPVSHTEGGWTRDVERACDPVPEMGAITICPQDVARAVRPLPNWKPPGPDGLHNFWIKWFSGSHACLASQFQTALESGSLPQFLTTGITHLLHKSGSTAEPKNYRPITCLPTVYKVLTSILKAKINTHIDSNSIMSASQNGCRNGSRGTKELLLIDMAISQQVRRSRKDLSTCWIDYKKAYDSVPHTWLMRVLELYKVDATLRTFLMTCMSQWRTVLRYAGCRNIQRNSEPIRIERGIFQGDSLSPLWFCLALNPLSTLLEDSGLGYRLRRGGQVISHLLYMDDLKLFAHTNSQLKELLKITETFSSAIRMEFGVDKCAVMHVQRGEIVESVGTQLTGSINLRSLSASETYKYLGMSEALGINVTDMKQSLKERFFGRLKKVLNSLLSGGNKVRAFNGWVMPVLMYSFGILKWTQTELDALDQRVRTLLTANRLHHPRSSVMRLYIPRKCGGRGFLNAKTLHNREVCSLREYFLKTDVGMHRDVVAVDKGLTPLSLAKENWRKPVVLETNDRMEVWQSKELYGRFFRALRGPDVDFQASVAWLRYGDLFGETEGFVCAIMDEVMMTNNYRKFIVKDGTVDICRACHRPGESIRHIISGCSRLANGEYLHRHNLVARIIHQQLALKYNLVESEVPYYRYMPDPVLENGHITLYWDRSIITDRTIVANKPDIVMVDRSERRAMIVDITIPHDENLVKAEKDKQIKYLDLAHEVVDMWEVDSAIIVPIVVTANGLIAKSIDQHLRRLSLGGWIKGLIQKAVLLDTARIVRKFLSLEP

SEQ ID NO: 10396 - protein, 868 aa, Sesamia nonagrioides
MRFVRRAFSGTDTSTRDYLFRVTERIDFFKQKIYAWANRIRRYKRRVERYSQNRNFQSDERRVYRAWERSDQGVTDTCLPDDDAMCSFWRNIWSVPVSHTEGSWTRVVERACDPVSEMGAITICPQDVARAVRPLPNWKSPGPDGLHNFWIKWFTGSHARLASQFQTALESGSLPQFLTTGVTHLLHKSGSTAEPKNYRPITCLPTVYKVLTSILKSKINTHIDSNSIMSAFQNGCRSGSRGTKELLLIDMAISQQVRRSRKDLSTCWIDYKKAYDSVPHTWLMRVLELYKVDATLRTFLMTCMRTWRTVLRYPGCRNIQRNSEPIRIERGIFQGDSLSPLWFCLALNPLSTLLEDSGLGYRLRRGGQVISHLLYMDDLKLFAHTDSQLKELLKITETFSSSIRMEFGVDKCAVMHVKRGEIMESVGTQLTSSINLRALSASETYKYLGMSEALGINVTDMKQSLKERFFGRLKKVLNSLLSGGNKVRAFNGWVMPVLMYSFGILKWTQTELDALDQRVRTLLTANRLHHPRSSVMRLYIPRKCGGRGFLNAKTLHNREVCSLREYFLETDVGMHRDVVAADKGLTPLSLAKENWRKPVVLDTNDRLEVWKSKELHGRFFRALHGPDVDFRASVAWLRFGDLFGETEGFVFAIMDEVMMTNNYRRFIVKDGTVDICRACHRPGESIRHIISGCSRLANGEYLHRHNLVARIIHQQLALKYNLVESEVPYYRYMPDPVLENGHITLYWDRSIITDRTIVANKPDIVLVDRSERRAMIVDITIPHDENLVKAEKDKQIKYLDLAHEVVDMWEVDSAIIVPIVVTANGLIAKSLDQHLRRLSLGSWIKGLIQKAVLLDTARIVRKFLSLEP

SEQ ID NO: 10397 - protein, 1204 aa, Drepana arcuata
MFTRSQARRHNAHPPPSASPPSSVSQTPADSDSATLDFRVVATAASSSSDEYFSPPTSPRPVRRQGRVQPPPNGLGPRGQSAPDRVLAVGGNVQRMRWTHIINENVMRAYYGATEGGTSLTAYRSRMLLLFQELEPTVNVSAQRLSDQVRVIQRNHRLDDNVLDRLRSEMQGNHVTSAPAQSAAQSLVSSITLPQPSYTDMEGGDRPLNAGTQYNELVRSTLKDAVQQYKSVSPGLRPRLPRLPKKKLALAATLDSLLPEYIDCCEDLTETHQILYCAAIAACRLAYVNFPNHERTGQPKPAVPIWQRRIQRRIDDARVLIGKLSCFREGNTRPRVMRYVRKAFSGSDINPRDYVACVTERIDYLKQKVYAWANRIRRYKQRVDRYTQNHMFQNDQKWVYRGWERSEQGVSDEQLPDNDAVCTFWSNIWSVPVTHTEGDWIEEIKRICESIQEMGEVTISPKDVADAVQSLSNWKSPGPDGLHNFWLKWLRTSHARLASQFQSSLESGSLPSFLMTGITHLLHKSGSTMDPKNYRPITCLPTMYKLLTSILRAKISMHINNNVIMSASQNGCKNGSRGTKELLLIDMTISQQVRRSRKNLSTCWIDYKKAYDSVPHTWLMRVLELYKVNSTLRIFLKSIMGQWKTVLHYPRGRQIPGNDEPIRIERGIFQGDSLSPLWFCLALNPLSTLLESSGLGYRLRRGGQVISHLLYMDDLKLFAPSELQLTELLNVTQNFSNSIRMEFGIDKCAVMHVKRGNIVESVGIQLSDSINIRSLTPTENYKYLGMSEALGIHEADMKKSLLDRFYGRLKKVLKSLLTGGNKVRAYNGWVMPVLMYSFGILKWTQRELEITDRKVRTLLTSYRMHHPRSSIMRLYIPRKCGGRGFLNAKTLHNREVYKIREYFRSTEVGMHRDVVAVDKGLTALSLAKENWRKPVVLTTNDRREIWQSKELHGHFYRALHGPDVDLEASLAWLRFGDLFGETEGFVCAIMDEVMMTNNYRKYILRDGTVDICRACHRPGESLRHIISGCSHLANGEYLHRHNQVAKIIHQQLALKYNLVDSEVPYYKYSPDPVLENGHVTLYWDRSIITDRCITANKPDIVLIDRLERRKMIVDITVPHDGNLVKAEKDKQIKYLDLAHEIVSMWDVDSAIIVPIVITTNGLMAKSLDQHLKRLSLDGWIKCLIQKAVLLETARIVRRFLSLGP

SEQ ID NO: 10398 - protein, 1198 aa, Apamea monoglypha
MLTRSAARRARLPSPDSSLSSASPPPVPSPTVSAVTTPAAVVASSSSDEYFSPPTTPPPARRRGGRRPPDGLGPRGPPASDRVPAPGGSVQRMRWTRSINENVMRSYYRATEGGNNLTAYRVRMLSLFQVLEPAVNVPAQRLSDQVRVIQRNHMLDDTVLDRLRSETQSSHVIAHQSQTAAVLPQANTSHADEGSNDRATNVSTQCNEELRNALEGAIREYRFMSPELRPRLPRLPMHNKNRALVAVLDAQLSSHFDACEDLTDTHSILYCAAVAACRVAHVKFASDSRATRPKPAIPAWQCRIERRIGGARALIGKLICFREGNTRPRVMRFVRRAFLGTDISSQDYLSRVTERIDFLKQEVYAWANRIRRYKRRVERYTQNRTFQSDERWVYRGWERPDQDVADTCLPDDDAMCSFWRSIWSAPVSHTEGDWAREVERACDPIPEMEAITICPQDVARAVRPLPNWKSPGPDGLHNFWIKWFSRSHARLASQFQTALESGSLPQFLTTGVTHLLHKSGSTADPRNYKPITCLPTVYKVLTSILRAKINKHIDSNSIMSVSQNGCRNGSRGTKELLLIDMAISQQVRRSRKDLSTCWIDYKKAYDSVPHTWLMRVLDLYKVDATLRTFLMSCMGQWRTVLRYPGCRNIQKNSEPIRIERGIFQGDSLSPLWFCLALNPLSTLLEDSGLGYRLRRGGQVISHLLYMDNLKLFAPNNLQLMELLKVTETFSSAIRMEFGVDKCAVMHIKRGEIVESVGTQLSDCTNLRALSVSETYKYLGMSEALGINVTDMKQSLKERFFGRLKKGLNSLLSGGNKVRAFNSWVMPVLMYSFGILKWTQTELDALDRRVRTLLTTNRMHHPRSSVMRLYIPRKCEGRGFLNAKTLHNREICSLREYFLETDVGMHRDVVAVDKGLTPLSLAKENWRKPVVLEINDRMEVWQSKELLGRFYRALHGPDVDLLASVAWLRFGDLFGESEGFVCAIMDEVMMTNNYRRFIVKDGTVDICRACHRSGESIRHIISGCSRLANGEYLHRHNRVARIIHQQFALKYSLVESEVPYYRYVPDPVLENGNITLYWDRSIITDRTIVANKPDIVVVDRSERRAMIVDITVPHDENLVKAEKDKQIQYLDLAREVVDMWDVDSAIIVPIVVTANGLIAKSLDQQLRRLSLGSWIKSLIQKAVLLDTARIVRRFLSLEP

SEQ ID NO: 10399 - protein, 1032 aa, Apamea monoglypha
MQSSHVIAPQSQTAAVLPQSNTSHADEGSNDRATNVSIQCNEELRNALEGAIREYRFMSPELRPRLPRLPMHNKNRALVAVLDAQLSSYFDVCEDLTDTHSILYCAAVAACRVAHVKFASYSRVTRPKPAIPPWQCRIERRIGGARALIGKLICFREGNTRPRVMRFVRRAFSGTDISSQDYLSRVTERIDFLKQKVYAWANRIRRYKRRVDRYTQNRTFQSDERWVYRGWERPDQGVADTCLPDDDAMYSFWRSIWSVPVSHTEGDWAREVERACDPIPEMEAITICAQDVARAVRPLPNWKSPGPDGLHNFWIKWLTRSHARLASQFQIALESGSLPQFLTTGVTHLLHKSASTAEPKNYRPITCLPTVYKVLTSILRAKINKHIDTNSIMSASQNGCKNGSRGTKELLLVDMAISQQVRRSRKHLSTCWIDYKKAYDSVPHTWLMRVLDLYKVDATLRTFLMSCMGQWRTVLRYPGCRNIQRNSEPIRIERGIFQGYSLSPLWFCLALNPLSTLLEDSGLGYRLRRGGQVISHLLYMDDLKLFAPNNLQLMELLKVTETFSSAIRMEFGVDKCAVMHVKRGEIVESVGAQLSDSTNLRALSVSETYKYLGMSEALGVNVTDMKQSLKERFFGRLKKVLNSLLSGGNKVRAFNSWVMPVLMYSFGILKWTQTELDALDRRVRTLLTANRMHHPRSSVMRLYIPRKCGGRGFLNAKTLHNREICSLREYFLETDVGMHRDVVAVDKGLTPLSLAKENWRKPVVLDTNDRMEVWQSKELHGRFYRALHGPDVDLLASVAWLRFGDLFGETEGFVCAIMDEVMMTNNYRRFIVKDGTVDICRACHRPGESIRHIISGCSRLANGEYLHIHNLVARIIHQQLALKYSLVESEVPYYRYVPDPVLENGNITLYWDRSIITDRTIVANKPDIVVVDRSERRAMIVDITVPHDENLVKAEKDKQIKYLDLAREVVDMWDVDSAVIVPIVVTANGLIAKSLDQHLRRLSLGSWIKGLIQKAVLLDMARIVRRFLSLEP

SEQ ID NO: 10400 - protein, 1200 aa, Apamea monoglypha
MMMLTRSAVRRARPPPPDSSLSSASPPPVPNLTVSAVTTPAAVVASSSSDEYFSPPTTPPPARRRGGRRPPDGLGPRGPPASDRVPALGGSVQRMRWTQSINENVMRSYYGATEGGNNLTAYRVRMLSLFQVLEPAVNVTAQRLSDQVRVIQRNHMLDDTVLDRLRNEMQSSHVIAPQSQTAAVLPQSNTSHADEASNDRATNVSIQCNEELRNALEGAIREYRFMSPELRPRLPRLPMHNKNRALVAVLDAQLSSYFDVCEDLTDTHSILYCAAVAACRVAHVKFASDSRATRPKPAIPPWQCRIERRIGGARALIGKLICFREGNTRPRVMRFVRRAFSGTDISSQDYLSHVTERIDFLKQKVYAWANRIRRYKRRVDRYTQNRTFQSDERWVSRGWERPDQGVADTCLPDDDAMYSFWRSIWSVPVSHTEGDWAREVERACDPIPEMEAITICAQDVARAVRPLPNWKSPGPDGLHNFWIKWFTRSHARLASQFQIALESGSLPQFLTTGVTHLLHKSASTAEPKNYRPITCLPTVYKVLTSILRAKINKHIDTNSIMSASQNGCKNGSRGTKELLLIDMAISQQVRRSRKDLSTCWIDYKKAYDSVPHTWLMRVLELYKVDTTLRTFLMTCMGQWRTVLRYPGCRNIQRNSEPIRIERGIFQGDSLSPLWFCLALNPLSTLLEDSGLGYRLRRGGQVISHLLYMDDLILFAPNNLQLMELLKITETFSSAIRMEFGVDKCAVMHVKRGEIVESVGTQLSDSTNLRALSASETYKYLGMSEALGINVTDMKQSLKERFFGRLKKVLNSLLSGGNKVRAFNSWVMPVLMYSFGILKWTQTELDALDRRVRTLLTANRMHHPRSSVMRLYIPRKCGGRGFLNAKTLHNREICSLREYFLETDVGMHRDVVAVDKGLTPLSLAKENWRKPVVLDTNDRLEVWQSKELHGRFYRALHGPDVDLLASVAWLCFGDLFGETEGFVCAIMDEVMMTNNYRRFIVKDGTVDICRACHRPGESIRHIISGCSRLANGEYLHRHNLVARIIHQQLALKYSLVESEVPYYRYVPDPVLENGHITLYWDRSIITDRTIVANKPDIVVVDRSERRAMIVDITVPHDENLVKAEKDKQIKYLDLAREVVDMWDVDSAIIVPIVVTANGLIAKSLDQHLRRLSLGSWIKGLIQKAVLLDTARIVRRFLSLEP

SEQ ID NO: 10401 - protein, 962 aa, Apamea monoglypha
MHNKNRALVAVLDAQLSSHFDACEDLTDTHSILYCAAVAACRVAHVKFDSDSRATRPKPAIPAWQCRIERRIGGARALIGKLICFREGNTRPRVMRFVRRAFLGTDISSQDYLSRVTERIDFLKQKVYAWANRIRRYKRRVERYTQNRTFQSDERWVYRGWERPDQSVADTCLPDDDAMCSFWRSIWSAPVSHTEGDWTGKIERACELIPEMGAITICPQDVARAVRPLPNWKSPGPDGLHNFWIKWFQRSHAPLAAQFQSALESGLLPQFITTGITHLLHKSGSTADPKNYRPITCLPTIYKVLTSILRAKINKHIDSNSIMSISQNGCRNGSRGTKELLLIDMAISQQVRRSRKDLSTCWMDYKKAYDSVPHTWLMRVLELYKVDTTLRTFLMTCMGQWRTVLRYPGCRNIQRNSEPIRIERGIFQGDSLSPLWFCLALNPLSTLLDDSGLGYRLRRGGQVISHLLYMDDLKLFAPNNLQLMKLLKITETFSSAIRMEFGVDKCAVMHVKRGEIVESVGTQLSDFTNLRALSAAETYKYLGMSEALGINVTDMKQSLKERFFGRLKKVFNSLLSGGNKVRAFNSWVMPVLMYSFGILKWTQTELEALDRRVRTLLTANRMHHPRSSVMRLYIPRKCGGRGFLNAKTLHNREICSLREYFLETDVGMHRDVVAVDKGLTPLSLAKENWRKPVVLDTNDRMEVWQSKELHGRFYRALHGPDVDLLASVAWLRFGDLFGETEGFICAIMDEVMMTNNYRRYIVKDGTVDICRACHRPGESIRHIISGCSRLANGEYLHRHNLVARIIHQQLALKYSLVESEVPYYRYVPDPVLENGNITLYWDRSIITDRTIVANKPDIVVVDRSERRAMIVDITVPHDENLVKAEKDKQIKYLDLAREVVDMWDVDSAIIVPIVVSANGLIAKSLDQHLRRLSLGSWIKGLIQKAVLLDTARIVRRFLSLEP

SEQ ID NO: 10402 - protein, 1200 aa, Apamea monoglypha
MMMLTRSAARRARPPPPDSSLSSASPPPVPSLTVSAVTTPAAVVASSSSDEYFSPPTTPPPARRRGGRRPPDGLGPRGPLASDRVPALGGSVQRMRWTQSINENVMRSYYGATEGGNNLTAYRVRMLSLFQVLEPAVNVTAQRLSDQVRVIQRNHMLDDTVLDRLRNEIQSSHVIAPQSQTAAVLPQSNTSHADEGSNDRATNVSIQCNEELRNALEGAIREYRFMSPELRPRLPRLPMHNKNRALVAVLDAQLSSYFDVCEDLTDTHSILYCAAVAACRVAHVKFVSDSRATRPKPAIPPWQCRIERRIGGARALIGKLICFREGNTRPRVMRFVRRAFSGTDISSQDYLSRVTERIDFLKQKVYAWANRIRRYKRRVDRYTQNRTFQSDERWVYRGWERPDQGVADTCLPDDDAMYSFWRSIWSVPVSHTEGDWAREVERACDPIPEMEAITICAQDVARAVRPLPNWKSPGPDGLHNFWVKWLTRSHARLASQFQIALESGSLPQFLTTGVTHLLHKSASTAEPKNYRPITCLPTVYKVLTSILRAKINKHIDTNSIMSASQNGCKNGSRGTKELLLIDMAISQQVRRSRKDLSTCWIDYKKAYDSVPHTWLMRVLELYKVDTTLRTFLMTCMGQWRTVLRYPGCRNIQRNSEPIRIERGIFQGDSLSPLWFCLALNPLSTLLEDSGLGYRLRRGGQVISHLLYMDDLKLFAPNNLQLMELLKITETFSSAIRMEFGVDKCAVMHVKRGEIVESVGTQLSDSTNLRALSASETYKYLGMSEALGINVTDMKQSLKERFFGRLKKVLNSLLSGGNKVRAFNSWVMPVLMYSFGILKWTQTELDALDRRVRTLLTANRLHHPRSSVMRLYIPRKCGGRGFLNAKTLHNREICSLREYFLETDVGMHRDVVAVDKGLTPLSLAKENWRKPVVLDTNDRMEVWQSKELHGRFYRALHGPDVDLLASVAWLRFGDLFGETEGFVCAIMDEVMMTNNYRRFIVKDGTVDICRACHRPGESIRHIISGCSRLANGEYLHRHNLVARIIHQQLALKYNLVESEVPYYRYVPDPVLENGNITLYWDRSIITDRTIVANKPDIVVVDRSERRAMIVDITVPHDENLVKAEKDKQIKYLDLAREVVDMWHVDSAIIVPIVVTANGLIAKSLDQHLRRLSLGSWIKGLIQKAVLLDTARIVRRFLSLEP

SEQ ID NO: 10403 - protein, 1192 aa, Furcula furcula
MLTRLKARLRPPDSSPRSASQPPADPPAAVASSESDEYFSPPSSPPPVCRRRGRPPRDLELLGQPAPNRVLVPGGVVRRMKWTLSINENVMRAYYEATEGGTNPTAYRDRMLSLFQALEPAVNVSAQRLSDQVRAIQRGHMLDDAVLDRLRSEVQGSRVVPCIPSSQAVAPAVNTAPAPRLAATSGDDRDDMSTNISTNVSTQLRSTLEDVVREYRTMPQGLRPRLPRLPMHKRNRALVCALDSLLSSYFDSSEDLADAHSLLYCAAMTACRVARVKFPNSDAATRPRPAVPAWQCRIERRIGEARVLIGKLTCFREGNTRPRVMRFVRRAFSGTGIDPREYFSRVTERIDFLKQKVCAWANRIRRYRARVDRYSQNNMFQRDQRWVYRSWERPSQIGGEVQRPDDDAMIRFWRNIWSVPVTHSEGDWIRDVKQVCEPIPEMGAITIRPQDVADAVRPLPNWKAPGPDGLHNFWLKWLRSSHACLASLFQSAVESGSLPEFLTTGITHLLHKTNSTADPKNYRPITCLPTVYKTLTSILRAKIYRHVEGNSIMSASQNGCRSGARGTKELLLIDMAICQQARRNRKDLSTCWIDYKKAYDSVPHTWLMRVLELYKVNTTLRTFLASCMRQWRTVLLYPGSRQTLGDGEPIRIERGIFQGDSLSPLWFCLALNPLSTLLKGSGLGCRLRRGGQVISHLLYMDDLKLFAPTEPQLMGLLKVTETFSNSIRMGFGVDKCAVMHVKRGRLVESRSVQLSDSIDLRTLSATETYKYLGMSQALGINETDMKQSLRERFLGRLRKVLKSFLSGGNRVRAYNGWVMPVLMYSFGILKWTQTELDTLDRTVRTLLTTYRMHHPRSSVMRLYIPRKCGGRGFLNAKTLHNREICNLREYFLHCSGEMHTDVVAVDNGLTPLSLAKGNWRKPVVLTTGDREAVWQSKELHGRFYRALHGPDVDFSASVAWLRFGDLFGETEGFVCAIMDEVVMTNNYRKYILRDGTIDICRACHRPGESLRHIISGCSRLANGEYLHRHNQVARIIHQQLALKYRLVTSEVPYYRYVPEPVLEDGHITLYWDRSIITDRTIVANKPDIVLIDRTERYAMIVDVTVPHDENLVKAEKDKECKYLDLAHEVVDMWDIDRAIIVPIVVSAHGLMAKSLDKHLKRLTLDDWIKGQMQKAVLLETARIVRKFLSLEP

SEQ ID NO: 10404 - protein, 1196 aa, Furcula furcula
MLTRNKARMRPPGSPPRSASQSSRLNAEADGTPAAVASSESDEYFSPPTSPPPVCRRRGRPPRDMGRLGQPAPNRVLAPGGVVRRMKWTSSINESVMRAYYEATEGGTNLTAYRNRMLSLFQALEPAVNVSAQRLSDQVRAIQRGHMLNGPVLDRLRSEVQGSRVAPCIPSSQAVAPVVNTALVLRLAANSDDDRDDMTTDVSTNVSTQLRSTLEDVVREYRTMPQSLRPRLPRLPMHRRNRALVCALDSLLSSYFDSSEDLADAHALLYCAAITACRVARVKFPDAATRSKPAVPAWQYRIERRIGEARVLIGKLTCFREGNTRPRVMRFVRRAFSGTGIDPREYLSHVTERIDFLKQKVCAWANRVRRYRARVDRYSQNNMFQRDQRWVYRSWERPSQTAGEVQRPDDDAMIRFWRNIWSVPVAHSEGDWIGDVEEVCEPLPEMGPITIGPQDVADAVRPLPNWKAPGPDGLHNFWLKWLPSSHVCLASLFQSALESGSLPEFMTTGITHLLHKTDSTTNPKNYRPITCLPTVYKTLTSILRAKIYRHVEDNSIMSSCQNGCRSGARGTKELLLIDMAICQQARRNRKDLSTCWIDYKKAFDSVPHTWLMRVLELYKVNTTLRTFLASCMRRWRTVLLYPGSRQTLGNGDPIRIERGIFQGDSLSPLWFCLALNPLSTLLKSSGLGCRLRRGGQVISHLLYMDDLKLFAPTELQLTGLLKVTETFSNSIRMEFGVDKCAVMHVKRGRMVESRSVQLSDSTDLRTLSATETYKYLGMSQALNINETGMKQSLRERFLGRLRKVLKSLLSGGNRVRAYNGWVMPVLMYSFGILKWTQTELDALDRTVRTLLTTYRMHHPRSSVMRLYIPRKCGGRGFLNAKTLHNREIYNLREYFLHCGGEMHTDVVAVDNGLTPLSLAKGNWRKPVVLTTGDREAVWQSKELHGRFYRALHGPDVDFSASVAWLRFGDLFGETEGFVCAIMDEVVMTNNYRKYILRDGTIDICRACHRPGESLRHIISGCSRLANGEYLHRHNQVARIIHQQLALKYRLVTSEVPYYRYVPEPVLEDGHITLYWDRSIITDRTIVANKPDIVLIDRTERRAMIVDVTVPHDENLVKAEKDKQCKYLDLAHEVVDMWDIDNAIIVPIVVSAHGLMAKSLDKHLKRLTLDGWIKGQMQKAVLLETARIVRKFLSLEP

SEQ ID NO: 10405 - protein, 1111 aa, Spodoptera exigua
MRWTQPINENVMRAYYGATEGGNNLTAYRVRMLSLFQVLEPAINVSAQRLSDQVRVIQRNRMLDNTVLDRLRTEMGSCAGTSSSRTVAPAMMPPSNRGIVSTAADEESTDTVTHVSTQCNDELRSALECAIREYRYMSPEIRPRLPRLPMHNKNRVLVAALDSQLSNHFDDCEDLSDTHSMMYCAAVAACRVAHVKFPTSDVATRLKPAVPAWQRRIERRIAGARALIGKLICFREGNTRPRVMRFVRRAFSGTDISPQDYMSRVTERIDFLKQKVYAWANRIRRYKRRVQRYTQNRTFRSNERWVYRAWERPDQGVTDTRLPDDDAMCSFWRSIWSVPVSHTEGDWIREVKRACDPIPQMGAINISPQDVARAVRPLPNWKSPGPDGLHNFWIKWFTRSHARLASQFQAALESGSLPQFLTTGVTHLLHKSGSTTEPKNYRPITCLPTVYKVLTSILRSKINSHIDKNNIMSTAQNGCKSGSRGTKELLLIDMTISQQVRRSRKDLSTCWIDYKKAYDSVPHTWLMRVLELYKIDTKLRTFLMSCMRQWSTVLRYPGCRHIQTNSETVRIERGIFQGDSLSPLWFCLALNPLSTLLENSGLGYRLKRGGQVISHLLYMDDLKLFAPNRLQLMELLKLTETFSSAIRMEFGVDKCAVMHVKRGEIVESVGTQLTDSINLRSLSPTETYKYFGMSEALGINVTDMKQSLRERFFGRLKKVLNSFLSGGNKVRAFNDWVMPVLMYSFGVLKWSQTELDTLDRRVRTMLTAYRMHHPRSSVMRLYIPRKCGGRGFLNAKTLHNREVCSLREYFLAADVGMHRDVVAVDKRLTPLSLASENWRKPVVLDTNARREVWQSKELHGRFFRALHGPDVDQLASVSWLRSGDLFGETEGFVCAIMDEVIMTNNYRRFIVKDGTADICRACHRPGESIRHIISGCSRLANGEYLHRHNLVARIIHQQLALKYSLVGSEVPYYRYEPDPVLENGHITLYWDRSIITDRTIVANKPDIVVVDRNERRAMIVDIAVPHDENLVKAEKDKLIKYIDLAREVVDMWDVDSAVIVPIVVSANGLIAKSLDQHLRRLSLGGWIKGLIQKVVLLDTARIVRRFLSLEP

SEQ ID NO: 10406 - protein, 1202 aa, Spodoptera exigua
MLTRAAARRARPPPPASSLSSASPPPESSPTVSDVTPAVAAASSSSDEYYSPPTTPPPTRRRGGRRPPARLGPRGPPASDRVPAVGGSVQRMRWTQAINENVMRAYYGATEGGNNLTAYRVRMLSLFQVLEPAVNVSAQRLSDQVRVIQRNRMLDDTVLDRLQTEMGSRASASSSRTVVPATLPLTSHGIVSTVADEESTDTVAHVSTQCIDELRSALECAIREYRYISPELRPRLPRLPMHNKNKALVAALDSQLSNYLDDCEDLGDTHSIMYCAAVAACRVAHVKFPTNDVTTRPKPAVPAWQRRIECRIAGARALIGKLICFREGNTRPRVMRFVRRAFSGTDISPRDYMSRVTERIDFLKQKVYAWANRIRRYRRRVERYTQNRTFRSNERWVYRTWERPDHCVTDKRLPDEDAMCSFWRSIWSVPVSHTEGDWIRDVERACDPIPQMGTINISPQDVARAVRPLPNWKSPGPDGLHNFWIKWLTRAHARLASQFQSAVESGSLPKFLTTGVTHLLHKSGSTAEPKNYRPITCLPTVYKVLTSILRSKINSHIDKNKIMSTAQNGCKNGSRGTKELLLIDMAISQQVRRSRKDLSTCWIDYKKAYNSIPHTWLMRVLELYKIDTILRTFLMSCMRQWSTVLRYPGCRHTQRNSEPVRIERGIFQGDCLSPLWFCLALNPLSTLLENSGLGYRLKRGGQVISHLLYMDDLKLFAPNKLQLMELLKLTETFSSAIRMEFGVDKCAIMHVKRGEVVESVGTQLTDSINLRSLSPTETYKYLGMSETLGINVTDMKQSLKERFFSRLKKVFNSFLSGGNKVRAFNGWVMPVLMYSFGVLKWSQTELDALDRQVRTMLTAYRMHHPRSSVMRLYIPRKCGGRGFLNAKTLHNREVCSLREYFLAVDVDMHRDVVAVDKGLTPLSLAIENWRKPVVLDTNTRREVWQSKELHGRFFRALHGPDVDQVASVAWLRFGDLFGETEGFVCAIMDEVIMTNNYRRFIVKDGTVDICRACHRPGESIRHIISGCSRLANGEYLHRHNLVARIIHQQLALKYSLVESEVPYYRYEPDPVLDNGHITLYWDRSIITDRTIVANKPDIVVVDRKERRAMIVDIAVPHDENLVKAEKDKLIKYIDLAREVVDMWEVDSAIIVPIVVSANGLIAKSLDQHLRRLSLGGWIKGLIQKVVLLDTARIVRRFLSLEP

SEQ ID NO: 10407 - protein, 1205 aa, Amphipyra berbera
MLTRSRAKALTETTRPRSSAPSLSSASQPPDSSIVSDVTPAAAVASSSSDEYFSPPTSPPPARRRGRGRPPDSLRPRGPLASDRVPAAGGSVQRMRWTPTMNENCMRAYFGATEGGTNLTAYRGRMLSLFQVLEPTVNVSAQRLSDQVRVIQRDHRLTDAALDRLRSEVQSNAIISLQSQTAAQPRTPTVVPPLPTHANEESDDRVTNVSTQCNEQLRSALELAIREYRFTPPNIRPRIPRLPMHRKNRALMCALDSLLSSYFDNSENLEDTHSILYCAAVAACRVAHAKFDNNDKATRPKPAVPAWQCRIERRINEARALIGKLICFREGNTRPRVMRFVRRAFSGTDINPRDYMSRVTERIDFLKQKVYAWANRIRRYKRRVERYTQNRMFHSDERWVYRTWERPDHDVSDAHPPDNDVMNTFWRNIWSMPVTHTEGDWMQEVQRACEPIKEMGDITIVPQDVTSAVRPMANWKSPGPDGLHNFWIKWLRSSHARLASQFQSSLESGSLPEFLTTGVTHLLHKSGSTAEPKNYRPITCLPTVYKLLTSILRAKINSHILYNSIMSVSQNGCKNGSRGTKELLLIDMAISQQVRRSRKDLSTCWIDYKKAYDSVPHTWLMRVLELYKVNTTLCAFLTSCMGQWRTVLHYPGCRQIQGRGEPIRIERGIFQGDSLSPLWFCLALNPLSTLLEGSGLGYRLRRGGQVISHLLYMDDLKLFAPNNLQLMKLLKVTETFSNSIRMEFGVDKCAVMHVKRGGIMESVGTQLSDSIHLRSLSSTETYKYLGMSETLGINETDMKQSLRERFYGRLIKVLKSLLSGGNKVRAFNGWVMPVLMYSFGILKWTQTELDALDRRVRTLLTAYRMHHPRSSVMRLYIPRKCGGRGFLNAKTLHNREVCSLREYFLQADVGMHRDVVAVDKGFTPLSLAKENWRKPVVLDTNGRREVWQSKELHGRFYRALHGPDVDFLASVAWLRFGDLFGETEGFVCAIMDEVMMTNNYRKYIVKDGTVDICRACHCPGESIRHIISGCSRLANGEYLHRHNLVARIIHQQLALKYNLVDAEVPYYKYVPDPVLENGHITLYWDRSIITDRTIVANKPDIVVIDRTERLTMIVDITVPHDENLVKAEKDKEIKYQDLAHEVVDMWEVDSAVIVPIVVTANGLIAKSLDHHLTRLSLGSWVKGLIQKAVLLDTARIVRKFLSLRP

SEQ ID NO: 10408 - protein, 1080 aa, Amphipyra berbera
MLSLFQVLEPAVNVSAQRLSDQVRVIQRDHRLTDVALDRLRSEVQSNRIISPQSQTAAQPRAPTVVPPPPIHADEESNDRVTNVSTQCNEQLRSALELAIREYRFTPPNLRPRIPRLPMHRKNRALMCALDSLLSSYFDNSENLEDTHSILYCAAVVACRVAHAKFDNNDRATRPKPTVPAWQCRIERRINEARALIGKLICFREGNTRPRVMRFVRRAFSGTDINPRDYMSRVTERIDFLKQKVYAWANRIRRYKRRVERYTQNRMFHSDERRVYRTWERPDHDVSDTHLPDNDVMNTFWRNIWSMPVTHTEGDWMQEVQRACEPIEEMGDITIVPQDVTSAVRPMANWKSPGPDGLHNFWLKWLRSSHARLASQFQSSLESGSLPQFLTTGVTHLLHKSGSTAEPKNYRPITCLPTVYKLLTSILRSKISKHIANNSIMSFSQNGCKNGSRGTKELLLIDMAISQQVRRSRKNLSTCWIDYKKAYDSVPHTWLMRVLELYKVNTTLCAFLTSCMGQWRTVLHYPGCRQIQGRGEPIRIERGIFQGDSLSPLWFCLALNPLSTLLEGSGLGYRLRKGGQVISHLLYMDDLKLFAPNNLQLMKLLKVTETFSNSIRMEFGVDKCAVMHVKRGGIMESVGTQLSDSIHLRSLSSTETYKYLGMSEALGINETDMKQSLRERFYGRLKKVLKSLLSGGNKVRAFNGWVMPVLMYSFGILKWTQTELDALDRRVRTLLTAYRMHHPRSSVMRLYIPRKCGGRGFLNAKTLHNREVCSLREYFLQADVGMHRDVVAVDKGFTPLSLAKENWRKPVVLDTNGRREVWQSKELHGRFYRALYGPDVDFLASVAWLRFGDLFGETEGFVCAIMDEVMMTNNYRKYIVKDGTVDICRACHCPGESIRHIISGCSRLANGEYLHRHNLVARIIHQQLALKYNLVDAEVPYYKYVPDPVLENGHITLYWDRSIITDRTIVANKPDIVVIDRSERLAMIVDITVPHDENLVKAEKDKEIKYQDLAHEVVDMWEVDSAVIVPIVVTANGLIAKSLDQHLMRLSLGSWVKGLIQKAVLLDTARIVRKFLSLRP

SEQ ID NO: 10409 - protein, 1205 aa, Amphipyra berbera
MLTRSRAKALTETTRPRSSAPSLSSASQPPDSSIVSDVTPAAAVASSSSDEYFSPPTSPPPARRRGRGRPPDRLRPRGPLASDRVPAAGGSVQRMRWTPTMNENCMRAYFGATEGGTNLTAYRGRMLSLFQVLEPTVNVSAQRLSDQVRVIQRDHRLTDAALDRLRSEVQSNAIISLQSQTAAQPRTPTVVPPLPTHGNEESDDRVTNVSTQCNEQLRSALELAIQEYRFTPPNIRPRIPRLPMHRKNRALMCALDSLLSSYFDNSENLEDTHSILYCAAVAACRVAHAKFDNSDKATRPKRAVPAWQCRIERRINEARALIGKLICFREGNTRPRVMRFVRRAFSGTDINPRDYMSRVTERIDFLKQKVYAWANRIRRYKRRVERYTQNRMFHSDERWVYRTWERPDHDVNDTHPPDNDVMNTFWRNIWSMPVTHTEGDWMQEVQRACEPIEEMGDITIVPQDVTSAVRPMANWKSPGPDGLHNFWIKWLRSSHARLASQFQSSLESGSLPEFLTTGVTYLLHKSGSTAEPKNYRPITCLPTVYKLLTSILRAKINSHIINNSIMSVSQNGCKNGSRGTKELLLIDMAISQQVRRSRKDFSTCWIDYKKAYDSVPHTWLMRVLELYKVNTTLCAFLTSCMGQWRTVLHYPGCRQIQGRGEPIRIERGIFQGDSLSPLWFCLALNPLSTLLEGSGLGYRLRRGGQVISHLLYMDDLKLFAPNNLQLMKLLKVTETFSNSIRMEFGVDKCAVMHVKRGGIMESVGTQLSDSIHLRSLSSTETYKYLGMSEALGINETDMKQSLRERFYGRLKKVLKSLLSGGNKVRAFNGWVMPVLMYSFGILKWTQTELDALDRRVRTLLTAYRMHHPRSSVMRLYIPRKCGGRGFLNAKTLHNREVCSLREYFLQADVGMHRDVVAVDKGFTPLSLAKENWRKPVVLDTNGRREVWQSKELHGRFYRALHGPDVDFLASVAWLRFGDLFGETEGFVCAIMDEVILTNNYRKYIVKDGTVDICRACHCPGESIRHIISGCSRLANGEYLHRHNLVARIIHQQLALKYNLVDAEVPYYKYVPDPVLENGHITLYWDRSIITDRTIVANKPDIVVIDRSERLAMIVDITVPHDENLVKAEKDKEIKYQDLAHEVVDMWEVDSAVIVPIVVTANGLIAKSLDQHLTRLALGSWIKGLMQKAVLLDTARIVRKFLSLRP

SEQ ID NO: 10410 - protein, 1202 aa, Amphipyra berbera
MLTRSRTRTTEQRSARPPPPDSPLSSASQPPELGLPVTPAAAASSSSSDEYFSPPTSPRPVRRQGRGRPPNSLGPRGPPAPSRVLAAGGYVQRMKWTQSINENVMRAYYGSTEGGTNLTAYRVRMLTLFQELEPAINVSAQRLSDQVRVIQRNHRLDDAALDRLRLEVQNSRAIPVPSQTAVHQLINVAPPRSDRVDGDEDDGAVTVSSQYNDRLRSALEDAIRECRANPESRPRLPRLPMHNKNRALVCALDSLLASYFESSEDLGDTHSILYCAAVAACRVANVKFNNSERATRPKLAVPAWQCRIERRIDETRALIGKLICFREGNTRPRVMRFVRRAFSGTGISPREYTSRATERIDFLKQKVCAWASRIRRYKRRVERYTQNRMFQCDQRWVYRAWERPDQSVSGGRLPDDDAMSSFWRSIWSVPVIHTEGDWMRDIERTCESIEEMGEIVISPQDVAGAVRPLPNWKSPGPDGLHNFWIKWLRSSHARLASQFQSSLESGSLPQFLTTGVTHLLHKSGSTAEPKNYRPITCLPTVYKLLTSILRSKINTHIGNNSVLSSSQNGCRNGSRGTKELLLIDTAISQQVRRSQKSLSTCWIDYKKAYDSVPHTWLMRVLELYKINTTLRTFLRSCMGQWRTVLRYPACQPIRRSGEPIRIERGIFQGDSLSPLWFCLALNPLSTLLEGSGLGYPLRRGGQVVSHLLYMDDLKLFAPTKLQLVDLLKVTETFSNSIRMEFGVDKCAVMHVRRGRIMESEGLQLSDSIHLSPLSANDTYKYLGMSEGLGISEADMKQSLRERFFGRLKKVLKSLLSGGNKVRAFNGWVMPVLMYSFGILKWTQTELDALDRRVRTLLTANRMHHPRSSVMRLYIPRKCGGRGLLNAKTLHNREVCSLREFFLHADAGMHRDVVAVDKGLTPLSLARENWRKPVVLSTNDRREIWQSKELHGRFYRALHGPDVDFLASVSWLRFGDLFGETEGFVCAIMDEVIMTNNYRKYIVKDGTVDICRACHCPGESLRHIISGCSRLANGEYLHRHNQVARIIHQQLALKYNLVESEVPYYRYVPDPVLENGRITLYWDRSIITDRTIVANKPDIVVIDRSERRTMIVDVTIPHDGNLVKAEKDKQIKYLDLAHEVVNMWDVESATIVPIVVTANGLMAKSLDKHLMRLSLGGWIKGLIQKAVLLDTARIVRRFLSLEP

SEQ ID NO: 10411 - protein, 1080 aa, Amphipyra berbera
MLSLFQVLEPTVNVSAQRLSDQVRVIQRDHRLTDAALDRLRSEVQSNAIISLQSQTAAQPRTPTVVPPLPTHGNEESDDRVTNVSTQCNEQLRSALELAIQEYRFTPPNIRPRIPRLPMHRKNRALMCALDSLLSSYFDNSENLEDTHSILYCAAVAACRVAHAKFDNSDKATRPKRAVPAWQCRIERRINEARALIGKLICFREGNTRPRVMRFVRRAFSGTDINPRDYMSRVTERIDFLKQKVYAWANRIRRYKRRVERYTQNRMFHSDERWVYRTWERPDHDVSDTHPPDNDVMNTFWRNIWSMPVTHTEGDWMQEVQRACEPIEEMGDITIVPQDVTSAVRPMANWKSPGPDGLHNFWIKWLRSSHARLASQFQSSLESGSLPEFLTTGVTHLLHKSGSTAEPKNYRPITCLPTVYKLLTSILRAKINSHIINNSIMSVSQNGCKNGSRGTKELLLIDMAISQQVRRSRKDLSTCWIDYKKAYDSVPHTWLMRVLELYKVNTTLCAFLTSCMGQWRTVLHYPGCRQIQGRGEPIRIERGIFQGDSLSPLWFCLALNPLSTLLEGSGLGYRLRRGGQVISHLLYMDDLKLFAPNNLQLMKLLKVTETFSNSIRMEFGVDKCAVMHVKRGGIMESVGTQLSDSIHLRSLSSTETYKYLGMSEALGINETDMKQSLRERFYGRLKKVLKSLLSGGNKVRAFNGWVMPVLMYSFGILKWTQTELDALDRRVRTLLTAYRMHHPRSSVMRLYIPRKCGGRGFLNAKTLHNREVCSLREYFLQADVGMHRDVVAVDKGFTPLSLAKENWRKPVVLDTNGRREVWQSKELHGRFYRALHGPDVDFLASVAWLRFGDLFGETEGFVCAIMDEVILTNNYRKYIVKDGTVDICRACHCPGESIRHIISGCSRLANGEYLHRHNLVARIIHQQLALKYNLVDAEVPYYKYVPDPVLENGHITLYWDRSIITDRTIVANKPDIVVIDRSERLAMIVDITVPHDENLVKAEKDKEIKYQDLAHEVVDMWEVDSAVIVPIVVTANGLIAKSLDQHLTRLALGSWIKGLMQKAVLLDTARIVRRFLSLRP

SEQ ID NO: 10412 - protein, 1205 aa, Amphipyra berbera
MLTRSRAKALTETTRPRSSAPSLSSASQPPDSSIVSDVTPAAAVASSSSDVYFSPPTSPPPARRRGRDRPPDSLRPRGPLASDRVPAAGGSVQRMRWTPTMNENCMRAYFGATEGGTNLTACRGRMLSLFQVLEPTVNVSAQRLSDQVRVIQRDHRLTDAALDRLRSEVQSNAIISLQSQTAAQPRTPTVVPSLPTHGNEESDDRVTNVSTQCNEQLRSALELAIQEYRFTPPNIRPRIPRLPMHRKNRALMCALDSLLSSYFDNSENLEDTHSILYCAAVAACRVAHAKFDNSDKATRPKRAVPAWQCRIERRINEARALIGKLICFREGNTRPRVMRFVRRAFSGTDINPRDYMSRVTERIDFLKQKVYAWANRIRRYKRRVERYTQNRMFHSDERWVYRTWERPDHDVNDTHPPDNDVMNTFWRNIWSMPVTHTEGDWMQEVQRACEPIEEMGDITIVPQDVTSAVRPMANWKSPGPDGLHNFWIKWLRSSHARLASQFQSSLESGSLPEFLTTGVTHLLHKSGSTAEPKNYRPITCLPTVYKLLTSILRAKINSHIINNSIMSVSQNGCKNGSRGTKELLLIDMAISQQVRRSRKDLSTCWIDYKKAYDSVPHTWLMRVLELYKVNTTLCAFLTSCMGQWRTVLHYPGCRQIQGRGEPIRIERGIFQGDSLSPLWFCLALNPLSTLLEGSGLGYRLRRGGQVISHLLYMDDLKLFAPNNLQLMKLLKVTETFSNSIRMEFGVDKCAVMHVKRGGIMESVGTQLSDSIHLRSLSSTETYKYLGMSEALGINETDMKQSLRERFYGRLKKVLKSLLSGGNKVRAFNGWVMPVLMYSFGILKWTQTELDALDRRVRTLLTAYRMHHPRSSVMRLYIPRKCGGRGFLNAKTLHNREVCSLREYFLQADVGMHRDVVAVDKGFTPLSLAKENWRKPVVLDTNGRREVWQSKELHGRFYRALHGPDVDFLASVAWLRFGDLFGETEGFVCAIMDEVILTNNYRKYIVKDGTVDICRACHCPGESIRHIISGCSRLANGEYLHRHNLVARIIHQQLALKYNLVDAEVPYYKYVPDPVLENGLITLYWDRSIITDRTIVANKPDIVVIDRSERLAMIVDITVPHDENLVKAEKDKEIKYQDLAHEVVDMWEVDSAVIVPIVVTANGLIAKSLDQHLTRLALGSWIKGLMQKAVLLDTARIVRKFLSLRP

SEQ ID NO: 10413 - protein, 1208 aa, Amphipyra berbera
MLTRSRAKAIAQNTRPRPSASSLSSASQPPDSSIVSDVTPAAAVASSSSDEYFSPPSTPPPPPPPRRRGRGRPPASLGPRGPPASDRVPAPGGSVQRMRWTPTMNENCMRAYFGATEGGTNLTAYRGRMLSLFQVLEPAVNVSAQRLSDQVRVIQRDHRLTDDALDRLRSEVQSNCIISLQSQTAAQPQVPPMVPPQPIRADEESDDRVTIVSAQCNEQLRSALELAIREYRFTPPNLRPRIPRLPMNRQNRALMCALDSLLSNYFDNSEGLEDTHSILYCAAVAACRVAHVKFDNNDRATRPKPAVPAWQCRIERRINEARALIGKLICFREGNTRPRVMRFVRRAFSGTDINPREYMSRVTERIDFLKQKVYAWANRIRRYKRRVERYTQNRMFHSDERWVYRTWERPEHDVSDTHLPDNDVMNTFWRNIWSMPVTHTEGDWMQEVQRACEPIEEMGDIIIVPQDVTSAVRPMVNWKSPGPDGLHNFWLKWLRSSHARLASQFQSSLESGSLPPFLTTGITHLLHKSGSTAEPKNYRPITCLPTIYKLLTSILRAKINTHIINNSIMSASQNGCKNGSRGTKELLLIDMAISQQVRRSRKDLSTCWIDYKKAYDSVPHTWLIRVLELYKVNTTLCAFLTSCMGQWRTVLHYPGCRQIQGRGESIRIERGIFQGDSLSPLWFCLALNPLSTLLEGSGLGYRLRRGGQVISHLLYMDDLKLFAPNNLQLMKLLKVTENFSNSIRMEFGVDKCAVMHVKRGGIMESVGTQLSDSIHLRSLSSTETYKYLGMSEALGINETDMKQSLRERFYGRLKKVLKSLLSGGNKVRAFNGWVMPVLMYSFGILKWTQTELDALDRRVRTLLTAYRMHHPRSSVMRLYIPRKCGGRGFLNAKTLHNREVCSLREYFLQADVGMHRDVVAVDKGFTPLSLAKENWRKPVVLDTNGRREVWQSKELHGRFYRALHGPDVDFLASVAWLRFGDLFGETEGFVCAIMDEVMMTNNYRKYIVKDGTVDICRACHCPGESIRHIISGCSRLANGEYLHRHNLVARIIHQQLALKYNLVDAEVPYYKYVPDPVLENGHITLYWDRSIITDRTIVANKPDIVVIDRTERLTMIVDITVPHDENLVKAEKDKEIKYQDLAHEVVDMWEVDSAVIVPIVVTANGLIAKSLDHHLTRLSLGSWVKGLIQKAVLLDTARIVRKFLSLRP

SEQ ID NO: 10414 - protein, 1205 aa, Amphipyra berbera
MLTRSRAKALTETTRPRSSAPSLSSASQPPDSSIVSDVTPAAAVASSSSDEYFSPPTSPPPARRRGRGRPPDSLRPRGPLASDRVPAAGGSVQRMRWTPTMNENCMRAYFGATEGGTNLTAYRGRMLSLFQVLEPTVNVSAQRLSDQVRVIQRDHRLTDAALDRLRSEVQSNAIISLQSQTAAQPRTPTVVPPLPTHGNEESDDRVTNVSTQCNEQLRSALELAIQEYRFTPPNIRPRIPRLPMHRKNRALMCALDSLLSSYFDNSENLEDTHSILYCAAVAACRVAHAKFDNSDKATRPKRAVPAWQCRIERRINEARALIGKLICFREGNTRPRVMRFVRRAFSGTDINPRDYMSRVTERIDFLKQKVYAWANRIRRYKRRVERYTQNRMFHSDERWVYRTWERPDHDVNDTHPPDNDIMNTFWRNIWSMPVTHTEGDWMQEVQRACEPIEEMGDITIVPQDVTSAVRPMANWKSPGPDGLHNFWIKWLRSSHARLASQFQSSLESGSLPEFLTTGVTHLLHKSGSTAEPKNYRPITCLPTVYKLLTSILRAKINSHIINNSIMSVSQNGCKNGSRGTKELLLIDMAISQQVRRSRKDLSTCWIDYKKAYDSVPHTWLMRVLELYKVNTTLCAFLTSCMGQWRTVLHYPGCRQIQGRGEPIRIERGIFQGDSLSPLWFCLALNPLSTLLEGSGLGYRLRRGGQVISHLLYMDDLKLFAPNNLQLMKLLKVTETFSNSIRMEFGVDKCAVMHVKRGGIMESVGTQLSDSIHLRSLSSTETYKYLGMSEALGINETDMKQSLRERFYGRLKKVLKSLLSGGNKVRAFNGWVMPVLMYSFGILKWTQTELDALDRRVRTLLTAYRMHHPRSSVMRLYIPRKCGGRGFLNAKTLHNREVCSLREYFLQADVGMHRDVVAVDKGFTPLSLAKENWRKPVVLDTNGRREVWQSKELHGRFYRALHGPDVDFLASVAWLRFGDLFGETEGFVCAIMDEVILTNNYRKYIVKDGTVDICRACHCPGESIRHIISGCSRLANGEYLHRHNLVARIIHQQLALKYNLVDAEVPYYKYVPDPVLENGHITLYWDRSIITDRTIVANKPDIVVIDRSERLAMIVDITVPHDENLVKAEKDKEIKYQDLAHEVVDMWEVDSAVIVPIVVTANGLIAKSLDQHLTRLALGSWIKGLMQKAVLLDTARIVRKFLSLRP

SEQ ID NO: 10415 - protein, 1106 aa, Noctua janthe
MRWTQSINANVMRAYYGATEGGNNLTAYRVRMLSLFQVLEPAVNVSAQRLSDQVRVIQRNGMLDDTVLDRLRTEMQSSHVIATPPQTVVPPQSTIIPTHDNNVSNDMVTNVSTQCNEEMRCALEGAIREYRFMQPDLRPRVPRLPMHNKNKVLVAVLDSQLSNYFDNCENLTDAHSVLYCAAVAACRVAHVKFSDDRATRPKPAVPSWQYRIERRIGEARALIGKLICFREGNTRPRVMRFVRRAFSGTDISARDYMSRVTERIDFLKQKVYAWANRIRRYKRRVDRYTQNRTFQRDERWAYRAWERPDQGVADTHLPDDDAMCSFWRSIWSVPVSHTEGEWTREVERACDLVPEMGAITISPQDVVRAVRPLPNWKSPGPDGLHNFWIKWFTRSHARLAILFQSALESGSLPEFLTTGITHLLHKSGSTAEPKNYRPIACLPTVYKVLTSILRAKINKHIDDNSVMSASQNGCRNGSRGTKELLLIDMAISQQVRRSRRDLSTCWIDYKKAYDSVPHTWLMRVLELYKVDSTLRIFLMSCMRQWRTVLRYPGCRQIQRNSEPIRIERGIFQGDSLSPLWFCLALNPLSTLLEDSGLGYRLRRGGQVISHLLYMDDLKLFAPNDLQLMELLKVTETFSSAIRMEFGVDKCAVMHVKRGEIVESVGTQLSDSINLRSLSATETYKYLGMSEALGINVADMKQSLKERFFGRLKKVFNSLLSGGNKVRAFNGWVMPVLMYSFGILKWTQTELDALDRRVRTLLTTYRMHHPRSSVMRLYIPRRCGGRGFLNAKTLHNREIYSLREYFLETDVGMHRDVVAVDKGLTPLSLAKENWRKPVVLDTNDRMEIWQSKELHGRFFRALHGPDVDLPASVAWLRSGDLFGETEGFVCAIMDEVMMTNNYRRFIVKDGTVDICRACHRPGESIRHIISGCSRLANGEYLHRHNLVARIIHQQLALKYNLVESEVPYYKYVPDPVLENGNITLYWDRSIVTDRTIVANKPDIVVVDRSERRAMIVDITVPHDGNLVKAEKDKLIKYLDLAHEVVDMWDVDSAIIVPIVVSAHGLIAKSLDQYLRRLSLGSWIKGLIQKAVLLDTARIVRRFLSLEP

SEQ ID NO: 10416 - protein, 997 aa, Noctua janthe
MVTNVSTQCNEEMRCALEGAIREYRFMQPDLRPRVPRLPMHNKNRVLVAVLDSQLSNYFDNCEDLTDAHSVLYCAAVAACRVAHVKFSDDRATPAVPSWQYRIERRIGEARALIGKLICFREGNTRPRVMRFVRRAFSGTDISARDYMSRVTERIDFLKQKVYAWANRIRRYKRRVDRYTQNRTFQRDERWVYRAWERPDQGVADTRLPDDDAMCSFWRSIWSVPVSHTEGEWTREVERACDLVPEMGAITISPQDVVRAVRPLPNWKSPGPDGLHNFWIKWFTRSHARLAILFQSALESGSLPEFLTTGITHLLHKSGSTAEPKNYRPITCLPTVYKVLTSILRAKINKHIDDNSVMSASQNGCRNGSRGTKELLLIDMAISQQVRRSRKDLSTCWIDYKKAYDSVPHTWLMRVLELYKIDATLRTFLMSCMGQWRTVLRYPGCRQIQRNSEPIRIERGIFQGDSLSPLWFCLALNPLSTLLEDSGLGYRLRRGGQVISHLLYMDDLKLFAPNDLQLMELLKVTETFSSAIRMEFGVDKCAVMHVKRGEIVESVGTQLSDSINLRSLSATETYKYLGMSEALGINVADMKQSLKERFFGRLKKVFNSLLSGGNKVRAFNGWVMPVLMYSFGILKWTQTELDALDRRVHTLLTAYRMHHPRSSVMRLYIPRRCGSRGFLNAKTLHNRVICSLREYFLETDVGMHRDVVAVDKGLTLLSLAKENWRKPVVLDTNDRMEVWQSKELHGRFFRALHGPDVDLSASVAWLRSGDLFGETEGFVCAIMDEVMMTNNYRRFIVKDGTVDICRACHRPGESIRHIISGCSRLANGEYLHRHNLVARIIHQQLALKYNLVESEVPYYKYVPDPVLENGSITLYWDRSIITDRTIVANKPDIVVVDRSERRAMIVDITVPHDENLVKAEKDKQIKYLDLAREVVDMWDVDSAIIVPIVVSAHGLIAKSLDQYLRRLSLGSWIKGLIQKAVLLDTARIVRRFLSLEP

SEQ ID NO: 10417 - protein, 1197 aa, Noctua janthe
MLTRSATRRARLSPPDPSLSSTSPPPESSPIVSAVTPAVAVASSSSDEYFSPPTTPPPVRRRGGRRPPDGLGPRGPPASDRVPAPGGSVPRMRWTQSINANVMRAYYGATEGGNNLTAYRVRMLSLFQVLEPAVNVSAQRLSDQVRVIQRNGMLDDTVLDRLRTEMQSSHVIATPPQTVVPPQSTIIPTHDNNVSNDMVTNVSTQCNEEMRCALEGAIREYRFMQPDLRPRVPRLPMHNKNKVLVAVLDSQLSNYFDNCENLTDAHSVLYCAAVAACRVAHVKFSDDRATRPKPAVPSWQYRIERRIGEARALIGKLICFREGNTRPRVMRFVRQAFSGTDISARDYMSRVTERIDFLKQKVYAWANRIRRYKRRVDRYTQNRTFQRDERWVYRAWERPDQGVADTHLPDDDAMCSFWRSIWSVPVSHTEGEWTREVERACDLVPEMGAITISPQDVVRAVRPLPNWKSPGPDGLHNFWIKWFTRSHARLAILFQSALESGSLPEFLTTGITHLLHKSGSTAEPKNYRPIACLPTVYKVLTSILRAKINKHIDDNSVMSASQNGCRNGSRGTKELLLIDMAISQQVRRSRRDLSTCWIDYKKAYDSVPHTWLMRVLELYKVDSTLRIFLMSCMGQWRTVLRYPGCRQIQRNSEPIRIERGIFQGDSLSPLWFCLALNPLSTLLEDSGLGYRLRRGGQVISHLLYMDDLKLFAPNDLQLMELLKVTETFSSAIRMEFGVDKCAVMHVKRGEIVESVGTQLSDSINLRSLSATETYKYLGMSEALGINVADMKQSLKERFFGRLKKVFNSLLSGGNKVRAFNGWVMPVLMYSFGILKWTQTELDALDRRVRTLLTTYRMHHPRSSVMRLYIPRRCGGRGFLNAKTLHNREIYSLREYFLETDVGMHRDVVAVDKGLTPLSLAKENWRKPVVLDTNDRMEVWQSKELHGRFFRALHGPDVDLPASVAWLRSGDLFGETEGFVCAIMDEVMMTNNYRRFIVKDGTVDICRACHRPGESIRHIISGCSRLANGEYLHRHNLVARIIHQQLALKYNLVESEVPYYKYVPDPVLENGNITLYWDRSIVTDRTIVANKPDIVVVDRSERRAMIVDITVPHDGNLVKAEKDKQIKYLDLAHEVVDMWDVDSAIIVPIVVSAHGLIAKSLDQYLRRLSLGSWIKGLIQKAVLLDTARIVRRFLSLEP

SEQ ID NO: 10418 - protein, 1197 aa, Noctua janthe
MLTRSATRRARLSPPDPSLSSASPPPESSPIVSAVTPAEAVASSSSDEYFSPPTTPPPVRRRGGRRPPDGLGPRGPPASDRVPAPGGSVPRMRWTQSINANVMRAYYGATEGGNNLTAYRVRMLSLFQVLEPAVNVSAQRLSDQVRVIQRNGMLDDTVLDRLRTEMQSSHVIATPPQTVVPPQSTIIPTHDNNVSNDMVTNVSTQCNEEMRCALEGAIREYRFMQPDLRPRVPRLPMHNKNKVLVAVLDSQLSNYFDNCENLTDAHSVLYCAAVAACRVAHVKFSDDRATRPNPAVPSWQYRIERRIGEARALIGKLICFREGNTRPRVMRFVRRAFSGTDISARDYMSRVTERIDFLKQKVYAWANRIRRYKRRVDRYTQNRTFQRDERWVYRAWERPDQGVADTHLPDDDAMCSFWRSIWSVPVSHTEGEWTREVERACDLVPEMGAITISPQDVVRAVRPLPNWKSPGPDGLHNFWIKWFTRSHARLAILFQSALESGSLPEFLTTGITHLLHKSGSTAEPKNYRPIACLPTVYKVLTSILRAKINKHIDDNSVMSASQNGCRNGSRGTKELLLIDMAISQQVRRSRRDLSTCWIDYKKAYDSVPHTWLMRVLELYKVDSTLRIFLMSCMGQWRTVLRYPGCRQIQRNSEPIRIERGIFQGDSLSPLWFCLALNPLSTLLEDSGLGYRLRRGGQVISHLLYMDDLKLFAPNDLQLMELLKVTETFSSAIRMEFGVDKCAVMHVKRGEIVESVGTQLSDSINLRSLSATETYKYLGMSEALGINVADMKQSLKERFFGRLKKVFNSLLSGGNKVRAFNGWVMPVLMYSFGILKWTQTELDALDRRVRTLLTTYRMHHPRSSVMRLYIPRRCGGRGFLNAKTLHNREIYSLREYFLETDVGMHRDVVAVDKGLTPLSLAKENWRKPVVLDTNDRMEVWQSKELHGRFFRALHGPDVDLPASVAWLRSGDLFGETEGFVCAIMDEVMMTNNYRRFIVKDGTVDICRACHRPGESIRHIISGCSRLANGEYLHRHNLVARIIHQQLALKYNLVESEVPYYKYVPDPVLENGNITLYWDRSIVTDRTIVANKPDIVVVDRSERRAMIVDITVPHDGNLVKAEKDKQIKYLDLAHEVVDMWDVDSAIIVPIVVSAHGLIAKSLDQYLRRLSLGSWIKGLIQKAVLLDTARIVRRFLSLEP

SEQ ID NO: 10419 - protein, 1197 aa, Noctua janthe
MLTRSAARRARLSPPDPSLSSASPPPESRPVVSAVTPAVAVASSSSDEYFSPPTTPPPVRRRGGRRPPDGLGPRGPPASDRVPAPGGSVPRMRWTQSINANVMRAYYGATEGGNNLTAYRVRMLSLFQVLEPAVNVSAQRLSDQVRVIQRNGMLDDTVLDRLRTEMQSSHVIATPPQTVVPPQSTIIPTHDNNVSNDMVTNVSTQCNDEMRCALEGAIREYRFMQPDLRPRVPRLPMHNKNRVLVAVLDSQLSNYFDNCEDLTDAHSVLYCAAVAACRVAHVKFSDDRATRPKPAVPSWQYRIERRIGEARALIGKLICFREGNTRPRVMRFVRRAFSGTDISARDYMSRVTERIDFLKQKVYAWANRIRRYKRRVDRYTQNRTFQRDERWVYRAWERPDQGVADTRLPDDDAMSSFWRSIWSVPVSHTEGEWTREVERACDLVPEMGAITISPQDVVRAVRPLPNWKSPGPDGLHNFWIKWFTRSHARLAILFQSALESGSLPEFLTTGITHLLHKSGSTAEPKNYRPITCLPTVYKVLTSILRAKINKHIDDNSVMSASQNGCRNGSRGTKELLLIDMAISQQVRRSRRDLSTCWIDYKKAYDSVPHTWLMRVLELYKVDSTLRIFLMSCMGQWRTVLRYPGCRQIQRNSEPIRIKRGIFQGDSLSPLWFCLALNPLSTLLEDSGLGYRLRRGGQVISHLLYMDDLKLFAPNDLQLMELLKITETFSSAIRMEFGVDKCAVMHVKRGEIVESVGTQLSDSINLRSLSATETYKYLGMSEALGINVADMKQSLKERFFGRLKKVFNSLLSGGNKVRAFNGWVMPVLMYSFGILKWTQTELDALDRRVRTLLTAYRMHHPRSSVMRLYIPRRCGGRGFLNAKTLHNREICSLREYFLETDVGMHRDVVAVDKGLTPLSLAKENWRKPVVLDTNDRMEVWQSKELHGRFFRALHGPDVDLPASVAWLRSGDLFGETEGFVCAIMDEVMMTNNYRRFIVKDGTVDICRACHRPGESIRHIISGCSRLANGEYLHRHNLVARIIHQQLALKYNLVESEVPYYKYVPDPVLENGSITLYWDRSIVTDRTIVANKPDIVVVDRSERRAMIVDITVPHDGNLVKAEKDKQIKYLDLAHEVVDMWDVDSAIIVPIVVSAHGLIAKSLDQYLRRLSLGSWIKGLIQKAVLLDTARIVRRFLSLEP

SEQ ID NO: 10420 - protein, 868 aa, Noctua janthe
MRFVRRAFSGTDISARDYMSRVTERIDFLKQKVYAWANRIRRYKRRVDRYTQNRTFQRDERWVYRAWERPDQGVADTRLPDDDAMCSFWRSIWSVPVSHTEGEWTREVERACDLVPEMGAITISPQDVVRAVRPLPNWKSPGPDGLHNFWIKWFTRSHARLAILFQSALESGSLPEFLTTGITHLLHKSGSTAEPKNYRPITCLPTVYKVLTSILRAKINKHIDDNSVMSASQNGCRNGSRGTKELLLIDMAISQQVRRSRRDMSTCWIDYKKAYDSVPHTWLMRVLELYKVDSTLRIFLMSCMGQWRTVLRYPGCRQIQRNSEPIRIERGIFQGDSLSPLWFCLALNPLSTLLEDSGLGYRLRRGGQVISHLLYMDDLKLFAPNDFQLMELLKVTETFSSAIRMEFGVDKCAVMHVKRGEIVESVGTQLSDSINLRSLSATETYKYLGMSEALGINVADMKQSLKERFFGRLKKVFNSLLSGGNKVRAFNGWVMPVLMYSFGILKWTQTELDTLDRRVRTLLTAYRMHHPRSSVMRLYIPRRCGGRGFLNAKTLHNREICSLREYFLETDVGMHRDVVAVDKGLTPLSLAKENWRKPVVLDTNDRMEVWQSKELHGRFFRALHGPDVDLPASVAWLRSGDLFGETEGFVCAIMDEVMMTNNYRRFIVKDGTVDICRACHRPGESIRHIISGCSRLANGEYLHRHNLVARIIHQQLALKYNLVESEVPYYKYVPDPVLENGSITLYWDRSIITDRTIVANKPDIVVVDRSERRAMIVDITVPHDENLVKAEKDKQIKYLDLAHEVVDMWDVDSAIIVPIVVSAHGLIAKSLDQYLRRLSLSSWIKGLIQKAVLLDTARIVRRFLSLEP

SEQ ID NO: 10421 - protein, 1197 aa, Noctua janthe
MLTRSAARRARLSLSDPSLSSASPPPESSPVVSAVTPAVAVASSSSDEYFSPPTTPPPVRRRGGRRPPDGLGPRGPPASDRVPAPGGSVPRMRWTQSINANVMRAYYGATEGGNNLTAYRVRMLYLFQVLEPAVNVSAQRLSDQVRVIQRNGMLDDTVLDRLRTEMQSSHVIATPPQTVVPPQSTIIPTHDNNVSNDMVTNVSTQCNEEMRCALEGAIREYRFMQPDLRPRVPRLPMHNKNRVLVAVLDSQLSNYFDNCEDLTDAHSVLYCAAVAACRVAHVKFSDDRATRPKPAVPSWQYRIERRIGEARALIGKLICFREGNTRPRVMRFVRRAFSGTDISARDYMSRVTERIDFLKQKVYAWANRIRRYKRRVDRYTQNRTFQRDERWVYRAWERPDQGVADTRLPDDDAMCSFWRSIWSVPVSHTEGEWTREVERACDLVPEMGAITISPQDVVRAVRPLPNWKSPGPDGLHNFWIKWFTRSHARLAIQFQSALQSGSLPEFLTTGITHLLHKSGSTAEPKNYRPITCLPTVYKVLTSILRAKINKHIDDNSVMSASQNGCRNGSRGTKELLLIDMAISQQVRRSRKDLSTCWIDYKKAYDSVPHTWLMRVLELYKIDATLCTFLMSCMGQWRTVLRYPGCRQIQRNSEPIRIERGIFQGDSLSPLWFCLALNPLSTLLEDSGLGYRLRRGGQVISHLLYMDDLKLFAPNDLQLMELLKVTETFSSAIRMEFGVDKCAVMHVKRGEIVESVGTQFSDSINLRSLSATETYKYLGMSEALGINVADMKQSLKERFFGRLKKVFNSLLSGGNKVRAFNGWVMPVLMYSFGILKWTQAELDALDRRVRTLLTAYRMHHPRSSVMRLYIPRRCGGRGFLNAKTLHNREICSLREYFLETDVGMHRDVVAVDKGLTPLSLAKENWRKPVVLDTNDRMEVWQSKELHGRFFRALHGPDVDLSASVAWLRSGDLFGETEGFVCAIMDEVMMTNNYRRFIVKDGTVDICRACHRPGESIRHIISGCSRLANGEYLHRHNLVARIIHQQLALKYNLVESEVPYYKYVPDPVLENGSITLYWDRSIITDRTIVANKPDIVVVDRSERRAMIVDITVPHDENLVKAEKDKQIKYLDLAREVVDMWDVDSAIIVPIVVSAHGLIAKSLDQYLRRLSLGSWIKGLIQKAVLLDTARIVRRFLSLEP

SEQ ID NO: 10422 - protein, 1199 aa, Noctua janthe
MLTRSAARRARLSPPDPSLSSASPPPESRPVVSAVTPAVAVASSSSDEYFSPPTTPPPVRRRGGRRPPDGLGPRGPPASDRVPAPGGSVPRMRWTQSINTNVMRAYYGATEGGNNLTAYRVRMLSLFQVLEPAVNVSAQRLSDQVRVIQRNGMLDDTVLDRLRTEMQSSHVIATPPQTVVPPQSTIIPTHDNNVSNDMVTNVSTQCNDEMRCALEGAIQEYRFMQPDLRPRVPRLPMHNKNRVLVAVLDSQLSNYFDNCEDLTDAHSVLYCAAVAACRVAHVKFSDDRATRPKPAVPSWQYRIERRIGEARALIGKLICFREGNTRPRVMRFVRRAFSGTDISARDYMSRVTERIDFLKQKVYAWANRIRRYKRRVDRYTQNRTFQRDERWVYRAWERPDQGVADTRLPDDDAMSSFWRSIWSVPVSHTEGEWTREVERACDLVPEMGAITISPQDVVRAVRPLPNWKSPGPDGLHNFWIKWFTRSHARLAILFQSALESGSLPEFLTTGITHLLHKSGSTAEPKNYRPITCLPTVYKVLTSILRAKINKHIDDNSVMSASQNGCRNGSRGTKELLLIDMAISQQVRRSRRDLSTCWIDYKKAYDSVPHTWLMRVLELYKVDSTLRIFLMSCMGQWRTVLRYPGCRQIQRNSEPIRIERGIFQGYSLSPLWFCLALNPLSTLLEDSGLGYRLRRGGQVISHLLYMDDLKLFAPNDLQLMELLKVTETFSSAIRMEFGVDKCAVMHVKRGEIVESVGTQLSDSINLRSLSATETYKYLGMSEALGINVADMKQSLKERFFGRLKKVFNSLLSGGNKVRAFNGWVMPVLMYSFGILKWTQTELDALDRRVRTLLTAFRMHHPRSSVMRLYIPRRCGGRGFLNAKTLHNREICSLREYFLEPDVGMHRDVVAVDKGLTPLSLAKENWRKPVVLDTNDRMEVWQSKELHGRFFRALHGPDVDLPASVAWLRSGDLFGETEGFVCAIMDEVMMTNNYRRFIVKDGTVDIRVCRACHRPGESIRHIISGCSRLANGEYLHRHNLVARIIHQQLALKYNLVESEVPYYKYVPDPVLENGSITLYWDRSIVTDRTIVANKPDIVVVDRSERRAMIVDITVPHDGNLVKAEKDKQIKYLDLAHEVVDMWDVDSAIIVPIVVSAHGLIAKSLDQYLRRLSLGSWIKGLIQKAVLLDTARIVRRFLSLEP

SEQ ID NO: 10423 - protein, 881 aa, Noctua janthe
MICFREGNTRPRVMRFVRRAFSGTDISARDYMSRVTERIDFLKQKVYAWANRIRRYKRRVDRYTQNRTFQRDERWVYRAWERPDQGVADTHLPDDDAMCSFWHSIWSVPVSHTEGEWTREVERACDLVPEMGAITISPQDVVRAVRPLPNWKSPGPDGLHNFWIKWFTRSHARLAILFQSALESGSLPEFLTTGITHLLHKSGSTAEPKNYRPIACLPTVYKVLTSILRAKINKHIDDNSVMSASQNGCRNGSRGTKELLLIDMAISQQVRRSRRDLSTCWIDYKKAYDSVPHTWLMRVLELYKVDSTLRIFLMSCMGQWRTVLRYPGCRQIQRNSEPIRIERGIFQGDSLSPLWFCLALNPLSTLLEDSGLGYRLRRGGQVISHLLYMDDLKLFAPNDLQLMELLKVTETFSSAIRMEFGVDKCAVMHVKRGEIVESVGTQLSDSINLRSLSATETYKYLGMSEALGINVADMKQSLKERFFGRLKKVFNSLLSGGNKVRAFNGWVMPVLMYSFGILKWTQTELDALDRRVRTLLTTYRMHHPRSSVMRLYIPRRCGGRGFLNAKTLHNREIYSLREYFLETDVGMHRDVVAVDKGLTPLSLAKENWRKPVVLDTNDRMEVWQSKELHGRFFRALHGPDVDLPASVAWLRSGDLFGETEGFVCAIMDEVMMTNNYRRFIVKDGTVDICRACHRPGESIRHIISGCSRLANGEYLHRHNLVARIIHQQLALKYNLVESEVPYYKYVPDPVLENGNITLYWDRSIVTDRTIVANKPDIVVVDRSERRAMIVDITVPHDGNLVKAEKDKQIKYLDLAHEVVDMWDVDSAIIVPIVVSAHGLIAKSLDQYLRRLSLGSWIKGLIQKAVLLDTARIVRRFLSLEP

SEQ ID NO: 10424 - protein, 1048 aa, Mythimna ferrago
MLDDTVLDRLRTEMSDRVITAPSQPVVPVVAPPPSHISFHTDEVSTDTVTNVSTQCNNELRSALECAIREYRNMPLEFRPRLPRLPMRNKNKALVAALDSQLSNYFDDCEDLTDTHSIMYCAAVAACRVAHVKFPNSDVATRPKPAVPAWQCRIERRIGGARALIGKLICFREGNTRPRVMRFVRRAFSGTDINPRDYMSRVTERIDFLKQKVYAWANRIRRYKRRVERYTQNSTFRSNERWVYRAWERPDQGVTDTRLPDDDAMCLFWRNIWSVPVSHIEGGWTREVERACESITEMGAITISPQDVARAVRPLPNWKSPGPDGLHNFWIKWLQRSHARLASQYQAALESGSLPEFLTTGVTHLLHKSGSTAEPKNYRPITCLPTVYKVLTSILRAKINHHVDNNAIMSASQNGCRNGSRGTKELLLIDMAISQQVRRSRKDLSTCWIDYKKAYDSVPHTWLMRVLELYKVDATLRTFLMSCMRQWRTVLRYPGCRNIQRNSEPVRIERGIFQGDSLSPLWFCLALNPLSTLLENSGLGYRLKRGGQTISHLLYMDDLKLFAPNNLQLMELLKVTETFSSAIRMEFGVDKCAVMHIKRGEIVESVGIQLSDSIHLRSLSPTETYKYLGMSEALGINATDMKQSLKERFFGRLKKVLNSLLSGGNKVRAFNGWVMPVLMYAFGVLKWTQTELDALDRRVRTLLTAYRMHHPRSSVMRLYIPRKCGGRGFLNAKTLHNREVCSLRKYFLTADGGMHRAVVAVDKGLTPLSLANENWRKPVVLDTNVRKEVWQSKELHGRFFRALHGPDVDQLASVAWLRVGDLFGETEGFVCAIMDEVIMTNNYRRFIVKDGTVDICRACHRPGESIRHIISGCSRLANGEYLHRHNLVARIIHQQLALKYSLVESEVPYYRYVPDPVLDSGDITLYWDRSIITDRTIVANKPDIVVVDRRERRAMIVDISVPHDENLVKAEKDKQIKYIDLAREVVDMWNVDSAIIVPIVVSANGLIAKSLDQHLRRLSLSGWIKGLIQKAVLLDTARIVRRFHSLEP

SEQ ID NO: 10425 - protein, 962 aa, Mythimna ferrago
MCNKNRALVAALDSQLSNYFDDCEDLTETHSIMYCVAVAACRVAHVKFPDSDEATRPKSAVPAWQCRIERRIGGARALIGKLICFREGNTRPRVMRFVRRAFSGTNISPRDYMSRVTERIDFLKQKVYAWANRIRRYKRRVERYTQNRTFRSNERWVYRAWERPDQGVTGARLPEDDAMCSFWRSIWSVPVSHTEGDWTRGVERACDPIPQMGAIDISPQDVARAVRPLPNWKSPGPDGLHNFWIKWFTRSHARLAYQFQSALESGSLPQFLTTGITHLLHKSGSTAEPKNYRPITCLPTVYKVLTSILRSKINSHIDENSIMSPSQNGCRNGSRGTKELLLIDMTISQQVRRSRKDLSTCWIDYKKAYDSVPHTWLMRVLELYKVDATLCTFLMSCMRQWRTVLRYPGCRNIQRNSEPVRIERGIFQGDSLSPLWFCLALNPLSTLLENSGLGYRLKRGGQVISHLLYMDDLKLFAPNNLQLMELLKVTETFSSAIRMEFGVDKCAVMHIKRGEIVESVGTQLSDSIHLRSLSPTETYKYLGMSEALGINATDMKQSLRERFFGRLKKVLNSLLSGGNKVRAFNGWVMPVLMYAFGVLKWTQTELDALDRKVRTLLTAYRMHHPRSSVMRLYISRKCGGRGFLNAKTLHNREVCSLREYFLAADEGMHRDVVAVDKGLTPLSLANENWRKPVVLDTNVRKEVWQSKELHGRFFRALHGPDVDQLASVAWLRVGDLFGETEGFVCAIMDEIIMTNNYRRFIVKDGTVDICRACHRPGESIRHIISGCSRLANGEYLHRHNLVARIIHQQLALKYSLVESEVPYYRYVPDPVLDSGDITLYWDRSIITDRTIVANKPDIVVVDRSERRAMIVDISVPHDENLVKAEKDKQIKYIDLAREVVDMWEVDSAIIVPIVVSANGLIAKSLDQHLRRLSLGDWIKGLIQKAVLLDTARIVRRFLSLEP

SEQ ID NO: 10426 - protein, 1200 aa, Mythimna ferrago
MLTRSRARQQQTHPTSSDSSFSSASQPPGPAPAVSPVIPVAAVASSSSDEYFSPPTTPPPARRRGRGRPPACLGPRGPPASGGVPAAGGSVQRMRWTQSINENVMRSYFGATEGGTNLTAYRGRMLSLFQVLEPAVNVSAQRLSDQVRVIQRNRMLDDAVLDRLRLESRNGRVSPVSPPAAVQLQPSVSPRPDHVGEDDDDGAISVSTQCNARLRSALEDAFREYRSIPPELRPRLPRLPMHRKNRALVCALDSQLSNCFDSSEDLTDTHSILYCAAAAACRVAHVKIPNSDRATRPVKPAWQCRIERRIGEARALIGKLICFREGNTRPRVMRFVRRAFSGTDVSPRDYLPRITERIDFLRQKVYAWANRIRRYKRRVERYTQNRAFQSNERWVYRAWERPDQSVIDTRLPDDDAMYSFWRSIWSVPVSHTEGDWTRGVERECELIPEMGAITISPQDVARAVRPLPNWKSPGPDGLHNFWLKWFKSSHARLASQFQSALESGSLPQFLTTGITHLLHKSGSTAEPKNYRPITCLPTVYKVLTSILRAKINSHIETNSIMSASQNGCRNGSRGTKELLLIDVAISQQVRRSRRDLSTCWIDYKKAYDSVPHTWLMRVLELYKIDVTLRTFLMSCMGQWRTVLHYPGCRRVSENSEPLRIERGIFQGDSLSPLWFCLALNPLSTLLEGSGLGYRLRREGQVISHLLYMDDLKLFASNNLQLMELLKVTETFSSAIRMEFGLDKCAVMHVKRGEIMESVGTQLSDSIHLRSLSSTETYKYLGMSEALGINAADVKQSLRERFFCRLNKVLKSLLSGGNKVRAFNGWVMPVLMYSFGILKWTQTELDALDRRVRTLLTANRMHHPRSSVMRLYIPRKCGGRGFLNTKTLHNREVCSLREYFLETDVGMHRDVVAVDKGLTPLSLASENWRKPIVMDTNERKEVWKGKELHGRFYRALHGPDVDLLTSVSWLRFGNLFGETEGFVFAIMDEVMMTNNYRKYIVKDGTVDICRACHRPGESIRHIISGCSHLANGDYLHRHNLVARIIHQQLALKYNLVESEVPYYRYVPDPVLENGSVTLYWDRSIITDRTIVANKPDIVVIDRLERRTMIVDIAVPHDENLVKAEKDKQTKYLDLAREVVDMWEVDRAIIVPIVVTANGLIAKSLDQHLRRLSLGSWIKGLIQKAVLLDTARIVRRFLSQEP

SEQ ID NO: 10427 - protein, 1200 aa, Mythimna ferrago
MLTRSRAQQLNTHLTTSGSSLSSASQPPGPAPAVIPEIPVAAVASSSSDEYFSPPTTPPPTRRRGRGRPPACLGPRGPPASDRVPAAGGSVQRMRWTQSINENVMRSYFGATEGGTNLTAYRGRMLSLFQVLEPAVNVSAQRLSDQVRVIQRNRMLDDAVLDRLRLESRNGRVSPVSPPAAVQRQLSVSPRPDHVGEDDDDGAISVSTQCNARLRSALEDAFREYRSIPPELRPRLPRLPMHRKNRALVCALDSQLSNCFDSSEDLTDTHSILYCAAAAACRVAHVKIPNSDRATRPAKPAWQCRIERRIGEARALIGKLICFREGNTRPRVMRFVRRAFSGTDISPRDYLPRITERIDFLRQKVYAWANRIRRYKRRVERYTQNRAFQSNERWVYRAWERPDQSVIDTHLPDDDAMYSFWRSIWSVPVNHTEGDWTREVERECELIPEMGAITISPQDVARAVRPLPNWKSPGPEGLHNFWLKWFKSSHARLASQFQSALESGSLPQFLTTGITHLLYKSGSTAEPKNYRPITCLPTVYKVLTSILRAKINSHIETNSIMSASQNGCRNGSRGTKELLLIDVAISQQVRRSRRDLSICWIDYKKAYDSVPHTWLMRVLELYKIDVTLRTFLMSCMGQWRTVLHYPGCRRVSENSEPLRIERGIFQGDSLSPLWFCLALNPLSTLLEGSGLGYRLRREGQVISHLLYMDDLKLFASNNLQLMELLKVTKTFSSAIRMEFGLDKCAVMHVKRGEIMESVGTQLSDSIHLRSLCSTETYKYLGMSEALGINAADVKQSLRERFFGRLNKVLKSLLSGGNKVRAFNDWVMPVLMYSFGILKWTQTELDALDRRVRTLLTANRMHHPRSSVMRLYIPRKCGGRGFLNAKTLHNREVCSLREYFLETDVGMHRDVVAVDKGLTPLSLANENWRKPIVMDTNERKEVWKGKELHGRFYRALHGPDVDLLASVSWLRFGDLFGETEGFVFAIMDEVMMTNNYRKYIVKDGTVDICRACHRPGESIRHIISGCSHLANGDYLHRHNLVARIIHQQLALKYNLVESEVPYYRYVPDPVLENGSVTLYWDRSIITDRTIVANKPDIVVIDRLERRTMIVDIAVPHDENLVKAEKDKQTKYLDLAREVVDMWEVDRAIIVPIVVTANGLIAKSLDQHLRRLSLGSWIKGLIQKAVLLDTARIVRRFLSQEP

SEQ ID NO: 10428 - protein, 1200 aa, Mythimna ferrago
MLTRAAARRARPPPPASSLSSASPPPEPSLNASAVTPAATVASSSSDEFYSPPTSPPPARRRRGRRPPSSLGPRGPPASDRVPAPGGSVQRMRWTQSINENVMRSYYGATEGGNNLTAYRVRMLSLFQVLEPAVNVSAQRLSDQVRVILRNHMLDDSVLDRLRTEMSDRVITPPSQPVVPVVVPPSSHISFHTDEVSTDMVTNVSTQCNNELRSALECAIREYRNIPPELRPRIPRLPMCNKNRALVAALDSQLSNYFDDCEDLTETHSIMYCAAVAAYRVAHVKFPDSDEATRPKSAVPAWQCRIERRIGGARALIGKLICFREGNTRPRVMRFVRRAFSGTNISPRDYMSRVTERIDFLKQKVYAWANRIRRYKRRVERYTQNRTFRSNERWVYRAWERPDQGVTDARLPDDDAMCSFWRSIWSVPVSHTEGDWTRQVERACDPIPQMGAIDISPQDVARAVRPLPNWKSPGPDGLHNFWIKWFTRSHARLAYQFQSALESGSLPQFLTTGITHLLHKSGSTAEPKNYRPITCLPTVYKVLTSILRSKINSHIDENSIMSPSQNGCRNGSRGTKELLLIDMTISQQVRRSRKDLSTCWIDYKKAYDSVPHTWLMRALELYKIDTTLRTFLMSCMRQWSTVLRYPGCRNIQRNSEPVRIERGIFQGDSLSPLWFCLALNPLSTLLENSGLGYRLKRGGQVISHLLYMDDLKLFAPNNLQLMELLKVTETFSSAIRMEFGVDKCAVMHVKRGEVVESVGVQLTDSINLRSLSPTETYKYLGMSEALGISTIDMKQSLKERFFGRLKKVFNSLLSGGNKVRAFNGWVMPVLMYSFGVLKWTQTELDALDRRVRTLLTAYRMHHPRSSVMRLYIPRKCGGRGFLNAKTLHNREVCSLREYFLAADVGMHRDVVALDKGLTPLSLANENWRKPIVLDTDDRREVWQSKELHGRFFRALHGPDVDQLASVAWLRFGDLFGETEGFVCAIMDEVIMTNNYRRFIVKDGTIDICRACHRPGESIRHIISGCSRLANGEYLHRHNLVARIIHQQLALKYTLVESEVPYYRYEPDPVLDNGHITLYWDRPIITDRTIVANKPDIVVVDRSERRAMIVDISVPHDENLVKAEKDKQIKYIDLAREVVDMWEVDSAIIVPIVVSANGLIAKSLDQHLRRLSLGDWIKGLIQKAVLLDTARIVRRFLSLEP

SEQ ID NO: 10429 - protein, 1200 aa, Mythimna ferrago
MLTRAAARRARPPPPASSLSSASPPSEPSLTESAVTPAVAAASSSSDEYYSPPTTPPPTRRRGGRRPPACLGPRGPPASDRVPAAGGSVPRMRWTQSTNENVMRAYYGATEGGNNLTAYRVRMLSLFQVLEPAVNVSAQRLSDQVRVIQRNHMLDDTVLDRLRTEMSDRVITAPSQPVVPVVAPPPSHISFHTDEVSTDTVTNVSTQCNNELRSALECAIREYRNMPLEFRPRLPRLPMRNKNKALVAALDSQLSNYFDDCEDLTDTHSIMYCAAVAACRVAHVKFPNSDVATRPKPAVPAWQCRIERRIGGARALIGKLICFREGNTRPRVMRFVRRAFSGTDINPRDYMSRVTERIDFLKQKVYAWANRIRRYKRRVERYTQNSTFRSNERWVYRAWERPDQGVTDTRLPDDDAMCLFWRNIWSVPVSHTEGGWTREVERACESITEMGAITISPQDVARAVRPLPNWKSPGPDGLHNFWIKWLQRSHARLASQYQAALESGSLPEFLTTGVTHLLHKSGSTAEPKNYRPITCLPTVYKVLTSILRAKINHHVDNNAIMSASQNGCRNGSRGTKELLLIDMAISQQVRRSRKDLSTCWIDYKKAYDSVPHTWLMRVLELYKVDATLRTFLMSCMRQWRTVLRYPGCRNIQRNSEPVRIERGIFQGDSLSPLWFCLALNPLSTLLENSGLGYRLKTGGQAISHLLYMDDLKLFAPNNLQLMELLKVTETFSSAIRMEFGVDKCAVMHIKRGEIVESVGIQLSDSIHLRSLSPTETYKYLGMSEALGINATDMKQSLKERFFGRLKKVLNSLLSGGNKVRAFNGWVMPVLMYAFGVLKWTQTELDALDRRVRTLLTAYRMHHPRSSVMRLYIPRKGGGRGFLNAKTLHNREVCSLREYFLAADGGMHRAVVAVDKGLTPLSLANENWRKPVVLDTNVRKEVWQSKELHGRFFRALHGPDVDQLASVAWLRVGDLFGETEGFVCAIMDEVIMTNNYRRFIVKDGTVDICRACHRPGESIRHIISGCSRLANGEYLHRHNLVARIIHQQLALKYSLVESEVPYYRYVPDPVLDSGDITLYWDRSIITDRTIVANKPDIVVVDRRERRAMIVDISVPHDENLVKAEKDKQIKYIDLAREVVDMWNVDSAIIVPIVVSANGLIAKSLDQHLRRLSLSGWIKGLIQKAVLLDTARIVRRFLSLEP

SEQ ID NO: 10430 - protein, 1200 aa, Mythimna ferrago
MLTRSRARQQQTHPTSSDSSFSSASQPPGPAPAVSPVIPVAAVASSSSDEYFSPPTTPPPARRRGRGRLPACLGLRGPPASGGVPAAGGSVQRMRWTQSINENVMRSYFGATEGGTNLTAYRGRMLSLFQVLEPAVNVSAQRLSDQVRVIQRNRMLDDAVLDRLRLESRNGRVSPVSPPAAVQLQPSVSPRPDHVGEDDDDGAISVSTQCNARLRSALEDAFREYRSILPELRPRLPRLPIHRKNRALVCALDSQLSNCFDSSEDLTDTHSILYCAAAAACRVAHVKIPNSDRATRPAKPAWQCRIERRIGEARALIGKLICFREGNTRPRVMRFVRRAFSGTDVSPRDYLPRITERIDFLRQKVYAWANRIRRYKRRVERYTQNRAFQSNERWVYRAWERPDQSVIDTRLPDDDAMYSFWRSIWSVPVSHTEGDWTREVERECELIPEMGAITISPQDVARAVRPLPNWKSPGPDGLHNFWLKWFKSSHARLASQFQSALESGSLPQFLTTGITHLLHKSGSTAEPKNYRPITCLPTVYKVLTSILRAKINSHIETNSIMSASQNGCRNGSRGTKELLLIDVAISQQVRRSRRDLSTCWIDYKKAYDSVPHTWLMRVLELYKIDVTLRTFLMSCMGQWKTVLHYPGCRRVSENSEPLRIERGIFQGDSLSPLWFCLALNPLSTLLEGSGLGYRLRREGQVISHLLYMDDLKLFASNNLQLMELLKVTETFSSAIRMEFGLDKCAVMHVKRGEIMESVGTQLSDSIHLRSHSSTETYKYLGMSEALGINAADVKQSLRERFFCRLNKVLKSLLSGGNKVRAFNGWVMPVLMYSFGILKWTQTELDALDRRVRTLLTANRMHHPRSSVMRLYIPRKCGGRGFLNAKTLHNREVCSLREYFLETDVGMHRDVVAVDKGLTPLSLASENWRKPIVMDTNERKEVWKGKELHGRFYRALHGPDVDLLASVSWLRFGNLFGETEGFVFAIMDEVMMTNNYRKYIVKDGTVDICRACHRPGESIRHIISGCSHLANGDYLHRHNLVARIIHQQLALKYNLVESEVPYYRYVPDPVLENGSVTLYWDRSIITDRTIVANKPDIVVIDRLERRTMIVDIAVPHDENLVKAEKDKQTKYLDLAREVVDMWEVDRAIIVPIVVTANGLIAKSLDQHLRRLSLGSWIKGLIQKAVLLDTARIVRRFLSQEP

SEQ ID NO: 10431 - protein, 1199 aa, Acronicta aceris
MLTRARARYIEHHTRLTTPDSSPSSALQQPQHGRTSPNAAATASSSSDEYYSPPTSPPPVRRRGGRRPPDRLGPRGPLASGGIPASGGSVQRMRWTRSLNENVMRAYYGATEGGTNLTAYRGRMLSLFQALEPTIDVSTQRLSDQVRVIQRNHMLDDSVLDQLRSEVQSSRAIAHPSQSVAPSATLPQTNLAEVGSDDRVTNVSTQYNEKLRSALEGAFREYRSSPPELRPRLPRLPMNNKNLALVCALDSLLSDYFDSSEDLADTHSILYCAAVAACRVAHVKFPESDRATRPKPMIPAWQSRIEQRIGEARALIGKLICFREGNTRPRVMRFVRRAFSGTNIDPRDYASCVTERIDFLKQKVYAWANRIRRYKRRAERYSLNRAFQGDQRWVYRTWDRPDNGVSDVCRPNDDAMSLFWRNIWSVPVNHTEDDWICDVERACESLPAMEEINISPQDVACAVHSVPNWKAPGPDGLHNFWIKWLRSSHARLASQFQSSLESGTLPQFLTTGITHLLHKSGDTADPKNYRPITCLPTVYKLLTSILRAKICYHIDESSIMSASQNGCRNGSRGTKELLLIDMTISQQVRRLRKNLSTCWIDYKKAYDSVPHTWLMRVLELYKVDVSLRTFLRSCMGQWRTVLHYPGCRQIQRISEPIRIERGIFQGDSLSPLWFCLALNPLSTLLEESRLGYRLRRGGQVISHLLYMDDLKLFASSDLHLMELLKITENFSNSIRMEFGVEKCAVMHVKRGGIVESVGIQLSDSTQLRSLASTETYKYLGMAEALGINVADMKQSLQVRFFGRLTKVLKSLLSGGNKVRAFNGWVMPVLMYSFGVLKWTQTELETLDRKVRTLLTAYRMHHPRSSVMRLYIPRKCGGRGFLNAKNLHNREVCSLREHFLKTEMGMHRDVVAVDNGLTPLFMAKENWRKPVVLSTNDRRNVWQGKELHGRYYRALHEPGVDTLASVSWLRFGDLFGETEGFVCAIMDEVMMTNNYRKFIVKDGTVDICRACHRPGESIRHIISGCSRLANGEYLHRHNLVARIIHQQLALKYNLVESEVPYYKYVPDPVLENGHATLYWDRSIITDRTIIANKPDIVVIDRLERRAMIVDITVPHDENLFKAEKEKEIKYLDLAHEVVDMWGVDAAIIVPIVVSANGLIAKSLDRHLKRLSLGGWIKGLIQKAVLLDTARIVRRFLSLGP

SEQ ID NO: 10432 - protein, 1199 aa, Acronicta aceris
MLTRARARYIERHTRLTTPDSSPSSALQQPQHGRTSPDAAATASSSSDEYYSPPTSPPPVRRRGGRRPPDRLGPRGPLASGGIPASGGSVQRMRWTQSLNENVMRAYYGATEGGTNLTAYRGRMLSLFQALEPTIDVSTQRLSDQVRVIQRNHMLDDSVLDQLRSEVQSSRAIAHPSQSVAPSAMLPQTNLAEVGSDDRVTNVSTQYNEKLRSALEGAFREYRSSPPELRPRLPRLPMNNKNLALVCALDSLLSDYFDSSEDLADTHSILYCAAVAACRVAHVKFPESDRATRPKPMIPAWQSRIEQRIGEARALIGKLICFREGNTRPRVMRFVRRAFSGTNIDPRDYASCVTERIDFLKQKVYAWANRIRRYKRRAERYSLNRAFQGDQRWVYRTWDRPDNGVSDVCRPNDDAMSLFWRNIWSVPVNHTEDDWICDVERACESLPTMEEINISPQDVACAVHSVPNWKAPGPDGLHNFWIKWLRSSHARLASQFQSSLESGTLPQFLTTGITHLLHKSGDTADPKNYRPITCLPTVYKLLTSILRAKICYHIDESSIMSASQNGCRNGSRGTKELLLIDMTISQQVRRLRKNLSTCWIDYKKAYDSVPHTWLMRVLELYKVDVSLRTFLRSCMGQWRTVLHYPGCRQIQRISEPIRIERGIFQGDSLSPLWFCLALNPLSTLLEESRLGYRLRRGGQVISHLLYMDDLKLFASSDLHLMELLKITENFSNSIRMEFGVEKCAVMHVKRGGIVESVGIQLSDSTQLRSLASTETYKYLGMAEALGINVADMKQSLQVRFFGRLTKVLKSLLSGGNKVRAFNGWVMPVLMYSFGVLKWTQTELETLDRKVRTLLTAYRMHHPRSSVMRLYIPRKCGGRGFLNAKNLHNREVCSLREHFLKTEMGMHRDVVAVDNGLTPLSMAKENWRKPVVLSTNDRRNVWQGKELHGRYYRALHEPGVDTLASVSWLRFGDLFGETEGFVCAIMDEVMMTNNYRKFIVKDGTVDICRACHRPGESIRHIISGCSRLANGEYLHRHNLVARIIHQQLALKYNLVESEVPYYKYVPDPVLENGHATLYWDRSIITDRTIIANKPDIVVIDRLERRAMIVDITVPHDENLFKAEKEKEIKYLDLAHEVVDMWGVDAAIIVPIVVSANGLIAKSLDRHLKRLSLGGWIKGLIQKAVLLDTARIVRRFLSLGP

SEQ ID NO: 10433 - protein, 1192 aa, Eilema sororculum
MLTRAQASRNRSAPTTSPDSSLSSAAQPPAVEPAASSSSSSDEFFSPPTSPTPVRRPGRGRPPTCLGPRRPPASNRAPATGGDVHRMRWTTSINENVMRAYFAATEGGTNLSAYRTRMLALFQALEPSINVSAQRLSDQVRVIQRNRMLNETVLETLRLECLRNICVTPAPAPAPASTIEINDDTCVAPDDTPIPVSIQYNEEIKEALEYALREYRSMPVHVRPRLPRLPIHRRNIALVSALDSLLPRYLENSENLGDTHSILYCTAVAACRMAGAKFPNKDPAIRLKSAIPAWQCRIERRVAKARVLIGKLICFRSGNTRPRVMRYVTRAFAGTDISPQDYTSRVTERIDFLKQKVYAWANRIRRYKKRVDRYTVNRMFQRDQRWVYRSWERTEESVDDVRRPDAEATNAFWRSIWSVPVSHTEGDWMREVERACETIPEMEKINIDAIDVDCAVRSLSNWKSPGPDGLHNFWLKWLRSSHVVLASQFQSAVESGTLPAFMTTGVTHLLHKTGSTLEPNNYRPITCLPTVYKLLTSILRAKINNHINNNSIMCASQNGCKNGARGTKELLLIDMAISQQARRNRKDLTACWIDYKKAFDSVPHTWLLRVLELYKVNTTLCTFLRSCMGQWRTVLFYPGCRQALGSGEPITIERGIFQGDSLSPLWFCLALNPLSTLLVNSGLGYRLRREGQMVSHLFYMDDLKLFAHTNPQLIALLKVTETFSNSIKMAFGVDKCAVIHVKRGRVVESEGIQLSDSTNLRSLLVTETYKYLGMSQALCINEVDMKQMLQERFFGRLKKVLNSLLSGGNKVRACNSWVMPLLMYSFGILKWTQTELDTIDRKVRTQLTAFRMHHPRSSVMRLYIPRKCGGRGFLNAKTLHNREVCNLRDYFLKSNVEMHRDVVNVDTGLTPLGLAKENWRRPTIVGTDSRREVWQSKELHGRFYRALHRPEVDLLASVSWLRFSDLFGETEGFVCAIADEVIKTNNYRKYIMRDGTIDICRACHQPGESLRHITSGCSRLANGEYLHRHNQVARIIHQRLALKYNLVEVEVPYYRYVPEPVLENSHITLYWDRSIITDRTVVANKPDIVVIDRSERRALIVDVTIPHDENLVKAEKDKQVKYLDLAHDVVDMWNVDSAIIVPIVVSVNGLIAKSLDQHLKRLGLDGWVKGQMQKAVLLDTARIVRKFLSLEP

SEQ ID NO: 10434 - protein, 1193 aa, Eilema depressum
MLTRAQARRNASAPATPPDSSLSSAAQHTPTEPAASSSSSSDEFFSPPTSPTPVRRPGRGRPPICLGPRRPPASNRAPAAGGDVHRMRWTPSINENVMRAYFAATEGGTNLSAYRTRMLPLFQALEPSVNTSSQRLSDQVRVIQRNRMLNETVLETLRQECLRNICVTPAPAPASTPAPVPVSHMNEETGDDTLIPVSIQYNEQIKEALECALREYRSMPLNDRPRLPRLPIHRRNMALVGALDSLLPGYLDNSENLGDTHSILYCTAVAACRMAGVKFPNKDPAIRPKFTIPAWQCRIERRVAEARVLISKLICFRSGNTRPRVMRYVTRAFAGTGISPQEYTSRITERIDFLKQKVCAWANRIRRYRKRVDRFTVNRMFRRDQRWVYRSWEQPDESVDDVRRPEAAATNTFWRSIWSVPVSHIEGDWMCEVERACESIPEMEDIYIDAIDVDCAVRPLSNWKSPGPDGLHNFWLKWLRSSHALLASQFQSAVESGTLPAFMTTGVTHLLHKTGSTLEPNNYRPITCLPTVYKLLTSILRVKINNHINNNFIMCASQNGCRNGARGTKELLLIDMAISQQARRRTKDLAACWIDYKKAFDSVPHTWLLRVLELYKVNATLCTFLRSCMRQWRTVLFYPGCCQALGDGEPITIEWGIFQGDSLSPLWFCLALNPLSTLLVNSGLGYRLRREGQMVSHLLYMDDLKLFAHTNPQLMALLKITENFSNSIKMGFGVEKCAVIHVKRGRVVESQGIQLSDSTSLRSLLVTETYKYLGMSQALCINEAGMKQMLQERFFGRLKKVLNSLLSGGNKMRACNSWVMPLLMYSFGILKWTQTELDTIDRRVRTQLTAFRMHHPRSSVMRLYIPRKCGGRGFLNAKTLHNREVCNLRDYFLKSNVDMHRDVVSVDTGLTPLGLAKENWRRPIVVGTDSRREVWQSKELHGRFYRALHRPEVDLLASVSWLRFGDLFGETEGFVCAIADEVIKTNNYRKYIMRDGTIDICRACHQPGESLRHITSGCSRLANGEYLHRHNQVARIIHQRLALKYNLVELEVPYYRYVPEPVLENSHITLYWDRSIITDRTVVANKPDIVVIDRSERRALIVDVTIPHDENLVKAEKDKQVKYLDLAHEIVDMWNVDSAIIVPIVVTVNGLIAKSLDQHLKRLGLDGWVKGQMQKAVLLDTARIVRKFLSLEP

SEQ ID NO: 10435 - protein, 1212 aa, Ptilodon capucinus
MTDAPRRNPRRQCRQRSAVRNYAQSTPPDQSPRSASPSPASIIRTSVTAVASSESDEYFSPPTSPPPVRRQRGRPPGHLGLLGQPAPNRVLVPSGVVRRMRWTSSMNENVMRAYYEATEGGTNLTAYRNRMLPLFQSLEPAVNVSAQRLSDQVRVIQRGNMLADTVLDRLRSEVQSRRVVPVASSQPAAQPVASATVTSRLAADSDVDRDNAPIDVSTQYNDLLRSTLEDVVREYRSMPNHLRPRIPRLPMHNGNRALVGALDSLLSIYFDSSDDLVDTHSILYCAAITVCRVARVKVFNTDTATRPKPAVPAWQCRIERRISEARALIGKLSCFREGNTRPRVMRFVKRAFAGTDVSPREYISRVTERIDFLKQKIYAWANRIRRYKARVDRYSQNSMFQRDQRWVYRSWERPNEPVSELQRPDDNAMTTFWRDIWSVPVTHYEGNWIGDVERMCEPIKEMEAISIGPLDVANAVRSLPNWKAPGPDGLHNFWLKWLRSSHVRLASQFQSALQSGSLPEFITTGVTHLLHKTGSTTDPKNYRPITCLPTIYKTLTSILRVKIARHVEDNSIMSASQNGCRSGSRGTKELLLIDMTICQQAHRNRKDLSTCWIDYKKAYDSVPHTWLVRVLELYKIDTTLRTFLESCMRQWKTVLLCPGSRQILGNGEPIRIERGIFQGDSLSPLWFCLALNPLSALLEESGFGFRLRRGGQVISHLLYMDDLKLFAPTALQLSGLLKVTETFSNSIRMEFGVDKCAVMHAKQGRMVESEGIQLSDSIQLRSLAATETYKYLGMSQGLGISETDMKQLLRDRFLGRLKKVLKSLLSGGNKVRAYNGWVMPVLMYSFGILKWTQTELDTLDRTVRTTLTAYRMHHPRSSVMRLYIPRKCGGRGFLNVKTLHNREICSLREYFLRADGEMHVDVVAVDNGLTPLSLAKENWRKPVVLTTDDRRVVWQGKELHGRYYRALHGPDVDLAASVAWLRFGDLFGETEGFVCAIMDEVVMTNNYRRYILRDGTIDICRACHRPGESLRHMISGCSRLANGQYLHRHNQVARIVHQQLALKYRLVTSEVPYYRYEPQPVLEEGHITLYWDRSIITDRTIVANKPDIVLIDRQERRAMIIDITVPHDENLVKAEKDKESKYLDLAHEVVDMWDIDAAIIVPIVVSAHGLLAKSLDKHLKRLALGSWIKGQIQKAVLLETARIVRKFLSLEP

SEQ ID NO: 10436 - protein, 930 aa, Ptilodon capucinus
MYAIRITVCRVARVKVFNTDTATRPKPAVPAWQCRIERRISEARALIGKLSCFREGNTRPRVMRFVRRAFAGTDVSPREYISRVTERIDFLKQKIYAWANRIRRYKVRVDRYSQNSMFQRDQRWVYRSWERPNEPVSELQRPDDNAMTTFWRDIWSVPVTHYEGDWIGDVERMCEPIKEMEAISIGPLDVANAVRSLPNWKAPGPDGLHNFWLKWLRSSHVRLASQFQSALQSGSLPEFITTGVTHLLHKSGSTTDPKNYRPITCLPTIYKTLTSILRAKIARHVEDNSIMSASQNGCRSGSRGTKELLLIDMTICQQARRNRKDLSTCWIDYKKAYDSVPHTWLVRVLELYKIDTTLRTFLESCMRQWKTVLLCPGSRQILGNGEPIRIERGIFQGDSLSPLWFCLALNPLSTLLEESGFGFRLRRGGQVISHLLYMDDLKLFAPTALQLTGLLKVTETFSNSIRMEFGVDKCAVMHAKQGRLVESEGIQLSDSIQLRSLAATETYKYLGMSQGLGISETDMKQLLRDRFLGRLKKVLKSLLSGGNKVRAYNGWVMPVLMYSFGILKWTQTELDTLDRTVRTTLTAYRMHHPRSSVMRLYIPRKCGGRGFLNVKTLHNREICSLREYFLRADGEMHADVVAVDNGLTPLSLAKENWRKPVVLTTDDRRLVWQGKELHGRYYRALHGPDVDLAASVAWLRFGDLFGETEGFVCAIMDEVVMTNNYRKYILRDGTIDICRACHRPGESLRHIISGCSRLANGQYLHRHNQVARIIHQQLALKYRLVTSEVPYYRYEPQPVLEEGHISLYWDRSIITDRTIVANKPDIVLIDRQERRAVIVDITVPHDENLVKAEKDKESKYLDLAHEVVDMWDIDAAIIVPIVVSAHGLLAKSLDKHLKRLALGGWIKGQIQKAVLLETARIVRKFLSLEP

SEQ ID NO: 10437 - protein, 1212 aa, Ptilodon capucinus
MTDAPRRNPRRQCRQRSAVRHYAQSTPPDQSPRSASPSPASIIRTSVTAVASSESDEYFSPPTSPPPVRRQRGRPPGHLGLLGQPAPNRVLVPSGVVRRMRWTSSMNENVMRAYYEATEGGTNLTAYRDRMLPLFQSLEPAVNVSAQRLSDQVRVIQRGNMLADTVLDRLRSGVQSRRVVPVASSQPAAQPVASATVTSRLAADSDVDRDNAPIDVSTQYNDLLRSTLEDVVREYRSMPNHLRPRIPRLPMHKGNRALVGALDSLLSIYFDSSDDLVDTHSILYCAAITVCRVARVKVFNTDTATRPKPAVPAWQCRIERRISEARALIGKLSCFREGNTRPRVMRFVKRAFAGTDVSPREYISRVTERIDFLKQKIYAWANRIRRYKARVDRYSLNSMFQRDQRWVYRSWERPNEPVSELQRPDDNAMTTFWRDIWSVPVTHYEGNWIGDVERMCEPIKEMEAISIGPLDVANAVRSLPNWKAPGPDGLHNFWLKWLRSSHVRLASQFQSALQSGSLPEFITTGVTHLLHKTGSTTDPKNYRPITCLPTIYKTLTSILRAKIARHVEDNSIMSASQNGCRSGSRGTKELLLIDMTICQQARRNRKDLSTCWIDYKKAYDSVPHTWLVRVLELYKIDTTLRTFLESCMRQWKTVLLCPGSRQILGNGEPIRIERGIFQGDSLSPLWFCLALNPLSALLEESGFGFRLRRGGQVISHLLYMDDLKLFAPTALQLSGLLKVTETFSNSIRMEFGVDKCAVMHAKQGRMVESEGIQLSDSIQLRSLAATETYKYLGMSQGLGISETDMKQLLRDRFLGRLKKVLRSLLSGGNKVRAYNGWVMPVLMYSFGILKWTQTELDTLDRTVRTTLTAYRMHHPRSSVMRLYIPRKCGGRGILNVKTLHNREICSLREYFLRADGEMHVDVVAVDNGLTPLSLAKENWRKPVVLTTDDRRVVWQGKELHGRYYRALHGPDVDLAASVAWLRFGDLFGETEGFVCAIMDEVVMTNNYRRYILRDGTIDICRACHRPGESLRHIISGCSRLANGQYLHRHNQVARIVHQQLALKYRLVTSEIPYYRYEPQPVLEEGHITLYWDRSIITDRTIVANKPDIVLIDRQERRAMIIDITVPHDENLVKAEKDKESKYLDLAHEVVDMWDIDAAIIVPIVVSAHGLLAKSLDKHLKRLALGSWIKGQIQKAVLLETARIVRKFLSLEP

SEQ ID NO: 10438 - protein, 1032 aa, Agrochola circellaris
MRNSHATAPPSQTVMVAPQFTINQVDEGIDDMATNVSTQYNEELRSALERAIREYRSMSPELRPRLPRLPMHNKNRALVAALDSQLSNYFDDCEDLTDTHSILYCAAVAACRVAHVKFANDSRATRPKTAVPAWQCRIERRIGGARALIGKLICFREGNTRPRVMRFVRRAFSGTDISPEDYVSRATERIDFLKQKVYAWANRIRRYKRRVERYTQNRTFQSDERRVYRAWEQPDQGVADARLPDDDAMCSFWRSIWSAPVSHTEGDWTREVERACDPIPEMGAITICPQDVARAVRLLPNWKSPGPDGLHNFWIKWFKRSHARLAAQYQSALESGSLPEFLTTGVTHLLHKSGSTADPKNYRPITCLPTVYKVLASILRAKINKHIDTNSIMSASQNGCRNGSRGTKELLLIDMTISQQVRRSRKDLSTCWIDYKKAYDSVPHTWLMRVLELYKVDATLRTFLLSCMGQWRTVLRYPGCRNIQRNSEPIRIERGIFQGDSLSPLWFCLALNPLSTLLEGSDLGYRLRRGGQVISHLLYMDDLKLFAPNNFQLMELLKVTETFSRAIRMEFGVDKCAVMHVKRGEIVESVGTQLTDSINFRALSASETYKYLGMSETLGINVTDMKQSLKERFFGRLKKVFNSFLSGGNKVRAFNGWVMPVLMYSFGVLKWTQTELDALDRRVRTLLTGYRMHHPRSSVMRLYIPRKCGGRGFLNAKTLHNREICSLREYFLEADVGMHRDVVAVDKGLTPLSLAKENWRKPAVLDTNDRKEVWQNKELHGRYFRALHGPDVDLLASVAWLRFGDLFGETEGFVCAIMDEVMMTNNYRRFIVKDGTVDICRACHRPGESIRHIISGCSRLANEEYLHRHNLVARIIHQQLALKYSLVESEVPYYRYVPDPVLESGHITLYWDRSIITDRSIVANKPDIVVVDRAERRTMIIDITVPHDGNLVKAEKDKQIKYLDLAREVVDMWDVDSAIIVPIVVSANGLIAKSLDQHLRRLSLGGWIKGLIQKAVLLDTARIVRRFLSLEP

SEQ ID NO: 10439 - protein, 1203 aa, Agrochola circellaris
MLTRSATRRARPPPPDSSLSSALPPPVSSPIISAVTTPVAVVASSSSDEYFSPPTSPTPVRRQGRGRPPRSLGLRGQPAPNRVPAAGGCVRRMRWTQNVNENVMRAYFGATEGGSNLTAYRGRMLSLFQVLEPAVNVSAQRLSDQVRVIQRNHMLDDAVLDRLRLESRNNRVTPASPLVAVQLQNSPSATPRADHVGEEDDDGVISVSSQCNARLRNALEDAFRDYRSTPPGLRPRLPRLPMHKKNKALVCTLDSLLSNYFDGSKDLADTHSILYCAAVAACRVAHVKFPSSDRAPRPKPAVPAWQCRIERRIGEARVLIGKLICFREGNTRPRVMRFVKRAFSGTDTSSRDYLARVTERIDFLKQKICAWANRIRRYRRRVERYTQNRTFQSDERWVYRAWERLDQGVIDTRLPDDDAMCSFWRSIWSAPVNHTEGDWTGKIERACERIPEMGAITISPQDVACAVRPLPNWKSPGPDGLHNFWIKWFQRSHARLASQFQSALESGSLPQFLTTGITHLLHKSGSTAEPKNYRPITCLPTVYKVFTSILRTKINKHIDTNSIMSASQNGCKNGSRGTKELLLIDMAISQQVRRSRRDLSTCWIDYKKAYDSMPHTWLMRVLELYKVDATLRTFLISCMGQWRTVLRYPGCRQIQRNSEPIRIERGIFQGDSLSPLWFCLALNPLSTLLEDSGLGYRLRRGGQVISHLLYMDDLKLFAPNNLQLVELLKVTETFSSAIRMEFGVDKCAVMHVKRGGIVESGGTQLSDSIHLRSLSSIETYKYLGMSEALGINTADMKQSLRERFFNRLNKVLNSLLSGGNKVRAFNGWVMPVLMYSFGILKWTQTELDALDRRVRTLLTVNRMHHPRSSVMRLYIPRKCGGRGFLNAKTLHNREVCSLREYFLEADVGMHRDVVSVDKGLTPLSLANENWRKPIVLDTKDRREVWQSKGLHGRFYRALHGPDVDLLASVSWLRFGDLFGETEGFVFAIMDEVMMTNNYRKYIVKDGTVDICRACHRPGESIRHIISGCSRLANGDYLHRHNLVARIIHQQLALKYSLVESEVPYYRYMPDPVLENGNITLYWDRSIITDRTIVANKPDIVVIDRLERRTMIIDIAVPHDENLVKAENDKQIKYLDLAREVVDMWDVDTAVIVPIVVTANGIIAKSLDQHLRRLSLGSWIKGLIQKAVLLDTARIVRRFLSQGP

SEQ ID NO: 10440 - protein, 1204 aa, Agrochola circellaris
MLTRSRARRLIDTHPTPSDSSLSSASQLPDPAPDVSPVIPAAAAVSSSSDEYFSPPTSPPPARRGRGRPPASLGLRGPPASDRVPAPGGSVRRMRWTQTVNENVMRAYFGATEGGSNLTAYRGRMLSLFQVLEPTVNVSAQRLSDQVRVIQRNHMLDDAVLDRLRLESRNNRVTPASPLVAVQLQNSLSATPRPDHVGEEVDDGVISVSSQCNARLRNALEDAFREYRSTPPGLRPRLPRLPMHKKNKALVCTLDSLLSNYFDGSNDLADTHSILYCAAVAACRVAHVKFPSSDRAPRPKPAVPAWQCRIERRIGEARVLIGKLICFREGNTRPRVMRFVKRAFSGTDTSSRDYLTRVTERIDFLKQKICAWANRIRRYRRRVERYTQNRTFQSDERWVYRAWERLDQGVIDTRLPDDDAMCSFWRSIWSAPVNHTEGDWTGKIERACERIPEMGAITISPQDVACAVRPLPNWKSPGPDGLHNFWIKWLQRSHARLASQFQSALESGSLPQFLTTGITHLLHKSGSTAEPKNYRPITCLPTVYKVFTSILRTKINKHIDTNSIMSASQNGCKNGSRGTKELLLIDMAINQQVRRSRRDLSTCWIDYKKAYDSVPHTWLMRVLELYKVDATLRTFLISCMGQWRTVLRYPGCRQIQRNSEPIRIERGIFQGDSLSPLWFCLALNPLSTLLEDSGLGYRLRRGGQVISHLLYMDDLKLFAPNNLQLVELLKVTETFSSAIRMEFGVDKCAVMHVKRGGIVESGGTQLPDSIHLRSLSSIETYKYLGMSEALGINTADMKQSLKERFFDRLNKVLNSLLSGGNKVRAFNGWVMPVLMYSFGILKWTQTELDALDRRVRTLLTVNRMHHPRSSVMRLYIPRKCGGRGFLNAKTLHNREVCSLREYFLETDVGMHRDVVSVDKGLTPLSLANENWRKPIVLDTNDRREVWQSKELHGRFYRALHGPDVDLLASVAWLRFGDLFGETEGFVFAIMDEVMMTNNYRKYIVKDGTVDICRACHRPGESIRHIISGCSRLANGDYLHRHNLVARIIHQQLALKYNLVESEVPYYKYVPDPVLENGNITLYWDRSIITDRTIVANKPDIVVIDRLERRTMIIDIAVPHDENLVKAEKDKQIKYLDLAREVVDMWDVDTAVIVPIVVTANGVIAKSLDQHLRRLSLGSWIKGLIQKAVLLDTARIVRRFLSQEP

SEQ ID NO: 10441 - protein, 1203 aa, Agrochola circellaris
MLTRSATRRARPPPPDSSLSSALPPPVSSPIISAVTTPVAGVASSSSDEYFSPPTSPTPVRRQGRGRPPRSLGLRGQPAPNRVPAAGGCVRRMRWTQNVNENVMRAYFGATEGGSNLTAYRGRMLSLFQVLEPAVNVSAQRLSDQVRVIQRNHMLDDAVLDRLRLESRNNRVTPASPLVAVQLQNSPSATPRADHVGEEDDDGVISVSSQCNARLRNALEDAFRDYRSTSPGLRPRLPRLPMHKKNKALVCTLDSLLSNYFDGSKDLADTHSILYCAAVAACRVAHVKFPSSDRAPRPKPAVPAWQCRIERRIGEARVLIGKLICFREGNTRPRVMRFVRRAFSGTDTSSRDYLTRVTERIDFLKQKICAWANRIRRYRRRVERYTQNRTFQSDERWVYRAWERLDQGVIDTRLPDDDAMCSFWRSIWSAPVNHTEGDWTGKIERACERIPEMGAITISPQDVACAVRPLPNWKSPGPDGLHNFWIKWFQRSHARLASQFQSALESGSLPQFLTTGITHLLHKSGSTAEPKNYRPITCLPTVYKVFTSILRTKINKHIDTNSIMSASQNGCKNGSRGTKELLLIDMAISQQVRRSRRDLSTCWIDYKKAYDSVPHTWLMRVLELYKVDATLRTFLISCMGQWRTVLRYPGCRQIQRNSEPIRIERGIFQGDSLSPLWFCLALNPLSTLLEDSGLGYRLRRGGQVISHLLYMDDLKLFAPNNLQLVELLKVTETFSSAIRMEFGVDKCAVMHVKRGGIVESGGTQLSDSIHLRSLSSIETYKYLGMSEALGINTADMKQSLRERFFNRLNKVLNSLLSGGNKVRAFNGWVMPVLMYSFGILKWTQTELDALDRRVRTLLTVNRMHHPRSSVMRLYIPRKCGGRGFLNAKTLHNREVCSLREYFLEADVGMHRDVVSVDKGLTPLSLANENWRKPIVLDTKDRREVWQSKELHGRFYRALHGPDVDLLASVSWLRFGDLFGETEGFVFAIMDEVMMTNNYRKYIVKDGTVDICRACHRPGESIRHIISGCSRLANGDYLHRHNLVARIIHQQLALKYSLVESEVPYYRYMPDPVLENGNITLYWDRSIITDRTIVANKPDIVVIDRLERRTMIIDIAVPHDENLVKAEKDKQIKYLDLAREVVDMWDVDTAVIVPIVVTANGIIAKSLDQHLRRLSLGSWIKGLIQKAVLLDTARIVRRFHSQEP

SEQ ID NO: 10442 - protein, 1203 aa, Hydraecia micacea
MLTRSRARRLPTTHPTSSGSSLSSASQLPEPAPDVSPVSPAAAVASSSSDEYFSPPTTPPPVCRRGRGRPPASLGLRGPPASERVPAPGGSVQRMRWTQTVNENVMRAYFGATEGGSNLTAYRGRMLSLFQVLEPAVNVSAQRLSDQVRVIQRNHMLDNVVLDRLRLESRNSHVTPASSLVAVQLQPSVPLRPDCVDVEDDDEAISVSSQCNARLRSALEDAFREYRSIPPGLRPRLPRLPMHKKNKALVCALDSQLSNCFNDSKDLADTHSILYCAAVAACRVAHVKFPNSDRAPRPKPAVPAWQYRIECRIGEARALIGKLICFREGNTRPRVMRFVRRAFSGTDISSRDYLSRVTERIDFLKQKICAWANRIRRYRRRVERYTQNRRFQSDERWVYRAWERPDQGVTDTRLPDDDAMCSFWRNIWSVPVSHTEGDWTGKIERACDLIPEMEALIISPQDVARAVRPLPNWKSPGPDGLHNFWIKWFKRSHDRLASQFQSALESGSLPQFLTTGITHLLYKSGSTADPKNYRPITCLPTVYKVLTSILRTKINKHIDTNSIMSVSQNGCKNGSRGTKELLLIDMTINQQVRRSRKDLSTCWIDYKKAYDSVPHTWLMRVLELYKVDTTLCTFLMSCMGQWRTVLRYPGCRNIQRNSEPIRIERGIFQGDSLSPLWFCLALNPLSTLLEDSGLGYRLRRGGQVISHLLYMDDLKLFAPNNLQLMELLKITETFSSAIRMEFGVDKCAVMHVKRGEIVESVGNQLSDSTNLRALSASDTYKYLGMSEALGINVTDMKQSLKERFFGRLKKVFNSLLSGGNKVRAFNDWVMPVLMYSFGILKWTQTELDALDRKVRTLLTANRMHHPRSSVMRLYIPRKCGGRGFLNAKTLHNREICSLREYFLETDVGMHRDVVVVDNGLTPLSLGKENWRKPVVLDTNDRMEVWQSKELHGRFFRALHGPDVDLLASVAWLRFGDLFGETEGFVCAIMDEVMMTNNYRRFIVKDGTVDICRACHRPGESIRHIISGCSRLANGEYLHRHNLVARIIHQQLALKYSLVESEVPYYRYVPDPVLENGNITLYWDRSIITDRTIVANKPDIVVMDRLERRAMIVDITIPHDENLVKAEKDKQIKYLDLAREVVDMWDVDSAIIVPIVVTANGLIAKSLDQHLRRLSLASWIKGLIQKAVLLDTARIVRRFLSLEP

SEQ ID NO: 10443 - protein, 975 aa, Hydraecia micacea
MSPELRPRLPRLPMHNKNRALVAVLNSQLSKYFDDCEDLTDTHSILYCAAVAACRVAHVKFTNDSRATRPKPAVPAWQCRIERRIGGARALIGKLICFREGNTRPRVMRFVRRAFLGTDISPQDYTSCVTERIDFLKQKVYAWANRIRRYKRRVERYTQNRTFQSDERWVYRDWERPDQSVADTCLPDDDAMCSFWRSIWSVPVSHTEGDWARDVERACDPIPEMEAITICPQDVARAVRPLPNWKSPGPDGLHNFWIKWFSRSHARLASQFQTALESGSLPQFLTTGITHLLHKSGSTAEPKNYRPITCLPTVYKVLTSILRAKINKHIDTNFIMSASQNGCRNGSRGTKELLLIDMTISQQVRRFRKDLSTCWIDYKKAYDSVPHTWLMRVLELYKVDTTLRTFLMSCMGQWRTVLRYPGCRNIQRNSEPIRIERGIFQGDSLSPLWFCLALNPLSTLLEDSGLGYRLRRGGQVISHLLYMDDLKLFAPNNLQLMELLKVTQTFSNAIRMEFGVDKCAVMHVKRGEIVESVGNQLSDSTNLRALSASETYKYLGMSEALGINVTDMKQSLKERFFGRLKKVLNSLLSGGNKVRAFNGWVMPVLMYSFGILKWTQTELDALDRRVRTLLTANRMHHPRSSVMRLYIPRKCGGRGFLNSKTLHNREICSLREYFLETDVGMHRDVVMVDKGLTPLSLAKENWRKPVVLDTNDRMEVWQSKELHGRFFRALHGPDVDLLASVAWLRFGDLFGETEGFVCAIMDEVMMTNNYRRFIVKDGTVDICRACHRPGESIRHIISGCSRLANGEYLHRHNLVARIIHQQLALKYSLVESEVPYYRYVPDPVLENGNITLYWDRSIITDRTIVANKPDIVVVDRSERRAMIVDITVPHDENLVKAEKDKQIKYLDLAREVVDMWDVDSAIIVPIVVTANGLIAKSLDQHLRRLSLASWIKGLIQKAVLLDTARIVRRFLSLEP

SEQ ID NO: 10444 - protein, 1204 aa, Amphipyra tragopoginis
MLITRARARQKDARPRSPDSSLCSASQPPESSPPVSAVTPAAAVASSSSDEYFSPPSSPPPVRRRGGARPPACLGPRSQPASNRVPAAGGNVSRMRWTQSINENVMRAYYGATDGGINLAAYRDRMLSLFQVLEPAINVSTQRLSDQVRVIQRNRRLDDTVLERLRSETQNNRTVTSPAQSAVQPQLPAVPPRPSHADGEGDGEVIEVSNQCSDELRSSLEGAILEYRTTPPELRPRLPRLPMHKKNRALVCALDSLLSNYFDGSEDLADTHSILYCAAIAACRVAHVKFTESDRATRPKPVVPAWQCRIERRIGGARALIGKLICFREGNTRPRVMRFVRRAFSGTDISPRDYMSRITERIDSLKQKVYAWANRIRRYKRRVERYTQNRTFQSDQRRVFRTWERPDPSGSDVRLPDDEAMGSFWRSIWSVPIAHTEGDWMRDIERACEPIPEMGAIIISPQDVAGAARPLPNWKSPGPDGLHNFWLKWLRSSHACLASQFQSSLESGSLPQFLTTGATHLLYKSGSTAEPKNYRPITCLPTVYKLLTSILRVKISNHIDNNSILSPSQNGCRSGSRGTKKLLLIDMTISQQVCRSRKDLSTCWIDYKKAYDSVPHTWLMRVLELYKINTTLRTFLMSCMRQWRTVLRYPGCREIRGRGEPIRIERGIFQGDSLSPLWFCLALNPLSTLLEGTRLGYRLRREGQVISHLLYMDDLKLFAPTDLRLMELLKVTENFSSSIRMEFGVDKCAVMHVKRGGIVESEGIQISNSIQLRSLSPTETYKYLGMSEALGISEADMRQSLRERFFGRLNKVLRSLLSGGNKVRAFNGWVMPVLMYSFGILKWTQTDLEALDRRVRALLTVHRMHHPRSSVMRLYIPRKCGGRGFLNAKTLHNREVCSLREYFLQAEGEMHRDVVAVDKGLTPLALAKENWRKPAVLSTNDREEVWQSKELHGRFYRALHGPDVDFPASVSWLRFGDLFGETEGFVCAIMDEVMMTNNYKKYIVKDGTVDICRACHRPGESIRHIISGCSRLANGEYLHRHNLVARIIHQQLALKYNLVESEVPYYRYVPDPVLENGHATLYWDRSIITDRTIVANKPDIVVIDRSERRTMIVDITVPHDENLVKAEKDKQIKYLDLAHEVVGMWDVDSAVVVPIVVTANGLIAKSLDQHLKRLSLGGWIKGLLQKAVLLDTARIVRRFLSLEP

SEQ ID NO: 10445 - protein, 1203 aa, Amphipyra tragopoginis
MLTRSRAKALITQPPPSASSLSSASQPPEPASIVSDVTPAAAVASSSSDEYFSPPTSPPPRRRGRGRPPASLGPRGPPASDRVPAAGGSVQRMRWTQSMNENCMRAYFGATEGGTNLTAYRGRMLSLFRALEPAVNVSAQRLSDQVRVIQRDHRLDDAALDRLRSEMQSGHVVPLQSQTAVQSQVTPVVAPRSIPAEEGSDDRATNVSTQSNEQLRSALELAIREYRSTLPDLRPRLPRLPMNNKNKALMCALDSLLSSYFDGSEDLADTHSILYCAAVAACRVAHVKVDNNDRATRPKPAVPAWQCRIERRIGEARALIGKLICFREGNTRPRVMRFVRRAFSGTDTCPRDYMSRVAERIDFLKQKVYAWANRIRRYRRRVERYTQNRMFQRDQRWVYRAWERPDQGVRDEHLPDDDAMNSFWRSIWSVPVSHTEGDWMRDVERVCEPILDMGAISISPQDVASAVRPLPNWKSPGPDGLHNFWLKWLRSSHARLAFQFQSSLETGTLPQFLTTGVTHLLHKSGSTAEPKNYRPITCLPTVYKLLTSILRCKISSHIENNSIMSASQNGCRNGSRGTKELLLIDMAISQQVRRSRKDLSTCWIDYKKAYDSVPHTWLMRVLELYKVNTTLCTFLTSCMGQWRTVLHYPGCRQIQGIGEPIRIERGIFQGDSLSPLWFCLALNPLSTLLEGSGLGYRLRRGGQVISHLLYMDDLKLFAPNNLQLLDLLKVTETFSNSIRMEFGVDKCAVMHVKRGGIMESVETQLSDSIQLRSLSSTETYKYLGMSEALGINEADMKQSLRERFYGRLKKVLKSLLSGGNKVRAFNGWVMPVLMYSFGILKWTQTELDALDRRVRTLLTAYRMHHPRSSVMRLYIPRKCGGRGFLNAKTLCNREVCSLREYFSQADVGMHRDVVAVDKGLTPLSLAKENWRKPAVLDTNGRKDVWRSKELHGRFYRALHGPDVDFLASVAWLRFGDLFGETEGFVCAIMDEVMMTNNYRKYVVKDGTVDICRACHCPGESIRHIVSGCSRLANGEYLHRHNLVARIIHQQLALKYNLVDAEVPYYRYVPDPVLENGHITLYWDRSIITDRTIVANKPDIVVIDRSERRAMIVDITVPHDENLVKAENDKKIKYLDLAHEVVDMWEIDSAVIVPIVVTANGLIAKSLDQHLMRLSLGSWIKGLIQKAVLLDTARIVRKFLSLEP

SEQ ID NO: 10446 - protein, 1206 aa, Amphipyra tragopoginis
MLTRSRAKAQNTRPPSSASSLSSASQPPEPASIVSDVTPAAAVASSSSDEYFSPATSPSPPPARRRGRGRPPTCLGPRGPPASDRVPAPGGSVQRMRWTQSMNENCMRAYFGATEGGTNLTAYRGRMLSLFQALEPAVNVSAQRLSDQVRVIQRDHRLDDAALDRLRSEMQNSHAAPLPSQIRTQTLVPPAVPLESNYADEEGEDRAISAGTQYSEIMRSALEDALREFRSTPPELRPRLPRLPMHNKNRALVCALDSLLPNVFESSEDLGDTQSILYCAAVAACRVAHVKFPNDNRATRPKSAVPAWQCRIERRIDEARVLIGKLTCFREGNRRPIVMRFVRRAFSGTDIGPGEYASRVTERIDFLKQKVYAWANRIRRYRRRVDRYTQNRIFQSDQRWVYRTWERPDQGVSDTHLPDNDVMNAFWRNIWSVPVTHTEGDWMQEVQRACEPIQEMGAVTIGPQDVTSAVRPMPNWKSPGPDGLHNFWIKWLRSSHARLASQFQSSLESGSLPAFLTTGITHLLFKSGSTAEPKNYRPITCLPTVYKLLTSILRAKLNHHIDSNAIMCATQNGCKNGSRGTKELLLIDMAISQQVRRSRKDLSTCWIDYKKAYDSVPHTWLMRVMELYKVNATLRTFLMSCMGQWRTVLHYPGCRQIQGNGELIRIERGIFQGDSLSPLWFCLALNPLSTLLEGSGLGYRLRRGGQVISHLLYMDDLKLFAPNNLQLVELLKVTETFSNSIRMEFGVDKCAVMHVKRGRIMESVGTQLSDSIHLRSLSSTETYKYLGMSEALGINEADMKQSLRERFFGRLIKVLKSLLSGGNKVRAFNGWVMPVLMYSFGMLRWTQTELDALDRRVRTLLTAYRMHHPRSSVMRLYIPRKCGGRVFLNAKTLHNREVCSLREYFSQAHVGMHRDVVAVDKGLTPLSLAKENWRKPVVLDAKGRMEVWRSKELHGRFYRALHGPDVDFLASVAWLRFGDLFGETEGFVCAIMDEVMMTSNYRKYIVKDGTVDICRACHCPGESIRHIVSGCSRLANGEYLHRHNLVARIIHQQLALKYNLVDTEVPYYKYVPDPVLENGHVTLYWDRSIITDRTIVANKPDIVVIDRLERRTMIVDITVPHDENLVKAENDKKNKYLDLTHEVVDMWDVDSAVIVPIVVTANGLIAKSLDQHLMRLSLGSWIKGLIQKAVLLDTARIVRKFLSLEP

SEQ ID NO: 10447 - protein, 1079 aa, Amphipyra tragopoginis
MLSLFQVLEPAINVSTQRLSDQVRVIQRNRRLDDAVLERLRCEEQNNRAVTPPVQAAEQPQLLAVAPRPIHVDGESDGAVINVSSQCSDELRSALEGAILEYRATPPELKPRLPRLPMHKKNRALVCALDSLLSNYFDGSEDLGDTHSILYCAAIAACRVAHVKLTQNERATRPKPAVPAWQCRIERRIDGARALIGKLICFREGNTRPRVMRFVRRAFSGTDISPRDYMSRVTERIDFLKQKVYAWANRIRRYKRRVERYTQNRTFQSDQRRVYRTWERPVPGVSDMRLPDNDAMCSFWRSIWSVPVAHTEGDWMRDIERACETIPEMGEIVISPQDVATAARPLPNWKSPGPDGLHNFWIKWLRSSHACLASQFQSSLESGSLPQFLTTGVTHLLYKSGSTAEPKNYRPITCLPTVYKLFTSILRVKISNHIDNNYILSPSQNGCRSGSRGTKELLLIDMAISQQVRRSRKDLSTCWIDYKKAYDSVPHTWLMRVMELYKINTTLRTLLMSCMRQWRTVLRYPGCREILGRGEPIRIERGIFQGDSLSPLWFCLALNPLSTLLEGTRLGYRLRREGQVISHLLYMDDLKLFAPTDLQLMELLKVTENFSNSIRMEFGVDKCAVMHVKRGGIVESEGIQLSNSIQLRSLSPTETYKYLGMSKALGISEADMRQSLRERFFGRLNKVLKSVLSGGNKVRAFNGWVMPVLMYSFGILKWTQTDLDALDRRVRALLTVHRMHHPRSSVMRLYIPRKCGGRGFLNAKTLHNREVYSLREYFLQAEGEMHRDVVAVDRGLTPLALAKENWRKPVVLSTNDREEVWQSKELHGRFYRALHGPDVDFSASVSWLRFGDLFGETEGFVCAIMDEVMMTNNYRKYIVKDGTVDICRACHRPGESIRHIVSGCSRLANGEYLHRHNLVARIIHQQLALKYNLVESEVPYYRYVPDPVLENGHATLYWDRSIITDRTIVANKPDIVVIDRSERRTMIVDITVPHDENLVKAEKDKQLKYLDLAHEVVAMWDVDSAVIVPIVVTANGLIAKSLDQHLKRLSLDGWIKGLIQKAVLLDTARIVRRFLSLEP

SEQ ID NO: 10448 - protein, 1197 aa, Noctua pronuba
MLTRAAARRARLSPPDSSLSSASPLPESSPIVSAVTPAVAVASSSSDEYFSPPTTPPPVRRRRGRRPPDGLGPRGPPASDRVPALGGSVQRMRWTQSINENVMRSYYGATEGGNNRTAYRVRMLSLFQVLEPAVNVSAQRLSDQVRVIQRNRMLDDTVLDRLRTEMQSSHVITPSAQAVVLPQSNTIPNRANDESNDMVTNVSTQCNEEIRSALEGAIREYRSMQPDLRPRIPRLPMHNKNRALVAVLDSQLSNYFDNCEDLTDAHSILYCAAVAACRVAHVKFSDDRATRPKPAVPAWQYRIERRIGGARALIGKLICFREGNTRPRVMRFVRRAFSGTDISPRDYMSRVTERIDFLKQKVYAWANRIRRYKRRVDRYTQNRTFQRDERWVYRAWERPDQGVADTRLPDDDAMCSFWRSIWSVPVSHTEDEWTREVERACDPVQEMGAITISPQDVVCAVRPLPNWKSPGPDGLHNFWIKWFTRSHARLATLFQSALESGSLPEFLTTGITHLLHKSGSTAEPKNYRPITCLPTVYKVLTSILRTKISKHINDNSIMSPSQNGCRNGSRGTKELLLIDMAISQQVRRFRRDLSTCWIDYKKAYDSVPHTWLMRVLELYKVDTTLRTFLMSCMGHWRTVLRYPGCRQIQRDSEPIRIERGIFQGDSLSPLWFCLALNPLSTLLEDSGLGYRLRRGGQVISHLLYMDDLKLFAPNDLQLMELLKVTETFSSAIRMEFGVDKCAVMHVKRGEIVESVRTQLSDSINLRSLSATETYKYLGMSEALGINVADMKQSLKERFFGRLKKVFNSLLSGGNKVRAFNGWVMPVLMYSFGILKWTQTELDALDRRVRTLLTAYRMHHPRSSVMRLYIPRRCGGRGFLNAKTLHNREICSLREYFLETDVGMHRDVVAVDKGLTPLSLAKENWRKPVVLDTNDRREVWQSKELHGRFFRALHGPDVDLSASVAWLRSGDLFGETEGFVCAIMDEVMMTNNYRRFIVKDGTVDICRACHRPGESIRHIISGCSRLANGEYLHRHNLVARIIHQQLALKYNLVESEVPYYKYVPDPVLENGCVTLYWDRSIITDRTIVANKPDIVVVDRSERRAMIVDITVPHDENLVKAEKDKQIKYLDLAHEVVDLWDVDSAIIVPIVVSAHGLIAKSFDQHLRRLSLGSWIKGLIQKAVLLDTARIVRRFLSLEP

SEQ ID NO: 10449 - protein, 1080 aa, Noctua pronuba
MLSLFQVLEPGVSVSAQRLSDQVRVIQRNHMLDDIVLDRLRFDSRSNLVTPASPMIAVQLQNVSSVPPRSDHDGEEDDDEVISVSTQCNAQLRSALEGAFREFRSIPPELRPRLPRLPMHKKNKALVCALDSQLSTFFDSSKDLADTHSMLYCGAVAACRVAHVKFPNNDRATRPKLAVPAWQSRIERRIGGARALIGKLICFREGNTRPRVMRFVRRAFSGTGISFRDYLARVTERIDFLKQKICAWANRIRRYKRRVERYTQNRTFQSDERWVYRAWERPDQGVTDTRLPDDDAMCLFWRSIWSVPVSHTEGDWTREVEQACDPIPEMGAIIISPQDVACAVRPLPNWKSPGPDGLHNFWIKWFQRSHARLASQFQSALESGSLPQFLTTGITHLLHKSGSTAEPKNYRPITCLPTVYKVLTSILRAKINHHIDSNSIMSASQNGCRNGSRGTKELLLIDMAISQQVRRSRRDLSTCWIDYKKAYDSVPHTWLMRVLELYKVDATLRTFLKSCMGHWRTVLRYPGCRQIQGNSEPIRIERGIFQGDSLSPLWFCLALNPLSTLLEGSGLGYRLRRGGQVISHLLYMDDLKLFAPNNLQLMKLLKVTETFSSAIRMEFGVDKCAVMHVKRGEIMESVGTQLSDSIHLRSLSSTETYKYLGMSEALGINNADMKQSLRERFFGRLNKVLGSLLSGGNKVRAFNGWVMPVLMYSFGILKWTQTELDALDRRVRALLTANRMHHPRSSVMRLYIPRKCGGRGFLNAKTLHNREVCSLREYFLEADVGMHRDVVSVDKGLTPLSLANENWRKPKVLVTNDRKEVWQSKELHGRFYRALHGPDVDFLASVSWLRFGDLFGETEGFVCAIMDEVMMTNNYRKYIVKDGTVDICRACHRPGESIRHIISGCSRLANGEYLHRHNLVARIIHQQLALKYNLVESEVPYYRYAPDPVLDNGNITLYWDRSIITDRTIVANKPDIVVIDRLERRAMIVDITVPHDENLVKAEKDKQFKYIDLAREVVDMWDVSTAVIVPIVVSANGLIAKSLDQHLRRLALGSWIKGLIQKAVLLDTARIVRRFLSQEP

SEQ ID NO: 10450 - protein, 954 aa, Noctua pronuba
MCALDSQLSNYFDSSKDLTDTHSILYCGAVAACRVAHVKFPNNDRATRPKLAVPAWQCRIERRIGEARALIGKLICFREGNTRPRVMRFVRRAFSGIDITFRDYLARVTERIDFLKQKICAWASRIRRYKRRVERYTQNRTFQSDERWVYRAWERPDQGVTDTRLPGDDAMCLFWRSIWSVPVSHTEGDWTREVEQACDPIQEMGAIIISPQDVACAVRPLPNWKSPGPDGLHNFWIKWFQRSHACLASQFQLALESGSLPQFLTTGITHLLHKSGSTAEPKNYRPITCLPTVYKVLTSILRAKINQHMESNSIMSASQNGCRNGSRGTKELLLIDMAISQQVRRSRKDMSTCWIDYKKAYDSVPHAWLMRVLELYKVDATLRTFLMSCMRHWRTVLRYPGCRQIQRNSEPIRIERGIFQGDSLSPLWFCLALNPLSTLLEGSGLGYRLRRGGQVISHLLYMDDLKLFAPNNLQLMKLLKVTETFSSAIRMEFGVDKCAVMHVKRGEIMESVGTQLSDSIHLRSLTSTETYKYLGMSEALGINTADMKQSLKERFFGRLNKVLGSLLSGGNKVRAFNGWVMPVLMYSFGILKWTQTELDALDRRVRTLLTANRMHHPRSSVMRLYIPRKCGGRGFLNAKTLHNREVCSLREYFLEADVGMHRDVVSVDKGLTPLSLANENWRKPKVLVTNDRREVWQSKELHGRFYRALHGPDVDFLASVSWLRFGDLFGETEGFVCAIMDEVMMTNNYRKYIVKDGTVDICRACHRPGESIRHIISGCSRLANGEYLHRHNLVARIIHQQLALKYNLVESEVPYYKYAPDPVLDNGNITLYWDRSIITDRTIVANKPDIVVIDRLERRAMIVDITVPHDENLVKAEKDKQFKYLDLAREVVDMWDVSTAVIVPIVVSANGLIAKSLDQHLRRLALGSWIKGLIQKAVLLDTARIVRRFLSQEP

SEQ ID NO: 10451 - protein, 1200 aa, Tinea trinotella
MLTRSRARHQRTQLPSSGSSLSSASQPPESMPTVSPVISVAAVASSSSDECFSPPTISPSARRRGGGRPPASLEPRGPSASGGVPATSGRVQRMRWTQSINENVMRSYFGATEGGISLTAYRGRMLTLFQVLEPAVNVSAQRLSDQVRVIQRNRMLDDVVLDRLRLESRSSHVSPVSPPVAVQLQPSALPRPNNIEENDDDVTISVSNQYNEQLRSALENAFRVYRSTPPGLRPRIPRLPMHKKNRALVCALDSQLANQFESSKDLADTHSILYCAAVAVCRVAHVKFPNNDRAARLAVPAWQCRIERRISDARALIGKLISFREGNTRPRVMRFVRRAFSGTDISSRDYQTRVTERIDFLKQKIYAWANRIRRYKRRVERYTQNRTFENNERWVYRAWERPDQDVSDTCLPDDDAMSLFWRNIWSVPVGHTEGEWTREVERACDLIPEMGAINISPQDVACAVRPLPNWKSPGLDGLHNFWLKYFQRSHACLAAQFQSALELGSLPQFLTTGITHLLHKSGSTAEPKNYRPIKCLPTVYKVLTSILRAKINNHIDANCIMSASQNGCRSGSRGTKELLLIDVAISQQVRRSRRDLSTCWIDYKKAYDSVPHTWLMRVLELYKVDAALRTFLVSCMGQWRTVLHYPGCRRILGNGEPIKIERGIFQGDSLSPLWFCLALNPLSTLLDGSGQGYRLRRDGQVISHLLYMDDLKLFAPNNLQLMKLLKVTETFSSAISMEFGADKCATMHVKRGEIMESVGIQLSDSIHLRSLCSTETYKYLGMSEALGINAVDVKQSLKDRFFGRLNKVLNSLLSGGNKVRAFNGWVMPVLMYSFGILKWTQTELDALDRRVRTLLTANRMHHPRSSVMRLYIPRKCGGRGFLNAKTLHNREVCSLREYFLKTDVGMHRDVVAVDKGLTSLSLANENWRKPVVLDTNDRREVWQSKELHGRFFRALHGPDVDFLASVSWLRFGDLFGETEGFVCAIMDEVMMTNNYRKYIVKDGTVDICRACHRPGESIRHIISGCSRLANGDYLHRHNLVARIIHQQLALKYNLVESEVPYYRYVPDPVLENGNITLYWDRSIITDRTIVANKPDIVVIDRLERRTIIVDVAVPHDENLVKAEKDKQIKYLDLAREVVDMWEVDAAIIVPIVVTANGLIAKSLDKHLKRLSLGSWIKRLIQKAVLLDTARIVRRFLAQEP

SEQ ID NO: 10452 - protein, 1199 aa, Spilosoma lubricipeda
MLTRARSRAQLLTPDSSLRSALPSSDARTEVPTVAEASSSSSSDEFFSPPTSPTPVRRQERYRPPDSLGPRGPLTSNRAPAAGGNVRRMKWTHSINENVMRAYFRATELGTNLTAYRVRLVSLFQELEPAVNVSAQRLSDQVRAIQRCHLLDDAVLERIRSDIRNSLAVPSSSHVVDTIVNTTSQLPRSEYIDELVDSEIISVSTQCNDTIRSTLEDAIREYRYVDSNNRPRLSRLPIYKRNLALVSALDSLLPDYFNNSEDLSDTHSILYCAAIAVCRVAGVNFVECKTATRPKNTVPAWQCRIERRIAGTRTLIGKLISFRSGNTRPKVMRFVKQAFLGTTVSPQQYMSCVTERIDFLKQKVYAWANRIRRYRKRTDRYNQNRTFQRNEKWVYQKWEKLSPCMSDEHLPDKNATNYFWRNIWSTPVTHTEGHWCRDVERSCESITPMEPVRIDKEDVSCAVRSLANWKAPGPDGLHNFWLKWFRSSHAYLASQFQTALDSGSLPQFLTTGITHLLHKSGSTMDPKNFRPITCLPTLYKLLTSILRLKITTHINNNSIISVSQNGCRSGTRGTKELLIIDMTISQQVRRNRKSLATCWIDYKKAYDSVPHTWLLRVLELYKIDTTLCTFLKSCMGQWRTVLRYPGCRQSTMNDVLIKIERGIFQGDSLSPLWFCLALNPLSTLLEGSGIGYRLQKDDRVISHLLYMDDLKLLAPTKLQLTALLKVTENFSNSIKMEFGVDKCAVMYVKKGLIVESEGVELSDSTKLRSLSATETYKYLGFSQSLGIPESDVKQMLRERFFGRLKKVLKSLLSGGNKVRAYNSWVMPVLMYSFGILRWTQTELDAFDRRVRTLLTAFRMHHPRSSVMRLYIPRKFGGRGLLNIKTLHNREIYNLREYFLHTDVEMHRNVVAVDTGLTPLALAKENWRKPVVLGTNDRREVWKGKELHGRFYRALNGPDIDFKASTSWLRYGDLFGETEGFVCAIMDEVIMTNNYRKYILKDGTVDICRACHRPGESIRHIISGCSRLANGEYLHRHNQVARIVHQQLALKYHLVNSEVPYYRYVPDPVLENGRATLYWDRSIITDRTIVANKPDIVVIDRLERRAMIVDIAVPHDENLVKAEKEKQIKYLDLSHEIVDMWNVDSAIIVPIVVSAHGLIARSLDQHLKRLTLDGWIKGLMQKAVLLDTARIVRRFLSLEP

SEQ ID NO: 10453 - protein, 999 aa, Spilosoma lubricipeda
MISFAELPFQLIIIIINAIQEYRYVNYNNRPRLPRLPIHKRNLALVSALNSLLPEYFGNSEDLSDTHSILYCAAIAVCRVAGIKFNVEQITTRPKNTVPAWQYRIERRIAETRTLIGKLIAFKFGNTRPRVMRFVKQAFLGTTISPQQYMSSVTERIDFLKQKVYAWANRIRRYKKRGDRFNQNRMFQRNEKWVYRKWEAPNPCESDGDLPDENTTNSFWRNIWSVPVTHTDGDWMRDVSRSCESITSMEPVIINEDDISCAVRSLANWKSPGPDGLHNFWLKWFRSSHACLASQLQAALDSGSLPQFLTTGITHLLFKSGSAMDPKNFRPITCLPTLYKLLTSILRLKITKHINNNSIISVSQNGCRSGTRGTKELLITDMTISQQVRRNRKSLATCWIDYKKAFDSVPHTWLLKVLELYKIDTTLCTFLESCMRQWRTVLRYPGCRQTAVNDVPIKIERGIFQGDSLSPLWFCLALNPLSTLLEDSGLGYRLQKEAPVISHLFYMDDLKLFAPTKLQLTALLRVTENFSNSIKMEFGIDKFAVMHVKKGVIVESEGIELSDSTRLRSLSATETYKYLGFSQSLGIPESDMKQSLRERFFGRLKKVLKSLLSGGNKVRAYNGWVMPVLMYSFGILRWTQTELDALDRRVRTLLTAFRMHHPRSSVMRLYIPRKFGGRGLLNVKTLHNREIYNLREYFLHTDVGVHRSVVAVDTGLTPLALAKENWRKPVVLGTNERREVWKGKELHGRFYRALNGSDIDFKASTSWLRYGDLFGETEGFVCAIMDEVIMTNNYRKYILKDGTVDICRACHRPGESIRHIISGCSRLANGEYLHRHNQVARIVHQQLALKYKLVNSEVPYYRYVPDPVLENGRATLYWDRSIITDRTIVANKPDIVVIDRSERRAMIVDIAVPHDENLVKVEKEKQIKYLDLSHEIVDMWDVDSVIIVPIVVSVHGLIAKSLDQHLKRLTLDGWIKGLMQKAVLLDTARIVRRFLSLEP

SEQ ID NO: 10454 - protein, 1199 aa, Spilosoma lubricipeda
MLTRARSRAQLLTPDSSLRSALPSSDARTEVPTVAEASSSSSSDEFFSPPTSPTPVRRQERYRPPDSLGPRGPLTSNRAPAAGGNVRRMKWTHSINENVMRAYFRATELGTNLTAYRVRLVSLFQELEPAVNVSAQRLSDQVRAIQRCHLLDDAVLERIRSDIRNSLAVPSSSHVVDTIVNTTSQLPRSEYIDELVDSEIISVSTQCNDTIRSTLEDAIREYRYVDSNNRPRLSRLPIHKRNLALVSALDSLLPDYFNNSEDLSDTHSILYCAAIAVCRVAGVNFVECKTATRPKNTVPAWQCRIERRIAGTRTLIGKLISFRSGNTRPKVMRFVKQAFLGTTVSPQQYMSCVTERIDFLKQKVYAWANRIRRYRKRTDRYNQNRTFQRNEKWVYQKWENLSPCMGDEHLPDKNATNYFWRNIWSTPVAHTEGHWCRDVERSCESITPMEPVRIDKEDVSCAVRSLANWKAPGPDGLHNFWLKWFRSSHAYLASQFQTALDSGSLPQFLTTGITHLLHKSGSTVDPKNFRPITCLPTLYKLLTSILRLKITAHINNNSIISVSQNGCRSGTRGTKELLIIDMTISQQVRRNRKSLATCWIDYKKAYDSVPHTWLLRVLELYKIDTTLCTFLKSCMGQWRTVLRYPGFRQSTMNDVLIKIERGIFQGDSLSPLWFCLALNPLSTLLEGSGIGYRLQKDDRVISHLLYMDDLKLLAPTKLQLTALLKVTENFSNSIKMEFGVDKCAVMYVKKGVIVESEGVELSDSTKLRSLSATGTYKYLGFSQSLGIPESDVKQMLRERFFGRLKKVLKSLLSGGNKVRAYNSWVMPVLMYSFGILRWTQTELDAFDRRVRTLLTAFRMHHPRSSVMRLYIPRKFGGRGLLNIKTLHNREIYNLREYFLHTDVEMHSNVVAVDTGLTPLALAKENWRKPVVLSTNDRREVWKGKELHGRFYRALNGPDIDFKASTSWLRYGDLFGETEGFVCAIMDEVIMTNNYRKYILKDGTVDICRACHRPGESIRHIISGCSRLANGEYLHRHNQVARIVHQQLALKYHLVNSEVPYYRYVPDPVLENGRATLYWDRSIITDRTIVANKPDIVVIDRLERRAMIVDIAVPHDENLVKAEKEKQIKYLDLSHEIVDMWNVDSAIIVPIVVSAHGLIARSLDQHLKRLTLDGWIKGLMQKAVLLDTARIVRRFLSLGP

SEQ ID NO: 10455 - protein, 868 aa, Spilosoma lubricipeda
MRFVKQAFLGTTVSPQQYMSCVTERIDFLKQKVYAWANRIRRYRKRTDRYNQNRTFQRNEKWVYQKWEKLSPCMSDEHLPDKNATNYFWRNIWSTPVTHTEGHWCRDVERSCESITPMEPVRIDKEDVSCAVRSLANWKAPGPDGLHNFWLKWFRSSHAYLASQFQTALDSGSLPQFLTTGITHLLHKSGSTMDPKNFRPITCLPTLYKLLTSILRLKITTHINNNSIISVSQNGCRSGTRGTKELLIIDMTISQQVRRNRKSLATCWIDYKKAYDSVPHTWLLRVLKLYKIDTTLCTFLKSCMGQWRTVLRYPGCRQSTMNDVLIKIERGIFQGDSLSPLWFCLALNPLSTLLEGSGIGYRLQKDDRVISHLLYMDDLKLLAPTKLQLTALLKVTENFSNSIKMEFGVDKCAVMYVKKGLIVESEGVELSDSTKLRSLSATETYKYLGFSQSLGIPESDVKQMLRERFFGRLKKVLKSLLSGGNKVRAYNSWVMPVLMYSFGILRWTQTELDAFDRRVRTLLTAFRMHHPRSSVMRLYIPRKFGGRGLLNIKTLHNREIYNLREYFLHTDVEMHRNVVAVDTGLTPLALAKENWRKPVVLSTNDRREVWKGKELHGRFYRALNGPDIDFKASTSWLRYGDLFGETEGFVCAIMDEVIMTNNYRKYSLKDGTVDICRACHRPGESIRHIISGCSRLANGEYLHRHNQVARIVHQQLALKYHLVNSEVPYYRYVPDPVLENGRATLYWDRSIITDRTIVANKPDIVVIDRLERRAMIVDIAVPHDENLVKAEKEKQIKYLDLSHEIVDMWNVDSAIIVPIVVSAHGLIARSLDQHLKRLTLYGWIKGLMQKAVLLDTDRIVRRFLSLEP

SEQ ID NO: 10456 - protein, 1198 aa, Ochropleura plecta
MLTRAAQARNARHPPPGSSLSSASPPPEPSLVVSAVTPAVAVASSSSDEYFSPPTTPPPVRRRGRHRPPDGLGPRGPPASDRVPAPGGSVQRMRWTQSINENVMRSYYGATEGGNNLTAYRVRMLSLFQVLEPAVNVSAQRLSDQVRVIQRNRMLDDTVLDRLRTEMQSSQVITSSSQAVVPPQPHQLINRVNEESNDVATNVSTQCSEEMRSTLEGAIREYRYISPELTPRLPRLPMHNKNRALVAALDSQLSSYFDNCENLTDAHSILYCAAVTVCRVAHVKFPDDRATRPKPAIPFWQCRIERRIGAARALIGKLTCFREGNTRPRVMRFVRRAFAGTDISPPDYISRIAERIDFLKQKVYAWANRIRKYKRRVERYTQNRTFQSDERWVYRAWERPDQGVSDTCLPDDDAMSLFWRSIWSVPVSHTEGEWTREVERACDPIPEMGALTISPQDVACAVRPLPNWKSPGPDGLHNFWIKWIQRSHVRLAALFQSALESGSLPKFLTTGITHLLHKSGSTAEPKNYRPITCLPTLYKVLTSILRAKITKHIDDNSIMSASQNGCRNGSRGTKELLLIDMAISQQVRRSRRHLSTCWIDYKKAYDSVPHTWLMRVLDLYKIDATLRTFLISCMRQWSTVLRYPGCRQIQRNSEPIRIERGIFQGDSLSPLWFCLALNPLSTLLENSGLGYRLKRGGQVISHLLYMDDLKLFAPNDLQLMELLKVTETFSSAIRMEFGVDKCAVMHVKRGEIVESVGTQLSDSINLRSLSATETYKYLGMSEALGINVADMKQLLKERFFGRLRKVFNSLLSGGNKVRAFNGWVMPVLMYSFGILKWTQTELDALDRKVRTLLTAFRMHHPRSSVMRLYIPRSCGGRGFLNAKTLHNREICSLREYFLETDVGMHRDVVAVDKGLTPLSLAKENWRKPVVLDTNDRREVWQSKELHGRFFRALHGPDVDQSASVAWLRSGDLFGETEGFVCAIMDEVMMTNNYRRFIVKDGTVDICRACHRPGESIRHIISGCSRLANGEYLHRHNLVARIIHQQLALKYNLVESEVPYYRYEPDPVLEHGYITLYWDRSIITDRTVVANKPDIVVVDRSERRAMIVDITVPHDENLVKAEKDKQIKYIDLAREVVDMWDVDSAIIVPIVVSANGLIAKSLDQYLRRLSLGSWIKGLIQKAVLLDTARIVRRFLSLEP

SEQ ID NO: 10457 - protein, 1198 aa, Ochropleura plecta
MITRLAARQHARLPPPDSPLSSASPPPEPSLIVSAVTPAVAVASSSSDEYFSPPTTPPPACRRGGRRPPDGLGLRGPLASDRVPAPGGSVQRMRWTSSINENVMRSYYGATEGGNNLTAYRVRMLSLFQVLEPAVNVSAQRLSDQVRVIQRNRMLDDTVLDRLRTEMQSSQVITSSSQAVVPPQSHQLVSHADEVSNDMATNVSTQCNEKMRIALEGAIQEYRYISPELRPRLPRLPMHNKNRALVAVLDSQLSNYFDNCENLTDAHSILYCAAVAACRVAHVKFPDDGATRPKPAVPFWQCRIERRIGVARALIGKLICFREGNTRPRVMRFVRRAFAGTDISPPDYMSHITERIDFLKQKVYAWANRIRRYKRRVERYTLNRTFQSDERWVYRAWERPDQGVSDTHLPDDDAMCLFWRNIWSVPVSHTEGEWTREVERACDPIPEMGALTISPQDVACAVRPLPNWKSPGPDGLHNFWLKWIQRSHARLATLFQTALESGSLPKFLTTGITHLLHKSGSTTEPKNYRPITCLPTIYKVLTSILRAKITKHIDDNSIMSASQNGCRNGSRGTKELLLIDMAISQQVRRSRRHLSTCWIDYKKAYDSVPHTWLMRVLELYKVDATLCTFLSSCMRQWNTVLRYPGCRQIQRNSEPIRIERGIFQGDSLSPLWFCLALNPLSTLLEDSGLGYRLRRGGRVISHLLYMDDLKLFAPNDSQLMELLKVTETFSSAISMEFGVDKCAVMHVKRGEIVESVGTQLSDSIHLRSLSANETYKYLGMSEALGINVADMKQSLKERFFGRLRKVFNSLLSGGNKVRAFNGWVMPVLMYSFGILKWTQTELDALDRKVRTLLTAYRMHHPRSSVMRLYIPRSCGGRGFLNAKTLHNREICSLREYFLEADVGMHRDVVTVDKGFTPLSLAKENWRKPVVLDTNDRREVWQSKELHGRFFRALHGPDVDQPASVAWLRSGDLFGETEGFVCAIMDEVMMTNNYRRFIVKDGTVDICRACHRPGESIRHIISGCSRLANGEYLHRHNLVARIIHQQLALKYSLVESEVPYYRYEPDPVLEHGNITLYWDRSIITDRTIVANKPDIVVVDRSERRAMIVDITVPHDENLVKAEKDKQIKYIDLAREVVDMWDVDSAIIVPIVVSANGLIAKSLDQHLRRLSLGSWIKGLIQKAVLLDTARIVRRFLSLEP

SEQ ID NO: 10458 - protein, 1198 aa, Ochropleura plecta
MITRLAARQHARLPPPDSPLSSASPPPEPSLIVSAVTPAVAVASSSSDEYFSPPTTPPPACRRGGRRPPDGLGLRGPLASDRVPAPGGSVQRMRWTSSINENVMRSYYGATEGGNNLTAYRVRMLSLFQVLEPAVNVSAQRLSDQVRVIQRNRMLDDTVLDRLRTEMQSSQVITSSSQAVVPPQSHQLVSHADEVSNDMATNVSTQCNEEMRIALEGAIREYRYISPELRPRLPRLPMHNKNRALVAVLDSQLSNYFDNCENLTDAHSILYCAAVAACRVAHVKFPDDGATRPKPAVPFWQCRIERRIGVARALIGKLICFREGNTRPRVMRFVRRAFAGTDISPPDYMSHITERIDFLKQKVYAWANRIRRYKRRVERYTLNRTFQSDERWVYRAWERPDQGVSDTHLPDDDAMCLFWRNIWSVPVSHTEGEWTREVERACDPIPEMGALTISPQDVACAVRPLPNWKSPGPDGLHNFWLKWIQRSHARLATLFQTALESGSLPKFLTTGITHLLHKSGSTTEPKNYRPITCLPTIYKVLTSILRAKITKHIDDNSIMSASQNGCRNGSRGTKELLLIDMAISQQVRRSRRHLSTCWIDYKKAYDSVPHTWLMRVLELYKVDATLCTFLSSCMRQWNTVLRYPGCRQIQRNSEPIRIERGIFQGDSLSPLWFCLALNPLSTLLEDSGLGYRLRRGGRVISHLLYMDDLKLFAPNDSQLMELLKVTETFSSAISMEFGVDKCAVMHVKRGEIVESVGTQLSDSIHLRSLSANETYKYLGMSEALGINVADMKQSLKERFFGRLRKVFNSLLSGGNKVRAFNGWVMPALMYSFGILKWTQTELDALDRKVRTLLTAYRMHHPRSSVMRLYIPRSCGGRGFLNAKTLHNREICSLREYFLEADVGMHRDVVTVDKGFTPLSLAKENWRKPVVLDTNDRREVWQSKELHGRFFRALHGPDVDQPASVAWLRSGDLFGETEGFVCAIMDEVMMTNNYRRFIVKDGTVDICRACHRPGESIRHIISGCSRLANGEYLHRHNLVARIIHQQLALKYSLVESEVPYYRYEPDPVLEHGNITLYWDRSIITDRTIVANKPDIVVVDRSERRAMIVDITVPHDENLVKAEKDKQIKYIDLAREVVDMWDVDSAIIVPIVVSANGLIAKSLDQHLRRLSLGSWIKGLIQKAVLLDTARIVRRFLSLEP

SEQ ID NO: 10459 - protein, 1068 aa, Hecatera dysodea
MLEPAVNVSAQRLSDQVRVIQRNRMLDDSVLDRLRTEICSHVIVPSPQTVAPPQLTQIPCHADEENNDRVTNVSTQCNDELRSALESAIREYRYVSPELRPRIPRLPMHNKNRALVAALDSQLSNYFDNCEDLTDAHSIMYCAAVAACRVAHVKMPSDRVTRPKVAVPAWQCRIERRIGGARALIGKLICFREGNTRPRVMRFVRRVFSGTDISPSDYLSRVTERIDFLKQKVYAWANRIRRYKRRVERYTQNRTFRSNERWVYKAWERPDQDVTDMHPPDDDAMCSFWRNIWSVPVSHTEGDWIREVERACDPLPEMGAIIISPQDVARAVRPLPNWKSPGPDGLHNFWIKWFKGSHACLASRYQAALESGSLPEFFMTGVTHLLHKSGSTAEPKNYRPITCLPTVYKVLTSILRDKINQHINSNNIMSASQNGCRNGSRGTKELLLIDMAISQQVRRSRKDLSTCWIDYKKAYDSVPHSWLMRVLELYKIDTTLRTFLMSCMGQWRTVLRYPGCRNIQRNSEPVRIERGIFQGDSLSPLWFCLALNPLSTLLENSGLGYRLRRGGQVISHLLYMDDLKLFAPTNLQLMELLKVTETFSNAIRMEFGVDKCAVMHVKRGEIMESVGTQLSDSINLRSLSSTETYKYLGMSEALGINVTDMKQSLRERFFGRLKKVLNSLLSGGNKVRAFNGWVMPVLMYSFGVLKWTQTELDALDRRVRTLLTAYRMHHPRSSVMRLYIPRKCGGRGFLNAKTLHNREICSLREYFLAVDVGMHRDVVAVDKGLTPLSLANENWRKPAVLDTNDRRAVWQSKELHGRFFRALHGPDVDQLASVAWLRFGDLFGETEGFVCAIMDEVIMTRNYRRFIVKDGTVDICRACHRPGESIRHIVSGCSSLANGEYLHRHNLVARIIHQQLALKYSLVESEVPYYRYVPDPVLDNGNITLYWDRSIITDRTIVANKPDIVVVDRIVRRAMIVDITVPHDENLVKAEKDKQIKYLDLAREVVDMWDVDSAIIVPIVVSVNGLIAKSLDQHLRRLTLGGWIKGLIQKAVLLDTARIVRRFLSLEP

SEQ ID NO: 10460 - protein, 1107 aa, Hecatera dysodea
MNKGNNNNDNVMRSYFGVTEGGTNLTAYRGRMLSLFQVLEPAVNVSAQRLSDQVRVIQRNRMLDDAVLDRLRLESRSSRVSPASPPAAVQIQPSISPRPDHVSEDVDDGAITVSTQCNERLRSALEDAFREYRSTPPGLRPRLPRLPMHNKNRALVCALDSQLENCFNSSKDLADTHSILYCAAAAACRVAHVKFPNSDRAARPAVPVWQCRIERRIGEARAIIGKLICFREGNTRRRVMRFVRRAFSGTDISPRDYLTRVTERIDFLKQKVYAWASRIRRYKRRVERYTQNRTFQSNERWVYRAWERPDQVVTDTHLPDDDAMCSFWRSIWSVPVSHTEGDWTREVERTCDPIPEMGAITISPQDVARAVRPLPNWKSPGPDGLHNFWIKWFTRSHARLASQFQSALESRSLPQFLTTGITHLLHKSGSTAEPKNYRPITCLPTVYKVLTSILRAKINDHIESNSIMSTSQNGCRNGARGTKELLLIDVAISQQVRRSRKDLSTCWIDYKKAYDSVPHTWLMRVLELYKVNTVLRTFLMSCMGQWRTVLHYPGCRQTQANSEPIRIERGIFQGDSLSPLWFCLALNPLSTLLEGSGQGYRLRRGGQVISHLLYMDDLKLFAPNNLQLMKLLKVTETFSSDISMEFGVDKCAVMHVKRGEIMESVGTQLSDSIYLRSLCSTETYKYLGMSEALGINATSVKQSLKERFFGRLNKVLNSLLSGGNKVRAFNGWVMPVLMYSFGILKWTQTELDALDRKVRSLLTANRMHHPRSSVMRLYIPRKCGGRGFLNAKTLHNREVCSLREYFLEADVGMHRDVVAVDKGLTPLSLANENWRKPVVLDTNDRREVWQSKELHGRFYRVLHGPDVDFLASVAWLRFGDLFGETEGFICVITDEVMMTNNYRKYIVKDGTVDICRACHRPGESIRHIISGCSSLANGDYLHRHNLVARIIHQQLALKYNLVESEVPYYRYVPDPVLENGNCTLYWDRSIITDRTIVANKPDIVVIDRLERRAMIVDIAVPHDENLVKAEKDKQSKYLDLAREVVDMWNVNTAVIVPIIVTANGIIAKSLDQHLKRLSLGSWIKGLIQKAVLLDTARIVRRFLSREP

SEQ ID NO: 10461 - protein, 1200 aa, Hecatera dysodea
MLTRSRTRAQTTQSTSSGSSLSSASQPPGPTPAVSPEIPVAAVASSSSDEYFSPPTTPPPARRRGRGRPPTSLGPRGPPASDRVPAIGGSVQRMRWTQSINENVMRSYFGATEGGTNLTAYRGRMLSLFQVLEPAVNVSAQRLSDQVRVIQRNRMLDDAVLDRLRLESRSSRVSPASPPAAVQIQPSISPRPDHVSEDVDDGAITVSTQCNERLRSALEDAFREYRSTPPELRPRLPRLPMHNKNRALVCALDSQLENCFNSSKDLADTHSILYCAAAAACRVAHVKFPNSDRATRPAVPAWQCRIERRIGEARALIGKLICFREGNTRRRVMRFVRRAFSGTDISPRDYLTRVTERIDFLKQKVYAWASRIRRYKRRVERYTQNRTFQSNERWVYRAWERPEQVVTDTHLPDDDAMCSFWRSIWSVPVSHTEGDWTREVERTCDPIPEMGAITISPQDVARAVRPLPNWKSPGPDGLHNFWIKWFTRSHVRLASQFQSALESRSLPQFLTTGITHLLHKSGSTAEPKNYRPITCLPTVYKVLTSILRAKINDHIESNSIMSTSQNGCRNGARGTKELLLIDVAISQQVRRSRKDLSTCWIDYKKAYDSVPHTWLMRVLELYKVDAVLRAFLMSCMGQWRTVLHYPGCRQTQANSEPIRIERGIFQGDSLSPLWFCLALNPLSTLLEGSGQGYRLRRGGQVISHLLYMDDLKLFAPNNLQLMKLLKVTETFSSDISMEFGVDKCAVMHVKRGEIMESVGTQLSDSIHLRSLCSTETYKYLGMSEALGINATSVKQSLKERFFGRLNKVLNSLLSGGNKVRAFNGWVMPVLMYSFGILKWTQTELDALDRRVRSLLTANRMHHPRSSVMRLYIPRKCGGRGFLNAKTLHNREVCSLREYFLEADVGMHRDVVAVDKGLTPLSLANENWRKPVVLDTNDRREVWQSKELHGRFYRVLHGPDVDFLASVAWLRFGDLFGETEGFICAITDEVMMTNNYRKYIVKDGTVDICRACHRPGESIRHIISGCSSLANGDYLHRHNLVARIIHQQLALKYNLVESEVPYYRYVPDPVLENGNCTLYWDRSIITDRTIVANKPDIVVIDRLERRAMIVDIAVPHDENLVKAEKDKQSKYLDLAREVVDMWNVNTAVIVPIVVTANGIIAKSLDQHLKRLSLGSWIKGLIQKAVLLDTARIVRGFLSREP

SEQ ID NO: 10462 - protein, 1200 aa, Mythimna impura
MLTRSRAKKANTHPTSSGSSLSSASQPPGPAPTVSPEIPVAAVASSSSDEYFSPPTTPPPARRRGRGRPPASLGPRGPPASDRVLAAGGSVQRMRWTQSINENVMRSYFGATEGGSNLTAYRGRMLSLFQVLEPAVNVSAQRLSDQVRVIQRNRMLDDAVLDRLRLESRSSRVSPASPQAAVQLQSNVSLRPDHVGEDDDDGAISVSNQCNVRLRSALEDAFREYRFTPAELRPRLPRLPMHKKNRALVCALDSQLSNCFDSSKDLTDTHSILYCAAVAACRVARVKFPNSDRVTRPAVPAWQCRIERRIGEARALIGKLICFREGNTRPRVMRFVRRAFSGTNISPRDYLPHITERIDFLKQKVYAWANRIRRYKRRVERYTQNRTFQRNERWVYRAWERPDQGVIDTRLPDDDAMCSFWRSIWSVPVSHTEGDWTREIERTCDLIPEMEPITISPQDVARAVRPLPNWKSPGPDGLHNFWLKWFQRSHARLASQFQSALESGSLPQFFTTGITHLLHKSGSTAEPKNYRPITCLPTVYKVLTSILRAKINSHIETNSIMSASQNGCRNGSRGTKELLLIDVAISQQVRRSRRDLSTCWIDYKKAYDSVPHTWLMRVLELYKVDATLRTFLMSCMRQWRTALHYPGCRQIRESNEPIRIERGIFQGDSLSPLWFCLALNPLSTLLEGSGLGYRLKRGGQVISHLLYMDDLKLFASNNLQLMELLKVTETFSSAIRMEFGLDKCAVMHVKRGEIMESVGTQLSDSIYIRSLCSTETYKYLGMSEALGINAADMKQSLRERFFGRLNKVLNSLLSGGNKVRAFNGWVMPVLIYSFGILKWTQTELDALDRRVRSLLTANRMHHPRSSVMRLYIPRKCGGRGFLNAKTLHNREICSLREYFLKTDVGMHRDVAAVDKGLTPLSLVNENWRKPTVMDTNERRAVWQGKELHGRFYRALHGPDVDLLASVSWLRFGDLFGETEGFVFAIMDEVMMTNNYRKYIVKDGTVDICRACHRPGESIRHIISGCSHLANGDYLHRHNLVARIIHQQLALKYNLVESEVPYYRYVPDPVLENGSVTLYWDRSIITDRTIVANKPDIVVIDRLERRTMIVDIAVPHDENLVKAEKDKQTKYLDLAREVVDMWEVDRAVIVPIVVTANGLIAKSLEQHLRRLSLGSWIKGLIQKAVLLDTARIVRRFLSQEP

SEQ ID NO: 10463 - protein, 1200 aa, Mythimna impura
MLTRAAARRARLPPPASSLSSASPPPESSPTVSAVTPAVAVASSSSDEYFSPPTSPPPARRRRGRRPPSGLGPRGPPASDRVPAPGGSVQRMRWTQSINENVMRAYYGATEGGNNLTAYRVRMLSLFQVLEPAVNVSAQRLSDQVRVIQRNHMLDDTVLDRLRTEMSNHAIAPSSQPVVPVMVPPSYHLSDHADEEITDMVTHVSTQCNNELRSALECAIREYRNMPLELRPRLPRLPMHNKNKALVAALDLQLSNYFDDCEDLTDTHSIMYCAAVAACRVAHVKFPSCDVSTRPKPAVPAWQCRIERRIGGARALIGKLICFREGNTRPRVMRFVRRAFSGTDISPRDYMSRVTERIDFLKQKVYAWANRIRRYKRRVERYTQNRTFRNNERWVYRAWERPDQGVTDTRLPDDDAMSSFWRSIWSVPVSHTEGDWTREVERACDPIPQMGAIDISPQDVARAVRPLPNWKSPGPDGLHNFWIKWFTRSHARLAYQFQSALESGSLPQFLTTGITHLLHKSGSTAEPKNYRPITCLPTVYKVLTSILRSKINSHIDKNLIMSPSQNGCRNGSRGTKELLLIDMTISQQVRRFRKDLSTCWIDYKKAYDSVPHTWLMRVLELYKIDTTLRTFLMSCMRQWSTVLRYPGCRHIQRNSEPVRIERGIFQGDSLSPLWFCLALNPLSTLLENSGLGYRLKRGGQVISHLLYMDDLKLFAPNNLQLMELLKVTETFSSAIRMEFGVEKCAVMHVKRGEVLESVGTQLTDSINLRSLSPTETYKYLGMSEALGINITDMKQSLKERFFGRLKKVFNSLLSGGNKVRAFNGWVMPVLMYSFGVLKWTQTELDALDRRVRTLLTAYRMHHPRSSVMRLYIPRKCGGRGFLNAKTLHNREVCSLREYFLATDVGMHRDVVAVDKGLTPLSLANENWRKPVVLDTNDRREVWQSKELHGRFFRAFHGPDVDQLASVAWLRFGDLFGETEGFVCAIMDEVIMTNNYRRFIVKDGTVDICRACHRPGESIRHIISGCSRLANGEYLHRHNLVARIIHQQLALKYSLVESEVPYYRYEPDPVLDNGHITLYWDRPIITDRTIVANKPDIVVVDRSERRAMIVDISVPHDENLVKAEKDKQIKYIDLAREIVDMWDVDSAIIVPIVVSANGLIAKSLDQHLRRLALGGWIKALIQKAVLLDTARIVRRFLSLEP

SEQ ID NO: 10464 - protein, 1200 aa, Mythimna impura
MLTRSRAKKANTHPTSSGSSLSSASQPPGPAPTVSPEIPVAAVASSSSDEYFSPPTTTPPARRRGRGRPPASLGSRGPPASDRVLAAGGSVQRMRWTQSINENVMRSYFGATEGGSNLTAYRGRMLSLFQVLEPAVNVSAQRLSDQVRVIQRNRMLDDAVLDRLRLESRSSRVSPASPQAAVQLQSNVSLRPDHVGEDDDDGAISVSNQCNVRLRSALEDAFREYRFTPAELRPRLPRLPMHKKNRALVCALDSQLSNCFDSSEDLTDTHSILYCAAVAACRVARVKFPNSDRVTRPAVPAWQCRIERRIGEARALIGKLICFREGNTRPRVMRFVRRAFSGTDISPRDYLPHITERIDFLKQKVYAWANRIRRYKRRVERYTQNRTFQRNERWVYRAWERPDQGVIDTRLPDDDAMCSFWRSIWSVPVSHTEGDWIREIERTCDLIPEMGAITISPQDVARAVRPLPNWKSPGPDGLHNFWLKWFQRSHARLASQFQSALESGSLPQFLTTGITHLLHKSGSTAEPKNYRPITCLPTVYKVLTSILRAKINSHIETNSIMSASQNGCRNGSRGTKELLLIDVAISQQVRRSRRDLSTCWIDYKKAYDSVPHTWLMRVLELYKVDATLRTFLMSCMRQWRTALHYPGCRQIRESSEPIRIERGIFQGDSLSPLWFCLALNPLSTLLEGSGLGYRLRRGGHVISHLLYMDDLKLFASNNLQLMELLKVTETFSSAIRMEFGLDKCAVMHVKRGEIMESVGTQLSDSIYIRSLCSTETYKYLGMSEALGINAADMKQLLRERFFGRLNKVLNSLLSGGNKVRAFNGWVMPVLMYSFGILKWTQTELDALDRRVRSLLTANRMHHPRSSVMRLYIPRKCGGRGFLNAKTLHNREICSLREYFLKTDVGMHRDVVAVDKGLTPLSLVNENWRKPTVMDTNERRAVWQGKELHGRFYRALHGPDVDLLASVSWLRFGDLFGETEGFVFAIMDEVMMTNNYRKYIVKDGTVDICRACHRPGESIRHIISGCSHLANGDYLHRHNLVARIIHQQLALKYNLVESEVPYYRYVPDPVLENGGVTLYWDRSIITDRTIVANKPDIVVIDRLERRTMIVDIAVPHDENLVKAEKDKQTKYLDLAREVVDMWEVDRAIIVPIVVTANGLIAKSLEQHLRRLSLGSWIKGLIQKAVLLDTARIVRRFLSQEP

SEQ ID NO: 10465 - protein, 1200 aa, Mythimna impura
MLTRSRAQKLHTHPTSSGSSLSSASQPPGPAPTVSPEIPVAAVASSSSDEYFSPPTTPPPARRRGRGRPPASLGPRGLPASDRVPAAGGSVQRMRWTSSINENVMRSYFGATEGGINLTAYRGRMLSLFQVLEPAVNVSVQRLSDQVRVIQRNRMLDDAVLDRLRLESQSSRVSPATTPAAVQRLPTASPRPVQVGDADDDAAISVSTQCNDRLRGALEDAFREYRSTPPGLRPRLPRLPMHKRNRALVCALDSQLSNCFDSSKDLTDTHSILYCAAVAACRVAHVKFPNCDRATRPAVPAWQCRIEHRIGEARALIGKLICFREGNTRPRVMRFVRRAFSGTDISPRDYLPCVTERIDFLKQKIYAWANRIRRYKRRVERYTRNRTFQSNERWVYRDWERSDQGVTDTRLPDDDAMCTFWRSIWSAPVSHTEGDWIREVERACDLLPEMGAITISPQDVARAVRPLPNWKSPGPDGLHNFWVKWFQRSHARLASQFQSALESGSLPQFLTTGITHLLHKSGSTAEPKNYRPITCLPTVYKVLTSILRAKINSHIETNSIMSASQNGCRNGSRGTKELLLIDIAISQQVRRSRKNMSACWIDYKKAYDSVPHTWLMRVLELYKVDATLRTFLMSCMGQWRTVLHYPGCRQIQENNEPIRIERGIFQGDSLSPLWFCLALNPLSTLMEGSGLGYRLKRGGQVISHLLYMDDLKLFAPNNLQLVELLKVTETFSSAIRMEFGVDKCAVIHVKRGEIMESVGIQLSDSIHLRSLCSTETYKYLGMSESLGINTDDVKQSLKERFFGRLNKVLNSLLSGGNKVRAFNGWVMPVLMYSFGILKWTQTELDALDRRVRTLLTANRMHHPRSSVMRLYIPRKCGGRGFLNAKTLHNREVCSLREYFLKTDVGMHRDVVAVDKGLTPLSLANENWRKPIVLDTNDRREVWQSKELHGRFYRALHGPDVDLLASVSWLRFGDLFGETEGFVFAIMDEVMMTNNYRKYIVKDGTVDICRACHRPGESIRHIISGCSHLANGDYLHRHNLVARIIHQQLALKYNLVESEVPYYRYVPDPVLDNGNITLYWDRSIITDRTIVANKPDIVVIDRLERRTMIVDIAVPHDENLVKAEKDKQTKYLDLAREVVDMWEVDRAIIVPIVVTANGLITKSLEQHLRRLSLGSWIKGLIQKAVLLDTARIVRRFLSQEP

SEQ ID NO: 10466 - protein, 1200 aa, Mythimna impura
MLTRAAARRARLPPPASSLSSASPPPESSPTVSAVTPAVAVASSSSDEYFSPPTSPPPARRRRGRRPPSGLGPRGPPASDRVPAPGGSVQRMRWTQSINENVMRAYYGATEGGNNLTAYRVRMLSLFQVLEPAVNVSAQRLSDQVRVIQRNHMLDDTVLDRLRTEMSNHAIAPSSQPVVPVMVPPSYHLSDHADEEITDMVTHVSTQCNNELRSALECAIREYRNMPLELRPRLPRLPMHNKNKALVAALDLQLSNYFDDCEDLTDTHSIMYCAAVAACRVAHVKFPSCDVSTRPKPAVPAWQCRIERRIGGARALIGKLICFREGNTRPRVMRFVRRAFSGTDISPRDYMSRVTERIDFLKQKVYAWANRIRRYKRRVERYTQNRTFRSNERWVYRAWERPDQGVTDTRLPDDDAMSSFWRSIWSVPVSHTEGDWTREVERACDPIPQMGAIDISPQDVARAVRPLPNWKSPGPDGLHNFWIKWFTRSHARLAYQFQSALESGSLPQFLTTGITHLLHKSGSTAEPKNYRPITCLPTVYKVLTSILRSKINSHIDKNLIMSPSQNGCRNGSRGTKELLLIDMTISQQVRRFRKDLSTCWIDYKKTYDSVPHTWLMRVLELYKIDTTLRTFLMSCMRQWSTVLRYPGCRHIQRNSEPVRIERGIFQGDSLSPLWFCLALNPLSTLLENSGLGYRLKRGGQVISHLLYMDDLKLFAPNNLQLMELLKVTETFSSAIRMEFGVDKCAVMHVKRGEVVESVGTQLTDSINLRSLSPTETYKYLGMSEALGINITDMKQSLKERFFGRLKKVFNSLLSGGNKVRAFNGWVMPVLMYSFGVLKWTQTELDALDRRVRTLLTAYRMHHPRSSVMRLYIPRKCGGRGFLNAKTLHNREVCSLREHFLATDVGMHRDVVAVDKGLTPLSLANENWRKPVVLDTNDRKEVWQSKELHGRFFRAFHGPDVDQLASVAWLRFGDLFGETEGFVCAIMDEVIMTNNYRRFIVKDGTVDICRACHRPGESIRHIISGCSRLANGEYLHRHNLVARIIHQQLALKYSLVESEVPYYRYEPDPVLDNGHITLYWDRSIITDRTIVANKPDIVVVDRSERRAMIVDISVPHDENLVKAEKDKQIKYIDLAREVVDMWDVDSAIIVPIVVSANGLIAKSLDQHLRRLALGGWIKALIQKAVLLDTARIVRRFLSLEP

SEQ ID NO: 10467 - protein, 1200 aa, Mythimna impura
MLTRAAARRARLPPPASSLSSASPPPESSPTVSAVTPAVAVASSSSDEYFSPPTSPPPARRRRGRRPPSGLGPRGPPASDRVPAPGGSVQRMRWTQSINENVMRAYYGATEGGNNLTAYRVRMLSLFQVLEPAVNVSAQRLSDQVRVIQRNHMLDDTVLDRLRTEMSNHAIAPSSQPAVPVMVPPSYHLSDHADEEITDMVTHVSTQCNNELRSTLECAIREYRNMPLELRPRLPRLPMHNKNKALVAALDLQLSNYFDDCEDLTDTHSIMYCAAVAACRVAHVKFPSCDVSTRPKPAVPAWQCRIERRIGGARALIGKLICFREGNTRPRVMRFVRRAFSGTDISPRDYMSRVTERIDFLKQKVYAWANRIRRYKRRVERYTQNRIFRSNERWVYRAWERPDQGVTDTRLPDDDAMSSFWRSIWSVPVSHTEGDWTREVERACDPIPQMGAIDISPQDVARAVRPLPNWKSPGPDGLHNFWIKWFTRSHARLAYQFQSALESGSLPQFLTTGITHLLHKSGSTAEPKNYRPITCLPTVYKVLTSILRSKINSHIDKNLIMSPSQNGCRNGSRGTKELLLIDMTISQQVRRFRKDLSTCWIDYKKAYDSVPHTWLMRVLELYKIDTTLRTFLMSCMRQWSTVLRYPGCRHIQRNSEPVRIERGIFQGDSLSPLWFCLALNPLSTLLENSGLGYRLKRGGQVISHLLYMDDLKLFAPNNLQLMELLKVTETFSSAIRMEFGVDKCAVMHVKRGEVVESVGTQLTDSINLRSLSPTETYKYLGMSEALGINITDMKQSLKERFFGRLKKVFNSLLSGGNKVRAFNGWVMPVLMYSFGVLKWTQTELDALDRRVRTLLTAYRMHHPRSSVMRLYIPRKCGGRGFLNAKTLHNREVCSLREYFLATDVGMHRDVVAVDKGLTPLSLANENWRKPVVLDTNDRREVWQSKELHGRFFRAFHGPDVDQLASVAWLRFGDLFGETEGFVCAIMDEVIMTNNYRRFIVKDGTVDICRACHRPGESIRHIISGCSRLANGEYLHRHNLVARIIHQQLALKYSLVESEVPYYRYEPDPVLDNGHITLYWDRSIITDRTIVANKPDIVVVDRSERRAMIVDISVPHDENLVKAEKDKQIKYIDLAREVVDMWDVDSAIIVPIVVSANGIIAKSLDQHLRRLALGGWIKALIQKAVLLDTARIVRRFLSLEP

SEQ ID NO: 10468 - protein, 1200 aa, Mythimna impura
MLTRSRAREQETHPTSSGSSLSSASQPPGPAPAVSPVIPAAAVASSSSDEYFSPPTTPPPARRRGRGRPPASLRPRGPPASDRVPAAGGSVQRMRWTQSINENVMRSYFGATEGGSNLTAYRGRMLSLFQVLEPTVNVSAQRLSDQVRVIQRNRMLDDAVLDRLRLESQRSRASSATPPAAVQLQPSALPRPDHVGDADDDAAISVSTQCNERLRSALEDAFREYRSTPPGLRPRLPRLPMHKRNRALVCALDSQLSNCFDSSKDLADTHSILYCAAAAACRVAHVKFPNCDRATRPAVPAWQRRIERRIGEAKALIGKLICFREGNTRPRVMRFVRRAFLGTDISPQNYLPCVTERIDFLKQKVYAWASRIRRYKRRVERYTQNCTFQSNERWVYRTWERPDQDVTDTRLPDDDAMCSFWRRIWSVPVSHIEGDWIREVERTCDLLPEMGAITISPQDVARAVRPLPNWKSPGPVGLHNFWIKWFQGSHARLASQFQSALESGSLPEFLTTGITHLLHKSGSTADPKNYRPITCLPTVYKVLTSILRAKINTHIETNSIMSASQNGCRNGSRGTKELLLIDMAISQQVRRSRKDLSTCWIDYKKAYDSVPHTWLMRVLELYKVDTTLRTFLMSCMRQWRTVLHYPGCRQIRENSEPIRIERGIFQGDSLSPLWFCLALNPLSTLLEGSGLGYRLKRGGQVISHLLYMDDLKLFAPNNLHLMELLKVTETFSSAIRMEFGVDKCAVMHVKRGEIMESVGTQLSDSIYLRSLCSTETYKYLGMSEALGINAADMKQSLKERFFGRLNRVLKSLLSGGNKVRAFNGWVMPVLMYSFGILKWTQTELDALDKRVRTLLTANRMHHPRSSVMRLYIPRKCGGRGFLNAKTLHNREVCSLREYFLETDVGMHRDVVAVDKVLTPLSLANGNWRKPIILDTNDRREVWQSKELHGRFYRALHGPDVDLLASVSWLRFGDLFGETEGFVCAIMDEVVMTNNYRKYIVKDGTADICRACHRPGESIRHIISGCSHLANGDYLHRHNLVARIIHQQLALKYNLVESEVPYYKYVPDPVLDNGSITLYWDRSIITDRTIVANKPDIVVIDRLERRTVIVDIAVPHDDNLVKAEKDKQTKYLDLAREVVDMWEVDTAVIVPIVVTANGLISKSLDQHLRRLSLGSWIKGLIQKAVLLDTARIVRRFLSQEP

SEQ ID NO: 10469 - protein, 962 aa, Mythimna impura
MHKKNRALVCTLDSLLKNIFESSENLVDTHSILYCGAVAACRLANIKFPNTDGTIRPKPAAPAWQYRIERRIDGARVLIGKLHSFREGNTRPRVMRFVRRAFLGTSISPQEYMSRVTERIDFLKQKVCAWASRIRRYKRRVDRYSQNRIFQSDERWVYRAWERPEQNVIDGLRPDDFATITFWRNIWSVPVSHTEGGWIREVERVCEAIPEMEKITISPADVAKAVRPLPNWKSPGPDGLQNFWLKWYRNSHAPLASQFQSTLESGSLPEYLTTGVTHLLHKTGNPAEPKNYRPITCLSTVYKLLTSILREKINRHIENNSIMSASQNGCRNGSRGTKELLLIDMAVSQQARRSRKDLSTCWIDYKKAYDSVPHTWLMRVLELYKIDTTLRTFLESCMRQWKTVLRYPGCRPIQGDDEPIRIKRGIFQGDSLSPLWFCLALNPLSTLLEDSGLGYRLRRGGQAISHLLYMDDLKLFAPSNLQLMELLKVTETFSSAIRMEFGVDKCAAMHVKQGEIMESEGIQLPDSIHLKSLSSTETYRYLGMSEALGINNADMKQSLKERFFGRLKKVLNSLLSGGNKVRAFNGWVMPVLMYSFGILKWTQTELDALDRRVRTLLTANRMHHPRSSVMRLYISRKCGGRGFLNAKTLHNREVCSLREYFLKTDVGMHRDVVAVDKGLTPLSMAKEDWRKPVVLTTDDRKEVWKGKELHGRFYRALHEPDVDFLASVAWLRFSDLFGETEGFVCAIMDEVILTNNYRKYIMKDGTVDVCRACHRPGESIRHIISGCSRLANGEYLHRHNQVARIIHQQLALKYNLVDSEVPYYKYVPDPVLENDHVTLYWDRSIITDRTIVANKPDIVVIDRLARRAIIVDVTIPHDENLVKAEKEKQIKYLDLAHEVVGMWNMDSAVIVPIVVTANGLIAKSFDDHLSKLSLRGWIKGLIQKAVLLDTARIVRRFLSLEP

SEQ ID NO: 10470 - protein, 1200 aa, Mythimna impura
MLTRAAARRARLPPPASSLSSASPPPESSPTVSAVTPAVAVASSSSDEYFSPPTSPPPARRRRGRRPPSGLGPRGPPASDRVPAPGGSVQRMRWTQSINENVMRAYYGATEGGNNLTAYRVRMLSLFQVLEPAVNVSAQRLSDQVRVIQRNHMLDDTVLDRLRTEMSNHAIAPSSQPVVPVMVPPSYHLSDHADEEITDMVTNVSTQCNNELRSALECAIREYRNMPLELRPRLPRLPMHNKNKALVAALDLQLSNYFDDCEDLTDTHSIMYCAAVAACRVAHVKFPSCDVSTRPKPAVPAWQCRIERRIGGARALIGKLICFREGNTRPRVMRFVRRAFSGTDISPRDYMSRVTERIDFLKQKVYAWANRIRRYKRRVERYTQNRTFRSNERWVYRAWERPDQGVTDTRLPDDDAMSSFWRSIWSVPVSHTEGDWTREVERACDPIPQMGAIDISPQDVARAVRPLPNWKSPGPDGLHNFWIKWFTRSHARLAYQFQSALESGSLPQFLTTGITHLLHKSGSTAEPKNYRPITCLPTVYKVLTSILRSKINSHIDKNLIMSPSQNGCRNGSRGTKELLLIDMTISQQVRRFRKDLSTCWIDYKKAYDSVPHTWLMRVLELYKIDTTLRTFLMSCMRQWSTVLRYPGCRHIQRNSEPVRIERGIFQGDSLSPLWFCLALNPLSTLLENSGLGYRLKRGGQVISHLLYMDDLKLFAPNNLQLMELLKVTETFSSAIRMEFGVDKCAVMHVKRGEVVESVGTQLTDSINLRSLSPTETYKYLGMSEALGINITDMKQSLKERFFGRLKKVFNSLLSGGNKVRAFNGWVMPVLMYSFGVLKWTQTELDTLDRRVRTLLTAYRMHHPRSSVMRLYIPRKCGGRGFLNAKTLHNREVCSLREYFLATDVGMHRDVVAVDKGLTPLSLANENWRKPVVLDTNDRREVWQSKELHGRFFRAFHGPDVDQLASVAWLRFGDLFGETEGFVCAIMDEVIMTNNYRRFIVKDGTVDICRACHRPGESIRHIISGCSRLANGEYLHRHNLVARIIHQQLALKYSLVESEVPYYRYEPDPVLDNGHITLYWDRSIITDRTIVANKPDIVVVDRSERRAMIVDISVPHDENLVKAEKDKQIKYIDLAREVVDMWDVDSAIIVPIVVSANGLIAKSLDQHLRRLALGGWIKALIQKAVLLDTARIVRRFLSLEP

SEQ ID NO: 10471 - protein, 962 aa, Mythimna impura
MHNKNKALVAALDSQLSNYFDDCENLTDTHSIMYCAAVAACRVAHVKFPNCDVATRPKPTVPTWQCRIERRIGGARALIGKLICFREGNTRPRVMRFVRRAFSGTDISPRDYMSRVTERIDFLKQKVYAWVNRIRRYKRWVERYTQNRTFRSNERWVYRDWERPDQGVADARLPDDDAMSSFWRSIWSVPVSHTEGDWTREVERACDPIPQMGAIDISPQDVARAVRPLPNWKSPGPDGLHNFWIKWFTRSHARLAYQFQSALESGSLPQFLTTGITHLLHKSGSTAEPKNYRPITCLPTVYKVLTSILRSKINSHIVKNLIMSPSQNGCGNGSRGTKELLLIDMTISQQVRRSRKDLSTCWIDYKKAYDSVPHTWLMRVLELYKIDTTLRTFLMSCMRQWSTVLRYPGCRHIQRNSEPLRIERGIFQGDSLSPLWFCLALNPLSTLLENSGLGYRLKRGGQVISHLLYMDDLKLFAPNNLQLMELLKVTETFSSAIRMEFGVDKCAVMHVKRGEVVESVGTQLTDSINLRSLSPTETYKYLGMSEALGINITDMKQSLKERFFGRLKKVLNSLLSGGNKVRAFNGWVMPVLMYSFGVLKWTQTELDALDRRVRTLLTAYRMHYPRSSVMRLYIPRKCGGRGFLNAKTLHNRELCSLREYFLAADVGMHRDVVAVDKGLTPLSLANENWRKPVVLDTNDRREVWQSKELHGRFFRALHGPDVDQLASVAWLRFGDLFGETEGFVCAIMDEVIMTNNYRRFIVKDGTVDICRACHRPGESIRHIISGCSRLANGEYLHRHNLVARIIHQQLALKYSLVESEVPYYRYEPDPVLDNGHITLYWDRPIITDRTIVANKPDIVVVDRSERRAMIVDISVPHDENLVKAEKDKQIKYIDLAREVVDMWDVDSAIIVPIVVSRNGLIAKSLDQHLRTLALGGWIKGLIQKAVLLDTARIVRRFLSLEP

SEQ ID NO: 10472 - protein, 1171 aa, Mythimna impura
MLTRAAARRARLPPPASSLSSASPPPESSPTVSAVTPAVAVASSSSDEYFSPPTSPPPARRRRGRRPPSGLGPRGPPASDRVPAPGGSVQRMRWTQSINENVMRAYYGATEGGNNLTAYRVRMLSLFQVLEPAVNVSAQRLSDQVRVIQRNHMLDDTVLDRLHTEMSNHAIAPSSQPVVPVMVPPSYHLSDHADEEITDMVTHVSTQCNNELRSALECAIREYRNMPLELRPRLPRLPMHNKNKALVAALDLQLSNYFDDCEDLTDTHSIMYCAAVAACRVAHVKFPSCDVSTRPKPAVPAWQCRIERRIGGARALIGKLICFREGNTRPRVMRFVRRAFSGTDISPRDYMSRVTERIDFLKQKVYAWANRIRRYKRRVERYTQNRTFRSNERWVYRAWERPDQGVTDTRLPDDDAMSSFWRSIWSVPVSHTEGDWTREVERACDPIPQMGAIDISPQDVARAVRPLPNWKSPGPDGLHNFWIKWFTRSHARLAYQFQSALESGSLPQFLTTGITHLLHKSGSTAEPKNYRPITCLPTVYKVLTSILRSKINSHIDKNLIMSPSQNGCRNGSRGTKELLLIDMTISQQVRRFRKDLSTCWIDYKKAYDSVPHTWLMRVLELCKIDTTLRTFLMSCMRQWSTVLRYPGCRHIQRNSEPVRIERGIFQGDSLSPLWFCLALNPLSTLLENSGLGYRLKRGGQVISHLLYMDDLKLFAPNNLQLMELLKVTETFSSAIRMEFGVDKCAVMHVKRGEVVESVGTQLTDSINLRSLSPTETYKYLGMSEALGINITDMKQSLKERFFGRLKKVFNSLLSGGNKVRAFNGWVMPVLMYSFGVLKWTQTELDALDRRVRTLLTAYRMHHPRSSVMRLYIPRKCGGRGFLNAKTLHNREVCSLREYFLATDVGMHRDVMAVDKGLTPLSLANENWRKPVVLDTNDRREVWQSKELHGRFFRAFHGPDVDQLASVAWLRFGDLFGETEGFVCAIMDEVIMTNNYRRFIVKDGTVDICRACHRPGESIRHIISGCSRLANGEYLHRHNLVARIIHQQLALKYSLVESEVPYYRYEPDPVLDNGHITLYWDRSIITDRTIVANKPDIVVVDRSERRAMIVDISVPHDENLVKAEKDKQIKYIDLAREVVDMWDVDSAIIVPIVVSANGLIANGSTNTLGGSR

SEQ ID NO: 10473 - protein, 1198 aa, Phlogophora meticulosa
MLTRSAARRARPPPPASSLSSASSPPKPSTIVSTVKPAVPVASSSSDEYFSPPTSPPPARRRRGRRPPDGLGPRGPPASDRVPAPGGSVQRMRWTQSINENVMRSYYGATEGGSNLTAYRVRMLSLFQVLEPAVNVSAQRLSDQVRVIQRNHMLDDVVLDRLRTEMQSSRVITSPSHTVVPPQYNIVLSSFADGEGSDKVTNVSTQYNEELRSALEGAIREYRFMLPALRPRLPRLPMHNKNRALVAALDSQLSNYFDNCDDLTDAHSILYCAAVAACRVADVKFPYDIATRPKPAVPAWQCRIERRIAGARALIGKLVCYREGNTRPRVMRYVRRAFLGTDISPRDYMSRVTERIDFLKQKVYAWASRIRRYKRRVERYTQNRTFQSNERWVYRAWERPVQGVTDTHLPDDDVMCSFWRNIWSVPVSHTEGDWTREVERACDPIPQMGAITISPQDVARAVRPLPNWKSPGPDGLHNFWIKWLQKSHARLASQFQSALETGSLPQFLTTGITHLLHKSGSTAEPKNYRPITCLPTVYKVLTSILRVKINNHIDSNSIMSASQNGCRNGSRGTKELLLIDTAISQQVRRSRKDLSTCWIDYKKAYDSVPHTWLKRVLELYKVDATLRTFLTSCMGQWRTVLRYPGCRQIQRNSEPIRIERGIFQGDSLSPLWFCLALNPLSTLLEDSGLGYRLKRGSQVVSHLLYMDDLKLFAPSDLQLMELLTVTKTFSSAIRMEFGVDKCAVMHVKRGKIVESVGTQLPDFINFRALSPIETYKYLGMSEALGINAADMKQSLKERFFGRLKKVCNSLLSGGNKVRAFNGWVMPVLMYSFGILKWTQTELDALDRRVRTFLTASRMHHPRSSVMRLYIPRKCGGRGFLNAKTLHNREICSLRDYFLETDVGMHRDVVAVDQGLTPLSLAKENWRKPVVLDTNDRKEVWQSKELHGRFFQALHGPDVDQLASVSWLRFGDLFGETEGFVCAIMDEVIMTNNYRRFIVKDGTVDICRACHRPGESIRHIISGCSRLANEEYLHRHNLVARIIHQQLALKYSLVESEVPYYKYVPDPVLENGSVTLYWDRSIITDRTIVANKPDIVVMDRIERRATIIDVTVPHDGNLVKAEKDKQIKYLDLAREVVDMWDVDSAIVVPIVVSANGLIAKSLDQHLRRLALGSWIKGLIQKAVLLDTARIVRRFLSMEP

SEQ ID NO: 10474 - protein, 1158 aa, Phlogophora meticulosa
MLTRSAARRARPPPPASSLSSASSPPKPSTIVSTVKPAVPVASSSSDEYFSPPTSPPPARRRRGRRPPDGLGPRGPPASDRVPAPGGSVQRMRWTQSINENVMRSYYGATEGGSNLTAYRVRMLSLFQVLEPAVNVSAQRLSDQVRVIQRNHMLDDVVLDRLRTEMQSSRVITSPSHTVVPPQYNIVLSSFADGEGSDKVTNVSTQYNEELRSALEGAIREYRFMLPALRPRLPRLPMHNKNRALVAALDSQLSNYFDNCDDLTDAHSILYCAAVAACRVAHVKFPNDIATRPKPTVPAWQCRIERRIAGARALIGKLVCYREGNTRPRVMRYVRRAFLGTDISPRDYMSRVTERIDFLKQKVYAWASRIRRYKRRVERYTQNRTFQSNERWVYRAWERPVQGVTDTHLPDDDVMCSFWRNIWSMPVRAFSHTEGDWTREVERACDPIPQMGAITISPEDVARAVRPLPNWKSPGPDGLHNFWIKWLQKSHARLASQFQSALETGSLPQFLTTGITHLLHKSGSTAEPKNYRPITCLPTVYKVLTSILRVKINNHIDSNSIMSASQNGCRNGSRGTKELLLIDTAISQQVRRSRKDLSTCWIDYKKAYDSVPHTWLKRVLELYKVDATLRTFLTSCMGQWRTVLRYPGCRQIQRNSEPIRIERGIFQGDSLSPLWFCLALNPLSTLLEDSGLGYRLKRGGQVVSHFLYMDDLKLFAPSDLQLMELLKVTKTFSSAIRMEFGVDKCAVMHVKRGKIVESVGTQLPDFINFRALSPIETYKYLGMSQALGINAADMKQSLKERFFGRLKKVCNSLLSGGNKVRAFNGWVMPVLMYSFGILKWTQTELDALDRRVRTFLTASRMHHPRSSVMRLYIPRKCGGRGFLNAKTLHNREICSLRDYFLETDVGMHRDVVAVDQGLTPLSLAKENWRKPVVLDTNDRKEVWQSKELHGRFFQALHGPDVDQLASVSWLRFGDLFGETEGFVCAIMDEVIMTNNYRRFIVKDGTVDICRACHRPGESIRHIISGCSRLANEEYLHRHNLVARIIHQQLALKYSLVESEVPYYKYVPDPVLENGSVTLYWDRSIITDRTIVANKPDIVVMDRIERRATIIDVTVPHDGNLVKAEKDKQIKYLDLAREVVDMWDVDSAIVVPIDVSVLA

SEQ ID NO: 10475 - protein, 1202 aa, Phlogophora meticulosa
MLTRSRARVLNAPTTSSGSSLSSASQLPGPAPDVSPVTPAAAVASSSSDEYYSPPTSPPPVRRCGRGRPPASLGLRGPPASARVPASGGSVQRMRWTQSINENVMRSYYGATEGGTNLTAYRGRMLSLFQVLEPAVNVSAQRLSDQVRVIQRNHMLDDAVLDRLRLNSRSNRVTPASPPVAVQLQNLPSVSPRPDYVGEEDDDAAISVSSQCNVRLRSALEDAFREYRSTPPGLRQRLPRLPMHKKNKALMSALDSLLSNSFDSSRDLADTHSILYCAAVAACRVANVKFPNSVRSTRPAIPAWQCRIERRIGEARVLIGKLICFREGNTRPRVMRFVRRAFSGTDISSRDYLTRVTERIDFLKQKICAWANRIRRYKRRVERYTQNRTFRSDERWVYRTWERPDQGVTDTFLPDDEAMCLFWRSIWSVPVSHTEGDWTREVERMCEPLPEMGAINISPQDVACAVRPLPNWKSPGSDGLHNFWIKWLKSSHARLASQFQSALESGSLPQFLTTGITHLLHKSGSTAEPKNYRPITCLPTVYKVLTSILRSKINNHIDSTSIMSVSQNGCKNGSRGTKELLLIDMAISQQVRRSRKDLSTCWIDYKKAYDSVPHTWLMRVLELYKIDATLRTFLKSCMGQWRTVLHYPGCRQFQENSEPIRIERGIFQGDSLSPLWFCLALNPLSTLLEGSGLGYRLRRGGQVISHLLYMDDLKLFAHNNLQLMKLLKVTETFSSAIRMDFGVDKCAVMHVKRGGIVESTGTQLSDSIYLRSLSSTETYKYLGMSEALGINTADMKQSLKERFFGRLNKVLNSLLSGGNKVRAFNSWVMPVLMYSFGILKWTQTELDALDRRVRTLLTANRMHHPRSSVMRLYISRKCGGRGFLNAKTLHNREVCSLREYFLEADVGIHRDVVAMDKALTPLSLANENWRKPIVLDTTDRMEIWKSKELHGRFYRVLHGPDVDLSASVSWLRFGDLFGETEGFVCAIMDEVIMTNNYRKYIVKDGTVDICRACHRPGESIRHIISGCSRLANGDYLHRHNLVAKIIHQQLALKYNLVESEVPYYKYVPDPVLENGNITLYWDRSIITDRTIVANKPDIVVIDRSDRRTMIVDITVPHDENLVKAEKEKQIKYLDLAREVVDMWDVNTAVIVPIVVTANGIIAKSLDQHLRRLSLGSWIKGLIQKAVLLDTARIVRRFLSQEP

SEQ ID NO: 10476 - protein, 1198 aa, Phlogophora meticulosa
MLTRSAARRARPPPPASSLSSASSPPKPSTIVSTVKPAVPVASSSSDEYFSPPTSPPPARRRRGRRPPDGLGPRGPPASDRVPAPGGSVQRMRWTQYINENVMRSYYGATEGGSNLTAYRVRMLSLFQVLEPAVNVSAQRLSDQVRVIQRNHMLDDVVLDRLRTEMQSSRVITSPSHTVVPPQYNIVLSSFADGEGSDKVTNVSTQYNEELRSALEGAIREYRFMLPALRPRLPRLPMHNKNRALVAALDSQLSNYFDNCDDLTDAHSILYCAAVAACRVAHVKFPYDIATRPKPAVPAWQCRIERRIAGARALIGKLVCYREGNTRPRVMRYVRRAFLGTDISPRDYMSRVTERIDFLKQKVYAWASRIRRYKRRVERYTQNRTFQSNERWVYRAWERPVQGVTDTHLPDDDVMCSFWRNIWSVPVSHTEGDWTREVERACDPIPQMGAITISPQDVARAVRPLPNWKSPGPDGLHNFWIKWLQKSHARLASQFQSALETGSLPQFLTTGITHLLHKSGSTAEPKNYRPITCLPTVYKVLTSILRVKINNHIDSNSIMSASQNGCRNGSRGTKELLLIDTAISQQVRRSRKDLSTCWIDYKKAYDSVPHTWLKRVLELYKVDATLRTFLTSCMGQWRTVLRYPGCRQIQRNSEPIRIERGIFQGDSLSPLWFCLALNPLSTLLEDSGLGYRLKRGGQVVSHLLYMDDLKLFAPSDLQLMELLTVTKTFSSAIRMEFGVDKCAVMHVKRGKIVESVGTQLPDFINFRALSPIETYKYLGMSEALGINAADMKQSLKERFFGRLKKVCNSLLSGGNKVRAFNGWVMPVLMYSFGILKWTQTELDALDRRVRTFLTASRMHHPRSSVMRLYIPRKCGGRGFLNAKTLHNREICSLRDYFLETDVGMHRDVVAVDQGLTPLSLAKENWRKPVVLDTNDRKEVWQSKELHGRFFQALHGPDVDQLASVSWLRFGDLFGETEGFVCAIMDEVIMTNNYRRFIVKDGTVDICRACHRPGESIRHIISGCSRLANEEYLHRHNLVARIIHQQLALKYSLVESEVPYYKYVPDPVLENGSVTLYWDRSIITDRTIVANKPDIVVMDRIERRATIIDVTVPHDGNLVKAEKDKQIKYLDLAREVVDMWDVDSAIVVPIVVSANGLIAKSLDQHLRRLALGSWIKGLIQKAVLLDTARIVRRFLSLEP

SEQ ID NO: 10477 - protein, 1201 aa, Phlogophora meticulosa
MLTRSRARVLNAPTTSSGSSLSSASQLPGPAPDVSPVTPAAAVASSSSDEYYSPPTSPPPVRRCGRGRPPASLGLRGPPASARVPASGGSVQRMRWTQSINENVMRSYYGATEGGINLTAYRGRMLSLFQVLEPAVNVSAQRLSDQVRVIQRNHMLDDAVLDRLRLNSRSNRVTPASPPVAVQLQNLPSVSPRPDYVGEEDDAAISVSSQCNVRLRSALEDAFREYRSTPPGLRQRLPRLPMHKKNKALMCTLDSLLSNSFDSSRDLADTHSILYCAAVAACRVANVKFPNSVRSTRPAIPAWQCRIERRIGEARVLIGKLICFRDGNTRPRVMRFVRRAFSGTDISSRDYLTRVTERIDFLKQKICAWANRIRRYKRRVERYTQNRTFRSDERWVYRTWERPDQGVTDTFLPDDEAMCLFWRSIWSVPVSHTEGDWTREVERTCEPLPEMGAINISPQDVACAVRPLPNWKSPGPDGLHNFWIKWLKSSHARLASQFQSALESGSLPQFLTTGITHLLHKSGSTSEPKNYRPITCLPTVYKVLTSILRSKINNHIDSTSIMSVSQNGCKNGSRGTKELLLIDMAISQQVRRSRKDLSTCWIDYKKAYDSVPHTWLMRVLELYKIDATLRTFLKSCMGQWRTVLHYPGCRQFQENSEPIRIERGIFQGDSLSPLWFCLALNPLSTLLEGSGLGYRLRRGGQVISHLLYMDDLKLFAHNNLQLMKLLKVTETFSSAIRMDFGVDKCAVMHVKRGGIVESAGTQLSDSIYLRSLSSTETYKYLGMSEALGINTADMKQSLKERFFGRLNKVLNSLLSGGNKVRAFNSWVMPVLMYSFGILKWTQTELDALDRRVRTLLTANRMHHPRSSVMRLYISRKCGGRGFLNAKTLHNREVCSLREYFLEADVGMHRDVVAMDKALTPLSLANENWRKPIVLDTTDRMEIWKSKELHGRFYRVLHGPDVDLSASVSWLRFGDLFGETEGFVCAIMDEVIMTNNYRKYIVKDGTVDICRACHRPGESIRHIISGCSRLANGDYLHRHNLVATIIHQQLALKYNLLESEVPYYKYVPDPVLENGNITLYWDRSIITDRTIVANKPDIVVIDRSDRRTMIVDITVPHDENLVKAEKEKQIKYLDLAREVVDMWDVNTAVIVPIVVTANGIIAKSLDQHLRRLSLGSWIKGLIQKAVLLDTARIVRRFLSQEP

SEQ ID NO: 10478 - protein, 1045 aa, Xestia xanthographa
MLDDTVLDRLRTEIQSNHVIATPSQAVVPPQSSIIPNCDNDVSNDMVTNVSTQCNVEMRSALEGAIREYRFMQPDLRPRIPRLPMHNKNRALVAVLDSQLSNYFDNCEDLTDVHSILYCAAVAACRVAHVKFPSDRATRPKLAVPAWQYRIERRIGGARALIDKLVCFREGNTRPRVMRFVRQAFSGTDISPRDYMSRVTERIDFLKQKVYAWANRIRRYKRRVDRYTQNRTFQKDERWVYRAWKRPDQGVADTHLPDDDAMCSFWRSIWSVPVSHAEGEWTRVIERACDPISEMGAITISPQDVARAVRPLPNWKSPGPDGLHNFWIKWFTRSHARLATLFQSALESGSLPEFLTTGITHLLHKSGSTAEPKNYRPITCLPTVYKVLTSILRTKISKHIDDNSVMSASQNGCRNGSRGTKELLLIDMAISHQVRRSRKDLSTCWIDYKKAYDSVPHTWLMRVLELYKVDATLRAFLMSCMGQWRTVLRYPGCRQIQRNSEPIRIERGIFQGDSLSPLWFCLALNSLSTLLEDSGLGYRLRKDGQVISHLLYMDDLKLFAPNDLRLMELLKVTETFSNAIRMEFGVDKCAVMHVKRGEIVESVGTQLSDSITLRSLSATETYKYLGMSEALGVNDADMKQSLKERFFGRLKKVLNSLLSGGNKVRAFNGWVMPVLMYSFGILKWTQTELDALDTKVRKLLTAYRMHHPRSSVMRLYIPRKCGGRGFLNAKALHNREICSLREYFLGTDVGMHRDVVTMDKGLTPLSLAKENWRKPPVLDTNDRREVWQSKELHGRFFRALHGPDVDLSASVAWLRSGDLFGETEGFVCAIMDEVMMTNNYRRFIVKDGTVDICRACHRPGESIRHIISGCSRLANGEYLHRHNLVARIIHQQLALKYNLVESEVPYYRYVPDPVLDNGCITLYWDQSIITDRTIVANKPDIVVVDRSERRAMIVDITVPHDENLVKAEKDKQIKYLDLAREVVDMWEVDSAIIVLIVVSAHGLIAKSLDQYLRRLSLGSWIKGLIQKAVLLDTARIVRRFLSLEP

SEQ ID NO: 10479 - protein, 868 aa, Xestia xanthographa
MRFVRQAFSGTDISPRDYMSRVTERIDFLKQKVYAWANRIRRYKRRVDRYTQNRTFQKDERWVYRAWERPDQGVADTHLPDDDAMCSFWRSIWSVPVSHAEGEWTRVIERACDPVSEMGAINISPQDVARAVRPLPNWKSPGPDGLHNFWINWFTRSHARLATLFQSALESGSLPEFLTTGITHLLHKSGSTAEPKNYRPITCLPTVYKVLTSILRTKISKHIDDNSVMSASQNGCRNGSRGTKELLLIDMAISHQVRRSRKDLSTCWIDYKKAYDSVPHTWLMRVLELYKVDATLRTFLMSCMGQWRTVLRYPGCRQIQRNSEPIRIERGIFQGDSLSPLWFCLALNPLSTLLEDSGLGYRLRKDGQVISHLLYMDDLKLFAPNDLQLMELLKVTDTFSSAIRMEFGVDKCAVMHVKRGEIVESVGTQLSDSITLRSLSATETYKYLGMSEALGVNVADMKQSLKERFFGRLKKVFNSLLSGGNKVRAFNGWVMPVLMYSFGILKWTQTELDALDTKVRKLLTAYRMHHPRSSVMRLYIPRKCGGRGFLNAKTLHNREICSLREYFLGTDVGMHRDVVTVDKGLTPLSLAKENWRKPPVLDTNDRREVWQSKELHGRFFRALHGPDVDLPASVAWLRSGDLFGETEGFVCAIMDEVMMTNNYRRFIVKDGTVDICRACHRPGETIRHIISGCSRLANGEYLHRHNLVARIIHQQLALKYNLVESEVPYYRYVPDPVLDNGCITLYWDQSIITDRTIVANKPDIVVVDRSERRAMIVDITVPHDENLVKAEKDKQIKYLDLAREVVDMWEVDSAIIVPIVVSAHGLIAKSLDQYLRRLSLGSWIKGLIQKAVLLDTARIVRRFLSLEP

SEQ ID NO: 10480 - protein, 1050 aa, Xestia xanthographa
MLDDTVLDRLRSESRSNLVTPASPMIAVQQQNIPSAPPRSDYNGEEDRDEVISVSTQCNAQLRSALEGAFREYRSTPPELRPRLPRLPMHNKNKALMCALDSQLSNCFDSSKDLADTHSILYCGAVAACRVAHVKFPNNDRATRPKLAVPAWQCRIERRIGEARALIGKLICFREGNTRPRVMRFVRRAFSGSDISFRDYLARVTERIDSLKQKICAWASRIRRYKRRVERYTQNRTFQSDERWVYRAWERPDQGVTDTRLPDDSAMYSFWRNIWSVPVSHTEGDWTREVEQACDPIPEMGAIIISPQDVARAVRPLPNWKSPGPDGLHNFWIKWFQRSHARLASQFQSALESGSLPQFLTTGITHLLHKSGSVAEPKNYRPITCLPTVYKVLTSILRAKINQHIDSNSIMSASQNGCRNGSRGTKELVLIDMAISQQVRRSRKNLSTCWIDYKKAYDSVPHTWLMRVLELYKIDATLRTFLMSCMGHWRTVLCYPGCRQIQGNSEPIRIERGIFQGDSLSPLWFCLALNPLSTLLERSGLGYLLRRDGQVISHLLYMDDLKLFAPNNLQLMKLLKVTETFSSAIRMEFGVDKCAVMHVKRGEIMESVGTQLSDSIHLRSLSSTETYKYLGMSEALGINTADMKQSLRERFFGRLNKVLGSLLSGGNKVRAFNGWVMPVLMYSFGILKWTQTELDALDRRVRTLLTANRMHHPRSSVMRLYIPRKCGGRGFLNAKTLHNREVCSLREYFLEADGEMHRDVVSVDKGLTPLSLANENWRKPKVLDTNDRKVEWQGKELHGRFYRALHGPDVDFLPSVSWLRFGDLFGETEGFICAIMDEVMMTNNYRKYIVKDGTVDICRACHRPGESIRHIISGCSSLANGEYLHRHNLVARIIHQQLALKYNFVESEVPYYKYAPDPVLDNGHITLYWDRPITTDRTVVANRPDIVVIDRLERRTMIVDITIPHDENLVKAEKDKQFKYLDLAREVVDMWDVGTAVIVPIVVSANGLIAKSLDQHLRRLSLGSWIKGLIQKAVLLDTARIVRRFLSQEP

SEQ ID NO: 10481 - protein, 1198 aa, Xestia xanthographa
MLTRSAAARRARLPPPDSSLSSASPPPEPSPIVSAVTPAVAVASSSSDEYFSPPTTPPPARRRGGRRPPDGLGPRGPPASDRVPAPGGSVQRMRWTQSINENVMRAYYGATEGGNNLTAYRVRMLSLFQVLEPAVNVSAQRLSDQVRVIQRNRMLDDTVLDRLRTEIQSNHVIATPSQAVVPPQSSIIPNCDNDVSNDMVTNVSTQCNVEMRSALEGAIREYRFMQPDLRPRIPRLPMHNKNRALVAVLDSQLSNYFDNCEDLTDVHSILYCAAVAACRVAHVKFPSDRATRPKPAVPAWQYRIERRIGGARALIGKLVCFREGNTRPRVMRFVRQAFSGTDISPRDYMSRVTERIDFLKQKVYAWANRIRRYKRRVDRYTQNRTFQKDERWVYRAWERPDQGVADTHLPDDDAMCSFWRSIWSVPVSHAEGEWTRVIERACDPISEMGAITISPQDVARAVHPLPNWKSPGPDGLHNFWIKWFTRSHARLATLFQSALESGSLPEFLTTGITHLLHKSGSTAEPKNYRPITCLPTVYKVLTSILRTKISKHIDDNSVMSASQNGCRNGSRGTKELLLIDMAISHQVRRSRKDLSTCWIDYKKAYDSVPHTWLMRVLELYKVDATLRTFLMSCMGQWRTVLRYPGCRQIQRNSEPIKIERGIFQGDSLSPLWFCLALNPLSTLLEDSGLGYRLRKDGQVISHLLYMDDLKLFAPNDLRLMELLKVTETFSNAIRMEFGVDKCAVMHVKRGEIVESVGTQLSDSITLRSLSATETYKYLGMSEALGVNVADMKQSLKERFFGRLKKVLNSLLSGGNKVRAFNGWVMPVLMYSFGILKWTQTELDALDTKVRKLLTAYRMHHPRSSVMRLYIPRKCGGRGFLNAKTLHNREICSLREYFLGTDVGMHRDVVTMDKGLTPLSLAKENWRKPPVLDTNDRREVWQSKELHGRFFRALHGPDVDLSASVAWLRSGDLFGETEGFVCAIMDEVMMTNNYRRFIVKDGTVDICRACHRPGESIRHIISGCSRLANGEYLHRHNLVARIIHQQLALKYNLVESEVPYYRYVPDPVLDNGCITLYWDQSIITDRTIVANKPDIVVVDRSERRAMIVDITVPHDENLVKAEKDKQIKYLDLAREVVDMWEVDSAIIVPIVVSAHGLIAKSLDQYLRRLSLGSWIKGLIQKAVLLDTARIVRRFLSLEP

SEQ ID NO: 10482 - protein, 1205 aa, Cosmia trapezina
MLTRSRAQHLRNTHPTSSGSSLSSASQLPEPAPDVSQVIPAAAVASSSSDEYFSPPTTPPPVRRRGRGRPPASLGPRGPPASDRVPAPGGSVQRMRWTQTVNENVMRAYFGATEGGSNLTAYRGRMLSLFQVLEPAVNVSAQRLSDQVRVIQRNHMLDDVVLDRLRLESRNSRVTSDSPMVAVQLQNLPSASPRPDRVGEEDDSGAISVSSQCNVQLRSALEDAFREYRSAPPGLRPRLPRLPMHKKNKALVCALDSQLSNCFDGSKDLADTHSILYCAAVAACRVAHVKFHNNDRVTRPKPAVPTWQCRIERRIGEARALIGKLICFREGNTRPRVMRFVRRAFSGMDISPRDYLTCVTERIDFLKQKICAWANRIRRYRRRVERYTQNRTFQSDERWVYRAWERPDQGVADTRLPDDDAMCSFWRSIWSVPVSHTEVDWTREVERACDHIPQMGALTISPQDVARAVRPLPNWKSPGPDGLHNFWIKWFQRSHDRLASQFQSALQSGSLPQFLTTGITHLLHKSGSTAEPRNYRPITCLPTVYKVLTSILRAKINKHIDTNSIMSASQNGCGNGSRGTKELLLIDMTISQQVRRSRKDLSTCWIDYKKAYDSVPHTWLMRVLELYKIDATLRTFLMSCMGQWRTVLRYPGCRNIQRNSEPIRIERGIFQGDSLSPLWFCLALNPLSTLLEDSGLGYRLRRGGQVISHLLYMDDLKLFAPNNLQLMELLKVTETFSSAIRMEFGVDKCAVMHVKRGEIVESVRTQLSDSIHLRSLSSLETYKYLGMSEALGINAADMKQSLRERFFGRLNKVLNSLLSGGNKVRAFNGWVMPVLMYSFGILKWTQTELDALDRRVRTLLTANRMHHPRSSVMRLYIPRKCGGRCFLNAKTLHNREVCSLREYFLEADVGMHREVVSVDKGLTPLSLANENWRKPIVLDTNDRREVWQSKELHGRFYRVLHGPDVDFLASVSWLRFGDLFGETEGFVFAIMDEVMMTNNYRKYIVKDGTVDICRACHRPGESIRHIISGCSRLANGDYLHRHNLVARIIHQQLALKYSLVESEVPYYRYVPDPVLENGNITLYWDRSIITDRTIVANKPDIVVIDRLERRTVIIDIAVPHDENLVKAEKDKQIKYLDLAREVVDMWDVDTAIIVPIVVTANGIIAKSLDQHLRRLSLGGWIKGLIQKAVLLDTARIVRRFLSQQP

SEQ ID NO: 10483 - protein, 1205 aa, Cosmia trapezina
MLTRSRAQHLRNTHPTSSGSSLSSASQLPEPAPDVSQVIPAAAVASSSSDEYFSPPTTPPPVRRRGRGRPPASLGPRGPPASDRVPAPGGSVQRMRWTQTVNENVMRAYFGATEGGSNLTAYRGRMLSLFQVLEPAVNVSAQRLSDQVRVIQRNHMLDDVVLDRLRLESRNSRVTSDSPMVAVQLQNLPSASPRPDRVGEEDDSGAISVSSQCNVQLRSALEDAFREYRSTPPGLRPRLPRLPMHKKNKALVCALDSQLSNCFDGSKDLADTHSILYCAAVAACRVAHVKFHNNDRVTRPKPAVPTWQCRIERRIGEARALIGKLICFREGNTRPRVMRFVRRAFSGMDISPRDYLTCVTERIDFLKQKICAWANRIRRYRRRVERYTQNRTFQSDERWVYRAWERPDQGVADTQLPDDDAMCSFWRNIWSVPVSHTEGDWTREVERACDHIPQMGALTISPQDVARAVRPLPNWKSPGPDGLHNFWIKWFQRSHARLASQFQSALQSGSLPQFLTTGITHLLHKSGSTAEPRNYRPITCLPTVYKVLTSILRAKINKHIDTNSIMSASQNGCGNGSRGTKELLLIDMTISQQVRRSRKDLSTCWIDYKKAYDSVPHTWLMRVLELYKIDATLRTFLMSCMGQWRTVLRYPGCRNIQRNSEPIRIERGIFQGDSLSPLWFCLALNPLSTLLEDSGLGYRLRRGGQVIPHLLYMDDLKLFAPNNLQLMELLKVTETFSSAIRMEFGVDKCAVMHVKRGEIVESVRTQLSDSIHLRSLSSLETYKYLGMSEALGINAADMKQSLRERFFGRLNKVLNSLLSGGNKVRAFNGWVMPVLMYSFGILKWTQTELDALDRRVRTLLTANRMHHPRSSVMRLYIPRKCGGRGFLNAKTLHNREVCSLREYFLEADVGMHREVVSVDKGLTPLSLANENWRKPIVLDTNDRREVWQSKELHGRFYRVLHGPDVDFLASVSWLRFGDLFGETEGFVFAIMDEVMMTNNYRKYIVKDGTVDICRACHRPGESIRHIISGCSRLANGDYLHRHNLVARIIHQQLALKYSLVESEVPYYRYVPDPVLENGNITLYWDRSIITDRTIVANKPDIVVIDRLERRTVIVDIAVPHDENLVKAEKDKQIKYLDLAREVVDMWDVDTAIIVPIVVTANGIIAKSLDQHLRRLSLGGWIKGLIQKAVLLDTARIVRRFLSQQP

SEQ ID NO: 10484 - protein, 1205 aa, Cosmia trapezina
MLTRSRAQHLRNTHPTSSGSSLSSASQLPEAAPDVSQVIPAAAVASSSSDEYFSPPTTPPPVRRRGRGRPPASLGPRGPPASDRVPAPGGSEQRMRWTQTVNENVMRAYFGATEGGSNLTAYRGRMLSLFQVLEPAVNVSAQRLSDQVRVIQRNHMLDDVVLDRLRLESRNSRVTSDSPMVAVQLQNLPSASPRPDRVGEEDDSGAISVSSQCNVQLRSALEDAFREYRSAPPGLRPRLPRLPMHKKNKALVCALDSQLSNCFDGSKDLADTHSILYCAAVAACRVAHVKFHNNDRVTRPKPAVPTWQCRIERRIGEARALIGKLICFREGNTRPRVMRFVRRAFSGMDISPRDYLTCVTERIDFLKQKICAWANRIRRYRRRVERYTQNRTFQSDERWVYRAWERPDQGVADTRLPDDDAMCSFWRSIWSVPVSHTEGDWTREVERVCDHIPQMGALTISPQDVARAVRPLPNWKSPGPDGLHNFWIKWFQRSHARLASQFQSALQSGSLPQFLTTGITHLLHKSGSTAEPRNYRPITCLPTVYKVLTSILRAKINKHIDTNSIMSASQNGCGNGSRGTKELLLIDMTISQQVRRSRKDLSTCWIDYKKAYDSVPHTWLMRVLELYKIDATLRTFLMSCMGQWRTVLRYPGCRNIQRNSEPIRIERGIFQGDSLSPLWFCLALNPLSTLLEDSGLGYRLRRGGQVISHLLYMDDLKLFAPNNLQLMELLKVTETFSSAIRMEFGVDKCAVMHVKRGEIVESVRTQLSDSIHLRSLSSLETYKYLGMSEALGINAADMKQSLRERFFGRLNKVLNSLLSGGNKVRAFNGWVMPVLMYSFGILKWTQTELDALDRRVRTLLTANRMHHPRSSVMRLYIPRKCGGRGFLNAKTLHNREVCSLREYFLEADVGMHREVVSVDKGLTPLSLANENWRKPIVLDTNDRREVWQSKELHGRFYRVLHGPDVDFLASVSWLRFGDLFGETEGFVFAIMDEVMMTNNYRKYIVKDGTVDICRACHRPGESIRHIISGCSRLANGDYLHRHNLVARIIHQQLALKYSLVESEVPYYRYVPDPVLENGNITLYWDRSIITDRTIVANKPDIVVIDRLERRTVIVDIAVPHDENLVKAEKDKQIKYLDLAREVVDMWDVDTAIIVPIVVTANGIIAKSLDQHLRRLSLGGWIKGLIQKAVLLDTARIVRRFLSQQP

SEQ ID NO: 10485 - protein, 1205 aa, Cosmia trapezina
MLTRSRAQHLRNTHPTSSGSSLSSASQLPEPAPDVSQVIPAAAVASSSSDEYFSPPTTPPPVRRRGRGRPPASLGPRGPPASDWVPAPGGSVQRMRWTQTVNENVMRAYFGATEGGSNLTAYRGRMLSLFQVLEPAVNVSAQRLSDQVRVIQRNHMLDDVVLDRLRLESRNSRVTSDSPMVAVQLQNLPSASPRPDRVGEEDDSGAISVSSQCNVQLRSALEDAFREYRSTPPGLRPRLPRLPMHKKNKALVCALDSQLSNCFDGSKDLADTHSILYCAAVAACRVAHVKFHNNDRVTRPKPAVPTWQCRIERRIGEARALIGKLICFREGNTRPRVMRFVRRAFSGMDISPRDYLTCVTERIDFLKQKICAWANRIRRYRRRVERYTQNRTFQSDERWVYRAWERPDQGVADTQLPDDDAMCSFWRSIWSVPVSHTEGDWTREVERACDHIPQMGALTISPQDVARAVRPLPNWKSPGPDGLHNFWIKWFQRSHARLASQFQSALQSGSLPQFLTTGITHLLHKSGSTAEPRNYRPITCLPTVYKVLTSILRAKINKHIDTNSIMSASQNGCGNGSRGTKELLLIDMTISQQVRRSRKDLSTCWIDYKKAYDSVPHTWLMRVLELYKIDATLRTFLMSCMGQWRTVLRYPGCRNIQRNSEPIRIERGIFQGDSLSPLWFCLALNPLSTLLEDSGLGYRLRRGGQVISHLLYMDDLKLFAPNNLQLMELLKVTETFSSAIRMEFGVDKCAVMHVKRGEIVESVRTQLSDSIHLRSLSSLETYKYLGMSEALGINAADMKQSLRERFFGRLNKVLNSLLSGGNKVRAFNGWVMPVLMYSFGILKWTQTELDALDRRVRTLLTANRMHHPRSSVMRLYIPRKCGGRGFLNAKTLHNREVCSLREYFLEADVGMHREVVSVDKGLTPLSLANENWRKPIVLDTNDRREVWQSKELHGRFYRVLHGPDVDFLASVSWLRFGDLFGETEGFVFAIMDEVMMTNNYRKYIVKDGTVDICRACHRPGESIRHIISGCSRLANGDYLHRHNLVARIIHQQLALKYSLVESEVPYYRYVPDPVLENGNITLYWDRSIITDRTIVANKPDIVVIDRLERRTVIVDIAVPHDENLVKAEKDKQIKYLDLAREVVDMWDVDTAIIVPIVVTANGIIAKSLDQHLRRLSLGGWIKGLIQKAVLLDTARIVRRFLSQQP

SEQ ID NO: 10486 - protein, 1197 aa, Mamestra brassicae
MLTRSRARHLATHPSPSASSLSSASPPPEPSPTVSAVTPAVAVASSSSDEYFSPPTTPPPARRRRGRRPPDGLGPRCPPASDRVPAPGGSVQRMRWTQSINENVMRSYFGATEGGTNLTAYRGRMLSLFQALEPAVNVSAQRLSDQVRVIQRNRMLDDSVLDRLRMEMCSHVITPPSQTVSPPQSQISSHADEESNDRVTNVSTQCNEELRSALECAIREYRYILPELRPRLPRLPMHNKNRALVAALDSQLSNYFDDCEDLTDTHSIMYCAAVAACRVAHVKMTNDRVTRPKPAVPAWQCRIERRIGGARALIGKLICFREGNTRPRVMRFVRRAFSGTDISPRDYMSRVTERIDFLKQKVYAWANRIRRYRRRVERYTQNRTFRSNERWVYRVWEQPDQGVTDTRLPDDDAMCSFWRNIWSVPVSHTEGGWIREVERACDPLPEMGAITISPQDVARALRPLPNWKSPGPDGLHNFWIKWLQRSHARLASQYQTALESGSLPEFLTTGVTHLLHKSGSTAEPKNYRPITCLPTVYKVLTSILRAKINNHINSNNIMSVSQNGCRNGSRGTKELLLIDMAISQQVRRFRKDLSTCWIDYKKAYDSVPHTWLMRVLELYKIDTMLRTFLMSCMGQWRTVLRYPGCRNIQRNSEPVRIERGIFQGDSLSPLWFCLALNPLSTLLENSGLGYRLKRGGQVISHLLYMDDLKLFAPSNVQLMELLKVTETFSSAIRMEFGVDKCAVMHVKRGEIMESVGTQLSDSINLRSLSSTETYKYLGMSEALGINVTDMKQSLRERFFGSLKKVFNSLLSGGNKVRAFNGWVMPVLMHSFGVLKWTQTELDALDRRVRTLLTAYRMHHPRSSVMRMYIPRKCGGRGFLNAKTLHNREICSLREYFLAVDVGMHRDVVTVDKGLTPLSLANENWRKPAVLDTNDRRAVWQSKELHGRFFRALHGPDVDQLASVAWLRFGDLFGETEGFVCAIMDEVIMTNNYRRFIVKDGTVDICRACHRPGESIRHIVSGCSRLANGEYLHRHNLVARIIHQQLALKYSLVESEVPYYRYAPDPVLDNGNITLYWDRSIITDRTIVANKPDIVVVDRIERRAMIVDITVPHDENLVKAEKDKQIKYIDLAREVVDMWDVDSAIIVPIVVSANGLIATSLDQHLRRLSLGSWIKGLIQKAVLLDTARIVRRFLSLEP

SEQ ID NO: 10487 - protein, 1198 aa, Mamestra brassicae
MLTRAAAQRARLPPPASSLSSASPPPEPSPTVSAVIPAVAVASSSSDEYFSPPTSPPPARRRRGRRPPDGLGPRGPPASDRVPAPGGSVQRMRWTQTINENVMRSYYGATEGGTNLTAYRGRMLSLFQVLEPAVNVSAQRLSDQVRVIQRNRMLDDAVLDRLRLESRNGRVSAASPPAAVQIQFSVSPRPNIVGEDDDDGAISVSTQCNERLRSALEDAFREYRSTPPELRPRLPCLPMHNKNRALVCALDSQLANCFDSSEDLADTHSILYCAAAAACRVAHVKFPNSDRATRPAVPAWQCRIERRIGEARALIGKLICFREGNTRRRVMRFVRRAFSGTDTSPRDYLTRVTERIDFLKQKIYAWANRIRRYKRRVERYTQNRTFQSNERWVYRAWERPDQGVTDTRLPDDDVMCSFWRNIWSVPVSHTEGDWTREVERACDPIPEMGAITISPLDVARAVRPLPNWKSPGPDGLHNFWIKWFKRSHARLASQFQSALESGSLPQFLTTGITHLLHKSGSTAEPKNYRPITCLPTVYKVLTSILRAKINQHIETNSIMSASQNGCRNRSRGTKELLLIDVAISQQVRRSRRDLSTCWIDYKKAYDSVPHTWLMRVLELYKVDAVLRTFLMSCMGQWRTVLRYPGCGQIQANSDPIRIERGIFQGDSLSPLWFCLALNPLSTLLEGSGQGYRLRRGGQVISHLLYMDDLKLFAPNNLQLMKLLKVTETFSSTISMEFGVDKCAVMHVKRGEIMESVGTQLSDSIHLRSLSSTETYKYLGMSEALGINANDVKQSLKERFFGRLNKVLNSLLSGGNKVRAFNGWVMPVLMYSFGILKWTQTELDALDRRVRSLLTANRMHHPRSSVMRLYIPRKCGGRGFLNAKTLHNREICSLREFFLEADVGMHRDVVAVDKGLTALSLANENWRKPVVLDTNDRREVWQSKELHGRFYRVLHGPDVDFLASVAWLRFGDLFGETEGFVCAIMDEVMMTNNYRKYIVKDGTVDICRACHRPGESIRHIISGCSSLANGDYLHRHNLVARIIHQQLALKYNLVESEVPYYRYVPDPVLENGNCTLYWDRSIITDRTIIANKPDIVVIDRLERRAMIVDIAVPHDVNLVKTEKDKQTKYLDLAREVVDMWDVNTAVIVPIVVTANGIIAKSLDQHLKRLSLGSWIKGLIQKAVLLDTARIVRRFLSQGP

SEQ ID NO: 10488 - protein, 1200 aa, Mamestra brassicae
MLTRSRARAQTAQPTSSGSSLSSASQPPGPAPAVSPEIPVAAVASSSSDEYFSPPTTPPPARRRGRGRPPTSLGPRGPPASDRVPAIGGSVQRMRWTQTINENVMRSYYGATEGGTNLTAYRGRMLSLFQVLEPAVNVSAQRLSDQVRVILRNRMLDDAVLDRLRLESRSGRVSPASPPAAVQIQSSISPRSNNVGEDDDDGAISVSTQCNERLRSALEDAFREYRSTPPELRPRLSRLPMHNKNRALVCALDSQLTNCFDSSEDLADTHSILYCAAAAACRVAHVKFLNSDRATRPAVPAWQCRIERRIGEARALIGKLICFREGNTRRRVMRFVRRAFSGTDTSPRDYLTRVTERIDFLKQKIYAWANRIRRYKRRVERYTQNRTFQSNERWVYRAWERPDQGVTDTRLPDDDVMCSFWRNIWSVPVSHTEGDWIREVEHACDPILEMGATTISPQDVARAVRPLPNWKSPGPDGLHNFWIKWFTGSHARLASQFQSALESGSLPQFLTTGITHLLHKSGSTAEPKNYRPITCLPTVYKVLTSILRAKINHHIESNSIMSASQNGCRNGSRGTKELLLMDIAISQQVRRSRKDLSTCWIDYKKAYDSVPHTWLMRVLELYKVDAVLRTFLMSCMGQWRTVLRYPGCRQIQVNGDLIRIERGIFQGDSLSPLWFCLALNPLSTLLEGSGQGYRLRRGGQVISHLLYMDDLKLFAPNNLQLMELLKVTETFSSAISMEFGVDKCAVMHVKRGEIMESVGTQLSDSIHLRSLSSTETYKYLGMSEALGINANDMKQSLKERFFGRLNKVLNSLLSGGNKVRAFNGWVMPVLMYSFGILKWTQTELDALDRRVRSLLTANRMHHPRSSVMRLYIPRKCGGRGFLNAKTLHNREICSLREFFLEADVGMHRDVVAVDKGLTALSLANENWRKPVVLDTNDRRKVWQSKELHGRFYRVLHGPDVDFLASVAWLRFGDLFGETEGFVCAIMDEVMMTNNYRKYIVKDGTVDICRACHRPGESIRHIISGCSSLANGDYLHRHNLVARIIHQQLALKYNLVESEVPYYRYVPDPVLENGNCTLYWDRSIITDRTIVANKPDIVVIDRLERRAMIVDIAVPHDENLVKTEKDKQTKYLDLAREVVDMWDVNTAVIVPIVVTANGIIAKSLDQHLKRLSLGSWIKGLIQKAVLLDTARIVRRFLSQGP

SEQ ID NO: 10489 - protein, 1200 aa, Mamestra brassicae
MLTRSRARAQTAQPTSSGSSLSSASQPPGPAPAVSPEIPVAAVASSSSDEYFSPPTTPPPARRRGRGRPPTSLGPRGPPASDRVPAIGGSVQRMRWTQTINENVMRSYYGATEGGTNLTAYRGRMLSLFQVLEPAVKVSAQRLSDQVRVILRNRMLDDAVLDRLRLESRSGRVSPASPPAAVQIQSSISPRSNNVGEDDDDGAISVSTQCNERLRSALEDAFREYRSTPPELRPRLPRLPMHNKNRALVCALDSQLTNCFDSSEDLADTHSILYCAAAAACRVAHVKFLNSDRATRPAVPAWQCRIERRIGEARALIGKLICFREGNTRRRVMRFVRRAFSGTDTTPRDYLTRVTERIDFLKQKIYAWANRIRRYKRRVERYTQNRTFQSNERWVYRAWERPDQGVTDTRLPDDDVMCSFWRNIWSVPVSHTEGDWIREVERACDPILEMGATTISPQDVARAVRPLPNWKSPGPDGLHNFWIKWFTGSHARLASQFQSALESGSLPQFLTTGITHLLHKSGSTAEPKNYIPITCLPTVYKVLTSILRAKINHHIESNSIMSASQNGCRNGSRGTKELLLMDIAISQQVRRSRKDLSTCWIDYKKAYDSVPHTWLMRVLELYKVDAVLRTFLMSCMGQWRTVLRYPGCRQIQVNGDPIRIERGIFQGDRLSPLWFCLALNPLSTLLEGSGQGYRLRRGGQVISHLLYMDDLKLFAPNNLQLMELLKVTETFSSAISMEFGVDKCAVMHVKRGEIMESVGTQLSDSIHLRSLSSTETYKYLGMSEALGINANDMKQSLKERFFGRLNKVLNSLLSGGNKVRAFNGWVMPVLMYSFGILKWTQTELDALDRRVRSLLTANRMHHPRSSVMRLYIPRKCGGRGFLNAKTLHNREICSLREFFLEADVGMHRDVVAVDKGLTALSLANENWRKPVVLDTNDRRKVWQSKELHGRFYRVLHGPDVDFLASVAWLRFGDLFGETEGFVCAIMDEVMMTNNYRKYIVKDGTVDICRACHRPGEPIRHIISGCSSLANGDYLHRHNLVARIIHQQLALKYNLVESEVPYYRYVPDPVLENGNCTLYWDRSIITDRTIVANKPDIVVMDRLERRAMIVDIAVPHDENLVKTEKDKQTKYLDLAREVVDVWDVNTAVIVPIVVTANGIIAKSLDQHLKRLSLGSWIKGLIQKAVLLDTARIVRRFLSQGP

SEQ ID NO: 10490 - protein, 1198 aa, Mamestra brassicae
MLTRAAAQRARLPPPASSLSSASPPPEPSPTVSAVIPAVAVASSSSDEYFSPPTSPPPARRRRGRRPPDGLGPRGPPASDRVPAPGGSVQRMRWTQTINENVMRSYYGATEGGTNLTAYRGRMLSLFQVLEPAVNVSAQRLSDQVRVIQRNRMLDDAVLDRLRLESRNGRVSAASPPAAVQIQFSVSPRPNIVGEDDDDGAISVSTQCNERLRSALEDAFREYRSTPPELRPRLPRLPMHNKNRALVCALDSQLANCFDSSEDLADTHSILYCAAAAACRVAHVKFPNSDRATRPAVPAWQYRIERRIGEARALIGKLICFREGNTRRRVMRFVRRAFSGTDTSPRDYLTRVTERIDFLKQKIYAWANRIRRYKRRVERYTQNRTFQSNERWVYRAWERPDQGVTDTRLPDDDVMCSFWRNIWSVPVSHTEGDWTREVERACDPIPEMGAITISPQDVARAVRPLPNWKSPGPDGLHNFWIKWFKRSHARLASQFQSALESGSLPQFLTIGITHLLHKSGSTAEPKNYRPITCLPTVYKVLTSILRAKINQHIETNSIMSASQNGCRNRSRGTKELLLIDVAISQQVRRSRRDLSTCWIDYKKAYDSVPHTWLMRVLELYKVDAVLRTFLMSCMGQWRTVLRYPGCRQIQANSDPIRIERGIFQGDSLSPLWFCLALNPLSTLLEGSGQGYRLRRGGQVISHLLYMDDLKLFAPNNLQLMKLLKVTETFSSAISMEFGVDKCAVMHVKRGEIMESVGTQLSDSIHLRSLSSTETYKYLGMSEALGINANDVKQSLKERFFGRLNKVLNSLLSGGNKVRAFNGWVMPVLMYSFGILKWTQTELDALDRRVRSLLTANRMHHPRSSVMRLYIPRKCGGRGFLNAKTLHNREICSLREFFLEADVGMHRDVVAVDKGLTALSLANENWRKPVVLDTNDRREVWQSKELHGRFYRVLHGPDVDFLASVAWLRFGDLFGETEGFVCAIMDEVMMTNNYRKYIVKDGTVDICRACHRPGESIRHIISGCSSLANGDYLHRHNLVARIIHQQLALKYNLVESEVPYYRYVPDPVLENGNCTLYWDRSIITDRTIIANKPDIVVIDRLERRAMIVDIAVPHDVNLVKTEKDKQTKYLDLAREVVDMWDVNTAVIVPIVVTANGIIAKSLDQHLKRLSLGSWIKGLIQKAVLLDTARIVRRFLSQGP

SEQ ID NO: 10491 - protein, 1198 aa, Noctua fimbriata
MLTRAAAKRARLSPPDPSLSSASPPPESSPVMSAVTPAVAVASSSSDEYFSPPTTPPPVRRRGGRRPPDGLGPRGPPASDRVPAPGGSVQRMRWTQSINENVMRSYYGATEGGNNLTAYRVRMLSLFQVLEPAVNVSAQRLSDQVRVIQRNRMLDDTVLDRLRTEMQSSHVIATPPPQAVVPPQSTIIPNRYNDVSNDIVTNVSTQCNEEMRSALEGAIREYRFMQPDLRPRIPRLPMHNKNRALVAVLDSQLSNYFDNCEDLTDAHSILYCAAVAACRVAHVKFSNDRATRPKPAVPPWQYRIERRIGGARALIGKLICFREGNTRPRVMRFVRRAFSGTDISPRDYMSRITERIDFLKQKVYAWANRIRRYKRRVDRYTQNRTFQRDERWVYRAWERPDQGVADTRLPDDDAMCSFWRSIWSVPVSHTEGEWTQGVERACDLVPEMGAITISPQDVVRAVRPLPNWKSPGPDGLHNFWIKWFTRSHARLAILFQSALESGSLPEFLTTGITHLLHKSGSTAEPKNYRPITCLPTVYKVLTSILRAKINKHIDDNSIMSASQNGCRNGSRGTKELLLIDMAISQQVRRSRRDLSTCWIDYKKAYDSVPHTWLMRVLELYKVDATLRTFLMSCMGQWRTVLRYPGCRQIQRNSEPIRIERGIFQGDSLSPLWFCLALNPLSTLLEDSGLGYRLRRGGQVISHLLYMDDLKLFAPNDLQLMELLKVTETFSSAIRMEFGVDKCAVMHVKRGEIVESVGTQLSDSINLRSLSATETYKYLGMSEALGINVADMKQSLKERFFGRLKKVFNSLLSGGNKVRAFNGWVMPVLMYSFGILKWTQTELDALDRRVRTLLTAYRMHHPRSSLMRLYIPRKCGGRGFLNAKTLHNREICSLREYFLETDVGMHRDVVAVDKGLTPLSLAKENWRKPLVLDTNDRMEVWQSKELHGRFFRALHGPDVDLSASVAWLRSGDLFGETEGFVCAIMDEVMMTNNYRRFIVKDGTVDICRACHRPGESIRHIISGCSRLANGEYLHRHNLVARIIHQQLALKYNLVESEVPYYKYVPDPVLENGSITLYWDQSIITDRTIVANKPDIVVVDRSERRTMIVDITVPHDENLVKAEKDKKIKYLDLAREVVDMWDVDSAIIVPIVVSAHGLIAKSLDQYLRRLSLGSWIKGLIQKAVLLDTARIVRRFLSLEP

SEQ ID NO: 10492 - protein, 1198 aa, Noctua fimbriata
MLTRSAARRARLSPPDPSLSSASPPPESSPVVSAVTPAVAVASSSSDEYFSPPTTPPPVRRRGGRRPPDGLGPRGPPASDRVPAPGGSVQRMRWTQSINANVMRAYYGATEGGNNLTAYRVRMLSLFQVLEPAVNVSAQRLSDQVRVIQRNRMLDDTVLDRLRTEMQSSHVIATPPPQAVVPPQSTIIPNRDNDVSNDIVTNVSTQCSEEMRSALEGAIREYRFMQPDLRPRIPRLPMHNKNRALVAVLDSQLSNYFDNCEDLTDAHSILYCAAVAACRVAHVKFSDDRATRPKPAVPPWQYRIERRIGGARALIGKLICFREGNTRPRVMRFVRRAFSGTDISPRDYMSRITERIDFLKQKVYAWANRIRRYKRRVDRYTQNRTFQRDERWVYRAWERPDQGVADTRLPDDDAMCSFWRSIWSVPVSHTEGEWTQGVERACDLVPEMGAITISPQDVVRAVRPLPNWKSPGPDGLHNFWIKWFTRSHARLAILFQSALESGSLPEFLTTGITHLLHKSGSTAEPKNYRPITCLPTVYKVLTSILRAKINKHIDDNSIMSASQNGCRNGSRGTKELLLIDMAISQQVRRSRSDLSTCWIDYKKAYDSVPHTWLMRVLELYKVDATLRTFLMSCMGQWRTVLRYPGCRQIQRNSEPIRIERGIFQGDSLSPLWFCLALNPLSTLLEDSGLGYRLRRGGQVISHLLYMDDLKLFAPNDLQLMELLKVTETFSSAIRMEFGVDKCAVMHVKRGEIVESVGTQLSDSINLRSLSATETYKYLGMSEALGINVADMKQSLKERFFGRLKKVFNSLLSGGNKVRAFNGWVMPVLMYSFGILKWTQTELDALDRRVRTLLTAYRMHHPRSSVMRLYIPRKCGGRGFLNAKTLHNREICSLREYFLETDVGMHRDVVAVDKGLTPLSLAKENWRKPVMFDTNYRMEVWQSKELHGRFFRALHGPDVDLSASVAWLRSGDLFGETEGFVCAIMDEVMMTNNYRRFIVKDGTVDICRACHRPGESIRHIISGCSRLANGEYLHRHNLVARIIHQQLALKYNLVELEVPYYKYVPDPVLENGSITLYWDQSIITDRTIVANKPDIVVVDRSERRTMIVDITVPHDENLVKAEKDKKIKYLDLAREVVDMWDVDSAIIVPIVVSAHGLIAKSLDQYLRRLSLGSWIKGLIQKAVLLDTARIVRRFLSLEP

SEQ ID NO: 10493 - protein, 1198 aa, Noctua fimbriata
MLTRAAAKRARLSPPDPSLSSASPPPESSPVMSAVTSAVAVASSSSDEYFSPPTTPPPVRRRGGRRPPDGLGPRGPPASDRVPAPGGSVQRMRWTQSINENVMRSYYGATEGGNNLTAYRVRMLSLFQVLEPAVNVSAQRLSDQVRVIQRNRMLDDTVLDRLRTEMQSSHVIATPPPQAVVPPQSTIIPNRDNDVSNDIVTNVSTQCNEEMRSALEGAIREYRFMQPDLRPRIPRLPMHNKNRALVAVLDSQLSNYFDNCEDLTDAHSILYCAAVAACRVAHVKFSNDRATRPKPAVPPWQYRIERRIGGARALIGKLICFREGNTRPRVMRFVRRAFSGTDISPRDYMSRITERIDFLKQKVYAWANRIRRYKRRVDRYTQNRTFQRDERWVYRAWERPDQGVADTRLPDDDAMCSFWRSIWSVPVSHTEGEWTRGVERACDLVPEIGAITISPQDVVRAVRPLPNWKSPGPDGLHNFWIKWFTRSHARLAILFQSALESGSLPEFLTIGITHLLHKSGSTAEPKNYRPITCLPTVYKVLTSILRAKINKHIDDNSIMSASQNGCRNGSRGTKELLLIDMAISQQVRRSRRDLSTCWIDYKKTYDSVPHTWLMRVLELYKVDATLRTFLMSCMGQWRTVLRYPGCRQIQRNSEPIRIERGIFQGDSLSPLWFCLALNPLSTLLEDSGLGYRLRRGGQVISHLLYMDDLKLFAPNDLQLMELLKVTETFSSAIRMEFGVDKCAVMHVKRGEIVESVGTQLSDSINLRSLSATETYKYLGMSEALGINVADMKQSLKERFFGRLKKVFNSLLSGGNKVRAFNGWVMPVLMYSFGILKWTQTELDALDRRVRTLLTAYRMHHPRSSIMRLYIPRKCGGRGFLNAKTLHNREICSLREYFLETDVGMHRDVVAVDKGLTPLSLAKENWRKPLVLDTNDRMEVWQSKELHGRFFRALHGPDVDLSASVAWLRSGDLFGETEGFVCAIMDEVMMTNNYRRFIVKDGTVDICRACHRPGESIRHIISGCSRLANGEYLHRHNLVARIIHQQLALKYNLVESEVPYYKYVPDPVLENGSITLYWDQSIITDRTIVANKPDIVVVDRSERRTMIVDITVPHDENLVKAEKDKKIKYLDLAREVVDMWDVDSAIIVPIVVSAHGLIAKSLDQYLRRLSLGSWIKGLIQKAVLLDTARIVRRFLSLEP

SEQ ID NO: 10494 - protein, 1198 aa, Noctua fimbriata
MLTRAAAKRARLSPPDPSLSSASPPPESSPVMSAVTPAVAVASSSSDEYFSPPTTPPPVRRRGGRRPPDGLGPRGLPASDRVPAPGGSVQRMRWTQSINENVMRSYYGATEGGNNLTAYRVRMLSLFQVLEPAVNVSAQRLSDQVRVIQRNRMLDDTVLDRLRTEMQSSHVIATPPPQAVVPPQSTIIPNRDNDVSNDIVTNVSTQCNEEMRSALEGAIREYRFMQPDLRPRIPRLPMHNKNRALVAVLDSQLSNYFDNCEDLTDAHSILYCAAVAACRVAHVKFSNDRATRPKPAVPPWQYRIERRIGGARALIGKLICFREGNTRPRVMRFVRRAFSGTDISPRDYMSRITERIDFLKQKVYAWANRIRRYKRRVDRYTQNRTFQRDERWVYRAWERPDQGVADTRLPDDDAMCSFWRSIWSVPVSHTEGEWTQGVERACDLVPEMGAITISPQDVVRAVRPLPNWKSPGPDGLHNFWIKWFTRSHARLAILFQSALESGSLPEFLTTGITHLLHKSGSTAEPKNYRPITCLPTVYKVLTSILRAKINKHIDDNSIMSASQNGCRNGSRGTKELLLIDMAISQQVRRSRRDLSTCWIDYKKAYDSVPHTWLMRVLELYKVDATLRTFLMSCMGQWRTVLRYPGCRQIQRNSEPIRIERGIFQGDSLSPLWFCLALNPLSTLLEDSGLGYRLRRGGQVISHLLYMDDLKLFAPNDLQLMELLKVTETFSSAIRMEFGVDKCAVMHVKRGEIVESVGTQLSDSINLRSLSATETYKYLGMSEALGINVADMKQSLKERFFGRLKKVFNSLLSGGNKVRAFNGWVMPVLMYSFGILKWTQTELDALDRRVRTLLTAYRMHHPRSSIMRLYIPRKCGGRGFLNAKTLHNREICSLREYFLETDVGMHRDVVAVDKGLTPLSLAKENWRKPLVLDTNDRMEVWQSKELHGRFFRALHGPDVDLSASVAWLRSGDLFGETEGFVCAIMDEVMMTNNYRRFIVKDGTVDICRACHRPGESIRHIISGCSRLANGEYLHRHNLVARIIHQQLALKYNLVESEVPYYKYVPDPVLENGSITLYWDQSIITDRTIVANKPDIVVVDRSERRTMIVDITVPHDENLVKAEKDKKIKYLDLAREVVDMWDVDSAIIVPIVVSAHGLIAKSLDQYLRRLSLGSWIKGLIQKAVLLDTARIVRRFLSLEP

SEQ ID NO: 10495 - protein, 1167 aa, Noctua fimbriata
MSAVTPAVAVASSSSDEYFSPPTTPPPVRRRGGRRPPDGLGPRGPPASDRVPAPGGSVQRMRWTQSINENVMRSYYGATEGGNNLTAYRVRMLSLFQVLEPAVNVSAQRLSDQVRVIQRNRMLDDTVLDRLRTEMQSSHVIATPPPQAVVPPQSTIIPNRDNDVSNDIVTNVSTQCNEEMRSALEGAIREYRFMQPDLRPRIPRLPMHNKNRALVAVLDSQLSNYFDNCEDLTDAHSILYCAAVAACRVAHVKFSNDRATRPKPAVPPWQYRIERRIGGARALIGKLICFREGNTRPRVMRFVRRAFSGTDISPRDYMSRITERIDFLKQKVYAWANRIRRYKRRVDRYTQNRTFQRDERWVYRAWERPDQGVADTRLPDDDAMCSFWRSIWSVPVSHTEGEWTQGVERACDLVPEMGAITISPQDVVRAVRPLPNWKSPGPDGLHNFWIKWFTRSHARLAILFQSALESGSLPEFLTTGITHLLHKSGSTAEPKNYRPITCLPTVYKVLTSILRAKINKHIDDNSIMSASQNGCRNGSRGTKELLLIDMAISQQVRRSRSDLSTCWIDYKKAYDSVPHTWLMRVLELYKVDATLRTFLMSCMGQWRTVLRYPGCRQIQRNSEPIRIERGIFQGDSLSPLWFCLALNPLSTLLEDSGLGYRLRRGGQVISHLLYMDDLKLFAPNDLQLMELLKVTETFSSAIRMEFGVDKCAVMHVKRGEIVESVGTQLSDSINLRSLSATETYKYLGMSEALGINVADMKQSLKERFFGRLKKVFNSLLSGGNKVRAFNGWVMPVLMYSFGILKWTQTELDALDRRVRTLLTAYRMHHPRSSIMRLYIPRKCGGRGFLNAKTLHNREICSLREYFLETDVGMHRDVVAVDKGLTPLSLAKENWRKPLVLDTNDRMEVWQSKELHGRFFRALHGPDVDLSASVAWLRSGDLFGETEGFVCAIMDEVMMTNNYRRFIVKDGTVDICRACHRPGESIRHIISGCSRLANGEYLHRHNLVARIIHQQLALKYNLVESEVPYYKYVPDPVLENGSITLYWDQSIITDRTIVANKPDIVVVDRSERRTMIVDITVPHDENLVKAEKDKKIKYLDLAREVVDMWDVDSAIIVPIVVSAHGLIAKSLDQYLRRLSLGSWIKGLIQKAVLLDTARIVRRFLSLEP

SEQ ID NO: 10496 - protein, 1045 aa, Atethmia centrago
MLDDTVLDRLRSETQSGHAIAPPSQTVVVSTQLRTNQADEGSDDRATNVSTQYNVELRSALEDAIREYRFMSPELRPRLPRLPMHKKNRALVAALDSQLSNYFDDCEDLTDTHSILYCAAVAVCRVAHVKFAKDSRATRPKPTVPAWQRRIERRIGGARALIGKLICFREGNTRPRVMRFVRRAFSGTDIGPQDYMSRVTERIDFLKQKVYAWANRIRRYKRRVERYTQNRTFQSDERWVYRGWERPDQGVTGTRLPDDDVMCSFWRSIWSVPVSHTEGDWVREVERACDPIPEMGAITISPQDVARAVRPLPNWKSPGPDGLHNFWLKWFLRSHARLAAQYQTALESGSLPQFLTTGVTHLLHKSGSTAEPKNYRPITCLPTVYKVLTSILRAKINEHIDTNSIMSASQNGCRNGSRGTKELLLIDITITQQVRHSRKDLATCWIDYKKAYDSVPHTWLMRVLELYKVDATLRTFLMSCMGQWRTVLRYPGCRNIQRNSEPIRIEQGIFQGDSLSPLWFCLALNPLSTLLEDSGLGYRLRRGSQAISHLLYMDDLKLFASNNLQLMELLKITETFSSAIRMEFGVDKCAVMHVKRGKIMESVGTQLSDSINLRALSASETYKYLGMSEALGINVTDMKQSLKERFFGRLKKVFNSLLSGGNKVRAFNGWVMPVLMYSFGILKWTQTELDALDRRVRTLLTAYRMHHPRSSVMRLYIPRKCGGRGFLNAKTLHNREVCSLREYFLKADVGMHRDVVAVDKGLTPLSLAKENWRKLVVLDTNDRREVWQSKELHGRFFRALHEPDVDFQASVASLRFGDLFGETEGFVCAIMDEVIMTKNYRRFIVKDGTVDVCRACQRPGESIRHIISGCSRLANEEYLHRHNLVARIIHQQLALKYNLVESEVPYYRYVPDPVLENGNITLYWDRSIITDRTIIANKPDIVVVDRTERRAMIVDITVPHDGNLVKAEKDKQIKYLDLAREVVDMWDVNSAIIVPIVISANGLIAKSLDQHLRRLSLDSWIKGLIQRAVLLDTARIVRRFLSLEP

SEQ ID NO: 10497 - protein, 1194 aa, Atethmia centrago
MLTRSAARARLPPPDFSLSSASPPPVPNPTVTSPAAVVASSSSDEYFSPPTTPPPVRRRGGHRPPDGLGSRGPPASDRVPAPGGSVQRMRWTRSINENVMRSYYGATEGGNNLTAYRVRMLSLFQVLEPAVNVSAQRLSDQVRVIQRNHMLDDTVLDRLRSETQSGHAIAPPSQTVVVSTQLRTNQADEGSDDRATNVSTQYNVELRSALEDAIREYRFMSPELRPRLPRLPMHKKNRALVAALDSQLSNYFDDCEDLTDTHSILYCAAVAVCRVAHVKFAKDSRATRPKPTVPAWQRRIERRIGGARALIGKLICFREGNTRPRVMRFVRRAFSGTDIGPQDYMSRVTERIDFLKQKVYAWANRIRRYKRRVERYTQNRTFQSDERWVYRGWERPDQGVTGTRLPDDDVMCSFWRSIWSVPVSHTEGDWVREVERACDPIPEMGAITISPQDVARAVRPLPNWKSPGPDGLHNFWLKWFLRSHARLAAQYQTALESGSLPQFLTTGVTHLLHKSGSTAEPKNYRPITCLPTVYKVLTSILRAKINEHIDTNSIMSASQNGCRNGSRGTKELLLIDITITQQVRHSRKDLATCWIDYKKAYDSVPHTWLMRVLELYKVDATLRTFLMSCMGQWRTVLRYPGCRNIQRNSEPIRIERGIFQGDSLSPLWFCLALNPLSTLLEDSGLGYRLRRGSQAISHLLYMDDLKLFASNNLQLMELLKITETFSSAIRMEFGVDKCAVMHVKRGKIMESVGTQLSDSINLRALSASETYKYLGMSEALGINVTDMKQSLKERFFGRLKKVFNSLLSGGNKVRAFNGWVMPVLMYSFGILKWTQTELDALDRRVRTLLTAYRMHHPRSSVMRLYIPRKCGGRGCLNAKTLHNREVCSLREYFLKADVGMHRDVVAVDKGLTPLSLAKENWRKLVVLDTNDRREVWQSKELHGRFFRALHEPDVDFQASVAWLRFGDLFGETEGFVCAIMDEVIMTKNYRRFIVKDGTVDVCRACQRPGESIRHIISGCSRLANEEYLHRHNLVARIIHQQLALKYNLVESEVPYYRYVPDPVLENGNITLYWDRSIITDRTIIANKPDIVVVDRTERRAMIVDITVPHDGNLVKAEKDKQIKYLDLAREVVDMWDVNSAIIVPIVISANGLIAKSLDQHLRRLSLDSWIKGLIQRAVLLDTARIVRRFLSLEP

SEQ ID NO: 10498 - protein, 1198 aa, Atethmia centrago
MLTRSAAVRARLPPPDSSLSSASPPPVPSPTVCAVTTPTAAVASSSSDEYFSPPMTPPPVRRRGGRRPPDGLGSRGPPASDRVPAPGGSVKRMRWTQSVNENVMRSYYGATEGGNNLTAYRVRMLSLFQVLEPAVNVSAQRLSDQVRVIQRNHMLDDTVLDRLRSEMQRSHVIVPPSQTVVHSPQLSTNQADEGSDDRATNVSTQCNVELRSALEDAIREYRLMSPELRPRLPRLPMHKKNRALVAALDSQLSNYFDDCEDLTDTHSILYCAAVAVCRVAHVKFAKDSRTTRPKPTVPAWQCRIESRIGGARALIGKLICFREGNTRPRVMRFVRRAFSGTDIGPQDYMTRVTERIDFLKQKVYAWANRIRRYKRRVERYTQNRTFQSDERWVYRGWERPDQDVTDTRLPDDDVMCSFWRSIWSVPVSHTEGDWARKVERACDPIPEMGAITICPQDVARAVRPLPNWKSPGPDGLHNFWLKWFLRSHARLAAQYQTALESGSLPQFLTTGVTHLLHKSGSTTEPKNYRPITCLPTVYKLLPSILRAKINKHIDTNSIMSASQNGCRNGSRGTKELLLIDMTISQQVRRSRKDLSTCWIDYKKAYDSVPHTWLMRVLELYKVDATLRTFLISCMGQWRTVLRYPGCRNIQRNSEPIRIERGIFQGDSLSPLWFCLALNPLSTLLEDSGLGYRMRRGGQVISHLLYMDDLKLFASNNLQLMELLKITESFSSAIRMEFGVDKCAVMHVKRGKIVESVGTQLSDSINLRTLSASETYKYLGMSEALGINVTNMKQSLKERFFGRLKKIFNSLLSGGNKVRAINGWVMPVLMYSFGILKWTQTELDALDRRVRTLLTAYRMHHPRSSVMRLYIPRKCGGRGFLNAKTLHNREVCSLREYFLEADVGMHRDVVAVDKGLTPLSLAKENWRKLVVLDTNDRREVWQSKELHGRFFRALHEPDVDFQASVAWLRFGDLFGETEGFVCAIMDEVIMTKNYRRFIVKDGTVDVCRACHRPGESIRHIISGCSRVANEEYLHRHNLVARIIHQQLALKYSLVESEVPYYRYVPDPVLDNGNITLYWDRSIITDRTIVANKPDIVVVDRTERRAMIVDITVPHDGNLVKAEKDKQIKYLDLAREVVDMWDVDSVIIVPIVVSANGLIAKSLDQHLKRLTLDGWIKGLIQKAVLLDTARIVRRFLSLEP

SEQ ID NO: 10499 - protein, 1194 aa, Autographa gamma
MLTRSKTRTPARPPSPDPSPSSASQLPDHVPAPAPAVASSSSDEYYSPPTTPTPVRRQGRRRPPSSLAPAGQPASNRAPAPGGDVRRMKWTLSINENVMRAYYGATEGGTNLTAYRARMLSLFQGLEPDVNVSAQRLSDQVRVIQRNHRLDDATLDRLRSEVQRSSATSTPSPAVVPITGSPPTNLVDGEEEDGAITVSTQCSENIRSTLEDTIREFRSTPPDIRPRLPRLPMHNRNKAIMGVLDSLLLAYFGSSEDLSDTHSILYCAALAACRVANVKINNQNLDTRPKPAVPAWQYRIERRVAEARALIGKLIAFKDGNSRPRVMRFVRRAFTGTSISPSEYTARVTERIDFFKQKVCAWANRIRRYKRRVDRFHLNRMFQRDQRWVFRTWERPVLGVDDGRLPDEDATNSFWRNIWSVPVSHSEGDWMRDVEESCEPIQEMGAITISPQDVANAIRPMSNWKAPGPDGLQNFWLKWFKSSHGCLASQFQCAIESESLPQFFTTGSTHLLHKTGSTTDPKNYRPITCLPTIYKLLTSILRVKINEHIDSHSIMSASQNGCRNGSRGTKELLLIDMAICQQVRRSKKNLSTCWIDYKKAYDSVPHSWLMRVLELYKINTTLRAFLLSCMRRWTTVLRYPGCRDIQQSGGPIRIERGIFQGDSLSPLWFCLALNPLSTLLENSRLGYSLRRGSQVISHLLYMDDLKLFASNELQLMGLLRITESFSNSIRMEFGVDKCAVMHVKQGGIVESQGIQLSDSINLRSLSAADTYKYLGMSEALGINVAGMKQSLLTRFFGRLNKVLKSLLSGGNRVRAFNGWVMPVLMYSFGILKWTQTELDALDRRVRTLLTANRMHHPRSSVMRLYIPRKCGGRGFLNAKTLHNREVCNLREYFLQFDVGMHRDVVVGDKGFTPLSLGKENWHKPVVLSVKDRKDVWQSKELHGRYYRSLHGPDVDFLASVAWLRFGDLFGETEGFVCAIMDEVVMTNNYRKYIIKDGTVDICRACHCPGESIRHIISGCSRLANGEYLHRHNQVARIIHQQLALRYKLVEAEVPYYRYVPDPVLDNGHVTLYWDRSIITDRTIVANKPDIVVIDRSERRAMIVDVTIPHDENLVKAEKEKQLKYLDLAHEVVDMWEVDSAVIVPIVVTANGIIAKSLDQHLKRLSLGIWVKGLMQKAVLLDTARIVRRFLSLEP

SEQ ID NO: 10500 - protein, 1206 aa, Mesoligia furuncula
MLTRSRARHLLKNTHPTSSGSSLSSASQLPDPAPDVSSVRPAAAVASSSSDEYFSPPTTPPPVCRRGRGRPPASLGLRGPPASDRVPAPGGSVQRMRWTQTVNENVMRAYFGATEGGSNLTAYRGRMLSLFQVLEPAVNVSAQRLSDQVRVIQRNHMLDNVVLDRLRLESRNSHVTPASSLIAVQLQNVPSVSPRPDHVYVEDDDEAITVSSQCNARLRSALEDAFREYRSIPPGLRPRLPRLPMHKKNKALVCALDLQLSNCFNNSKDLTDTHSILYCAAVAACRVAHVKFPNSDRAPRPKPAVPAWQCRIECRIGEARALIGKLICFREGNTRPRVMRFVRRAFSGTDISSRDYLSRVTERIDFLKQKIYAWANRIRRYRRRVERYTQNRTFQNDERWVYRAWERPDQGVTDTPLPDDDAMCSFWRNIWSVPVSHTEGDWTAKIERACDLIPEMGVLTISPQDVARAVRPLPNWKSPGPDGLHNFWIKWFQGSHARLASQFQSALESGSLPQFLTTGITHLLHKSGSTADPKNYRPITCLPTVYKVLTSILRAKINKHIDTNSIMSVSQNGCRNGSRGTKELLLIDMTISQQVRRFRKDLSTCWIDYKKAYDSVPHTWLMRVLELYKVDTTLRTFLMSCMGQWRTVLRYPGCRNIQRNSEPIRIERGIFQGDSLSPLWFCLALNPLSTLLEDSGLGYRLRRGGRVISHLLYMDDLKLFAPNNLRLMELLKITETFSSAIRMEFGVDKCAVMHVKRGEIVESVGTQLSDSTNLRALSASETYKYLGMSEALGINVTDMKQSQKERFFGRLKKVFNSLLSGGNKVRAFNGWVMPVLMYSFGILKWTQTELDALDRKVRTLLTANRMHHPRSSVMRLYIPRKCGGRGFLNAKTLHNREICSLREYFLETDVGMHRDVVAVDKGLTPLSLGKENWRKPVVLDTNDRMEVWQSKELHGRFFRALHGPDVDLLASVAWLRFGDLFGETEGFVYAIMDEVMMTNNYRRFIVKDGTVDICRACHRPGESIRHIISGCSRLANGEYLHRHNLVARIIHQQLALKYSLVESEVPYYRYVPDPVLENGNITLYWDRSIITDRTIVANKPDIVVVDRSERRAMIVDITVPHDENLVKAEKDKQVKYLDLAREVVDMWDVDSAIIVPIVVTANGLIAKSLDQHLKRLSLGSWIKGLIQKAVLLDTARIVRRFLSLEP

SEQ ID NO: 10501 - protein, 922 aa, Mesoligia furuncula
MSFAHVKFANDSRATRPKPAIPAWQCRIERRIGGARALIGKLICFREGNTRPRVMRFVRRAFLGADISPQDYMSCVTERIDFLKQKVYAWANRIRRYKRRVERYTQNRTFQSDERWVYRGWERPDQSVADTCLPDDEAMCSFWRSIWSVPVSHTEGDWAREVERACDPIPEMGAITICPQDVARAVRPLPNWKSPGPDGLHNFWIKWFLRSHARLASQFQTALESGSLPQFLTIGITHLLHKSGSTAEPKNYRPITCLPTVYKVLTSILRAKIDKHINTNSIMSVSQNGCKNGSRGTKELLLIDMAISQQVRRSRKDLSTCWIDYKKAYDSVPHTWLMRVLELYKVDATLRTFLMSCMGQWRTVLRYPGCRNIQRNSEPIRIERGIFQGDSLSPLWFCLALNPLSTLLEDSGLGYRLRRGGQVISHLLYMDDLKLFAPNNLQLMELLKVTQTFSSAIRMEFGVDKCAVMHVKRGEIVESVGTQLSDSTNLRALSASETYKYLGMSEALGINVTDMKQSLKERFFGRLKKVLNSLLSGGNKVRAFNGWVMPVLMYSFGILKWTQTELDALDRRVRTLLTANRMHHPRSSVMRLYIPRKCGGRGFLNAKTLHNREICSLREYFLETDVGMHRDVVAVDKGLTPLSLAKENWRKPVVLDTNDRMEVWQSKELHGRYFRALHGPDVDLLASVAWLRFGDLFGETEGFVCAIMDEVMMTNNYRRFIVKDGTVDICRACHRPGESIRHIISGCSRLANGEYLHRHNLVARIIHQQLALKYSLVESEVPYYRYVPDPVLENGNISLYWDRSIITDRTIVANKPDIVVVDRSERRTMIVDITVPHDENLVKAEKDKQIKYLDLAREVVDMWDVDSAIIVPIVVTANGLIAKSLDHHLRRLSLGSWIKGLIQRAVLLDTARIVRRFLSLEP

SEQ ID NO: 10502 - protein, 868 aa, Mesoligia furuncula
MRFVRRAFLGTDISPQDYMSCVTERIDFLKQKVYAWANRIRRYKRRVERYTQNRTFQSDERWVYRSWERPDQSVADTCLPDDEAMCSFWRNIWSVPVSHTEGDWAREVERACDLIPEMGAITICPQDVARAVRPLPNWKSPGPDGLHNFWIKWFLRSHARLASQFQTALESGSLPQFLTTGITHLLHKSGSTTEPKNYRPITCLPTVYKVLTSILRAKIDKHINTNSIMSVSQNGCKNGSRGTKELLLIDMAISQQVRRSRKDLSTCWIDYKKAYDSVPHTWLMRVLELYKIDATLRTFLMSCMGQWRTVLRYPGCRNIQRNSEPIRIERGIFQGDSLSPLWFCLALNPLSTLLEDSGLGYRLRRGGQVISHLLYMDDLKLFAPNNLQLMELLKVTQTFSSAIRMEFGVDKCAVMHVKRGEIVESVGTKLSDSTNLRALSASETYKYLGMSEALGINVTDMKQSLKERFFGRLKKVLNSLLSGGNKVRAFNGWVMPVLMYSFGILKWTQTELDALDRRVRTLLTANRMHHPRSSVMRLYIPRKCGGRGFLNAKTLHNREICSLREYFLETDVGMHRDVVAVDKGLTPLSLAKENWRKPVVLDTNDRMEVWQSKELHGRFFRALHGPDVDLLASVAWLRFGDLFGETEGFVCAIMDEVMMTNNYRRFIVKDGTVDICRACHRPGESIRHIISGCSRLANGEYLHRHNLVARIIHQQLALKYSLVESEVPYYRYVPDPVLENGNISLYWDRSIITDRTIVANKPDIVVVDRSERRAMIVDITVPHDENLVKAEKDKQIKYLDLAREVVDMWDVDSAIIVPIVVTTNGLIAKSLDQHLRRLSLGSWIKGLIQKAVLLDTARIVRRFLSLEP

SEQ ID NO: 10503 - protein, 1206 aa, Mesoligia furuncula
MLTRSRARYLLENTHPTSSGSPLSSASQLPDPAPDVSSVRPAAAVASSSSDEYFSPPTTPPPVCRRGRGRPPASLGLRGPPASDRVPAPGGSVQRMRWTQTVNENVMRAYFGATEGGSNLTAYRGRMLSLFQVLEPAVNVSAQRLSDQVRVIQRNHMLDNVVLDRLRLESRNSHVTPASSTVAVHLQNVPSVSPRPDHVHVEDDDEAISVSSQCNARLRSALEDAFREYRSIPPGLRPRLPRLPMHKKNKALVCALDSQLSNCFNNSKDLTDTHSILYCAAVAACRVAHVKFPNSDRAPRPKPAVPAWQCRIECRIGEARALIGKLICFREGNTRPRVMRFVRRAFSGTDISSRDYLSRVTERIDFLKQKIYAWANRIRRYRRRVERYTQNRTFQSDERWVYRAWERPDHGVTDTRLPDDGAMCSFWRNIWSVPVSHTEGDWTAKIERACDLIPEMGVLTISPQDVARAVRPLPNWKSPGPDGLHNFWIKWFQGSHARLASQFQSALESGSLPQFLTTGITHLLHKSGSTADPKNYRPITCLPTVYKVLTSILKAKINKHIDTNSIMSVSQNGCKNGSRGTKELLLIDMTISQQVRRFRKDLSTCWIDYKKAYDSVPHTWLMRVLELYKVDTTLRTFLMSCMRQWRTVLRYPGCRNIQRNSEPIRIERGIFQGDSLSPLWFCLALNPLSTLLEDSGLGYRMRRGGQAISHLLYMDDLKLFAPNNLQLMELLKITETFSSAIRMEFGVDKCAVMHVKRGVIVESVGIQLSDSTNLRALSASETYKYLGMSEALAINVTDMKQSLKERFFGRLKKVFNSLLSGGNKVRAFNGWVMPVLMYSFGILKWTQTELDALDRKVRTLLTANRMHHPRSSVMRLYIPRKCGGRGFLNVKTLHNREICSLREYFLETDVGMHRDVVAVDKGLTPLSLGKENWRKPVVLDTNDRMEVWQSKELHGRFFRALHGPDVDLIASVAWLRFGDLFGETEGFVCAIVDEVMMTNNYRRFIVKDGTVDICRACHRPGESIRHIISGCSRLANGEYLHRHNLVARIIHQQLALKYSLVESEVPYYRYVPDPVLENGNITLYWDRAIITDRTIVANKPDIVVVDRSERRAMIVDITVPHDENLVKAEKDKQVKYLDLAREVVDMWDVDSAIIVPIVVTANGLIAKSLDQHLKRLSLGSWIKGLIQKAVLLDTARIVRRFLSLEP

SEQ ID NO: 10504 - protein, 1195 aa, Spilarctia lutea
MLTRARRRAQLSPPDSSLRSALPSPEEAIEVPAGAEASSSSSSDEFFSPPTSPIPVRRQGRGRPPTSLGSRGPLTSNRAPAAGGDVRRMKWTHSINENVMRAYFRATELGTNRVRLVSLFQELEPAVNVSAQRLSDQVRAIQRCHLLDDAALERIRSDIRNSLTVPSSSHVLNVVTNSTPQVPQNDDISELVDSEIISVSTQYNDRIRSTLEDAIREYRYVNLNNRPRLPRLPIHKRNLALVSALDSLLPKYFSNSEDLSDTHSILYCAAIAVCRVAGVKFSEYTTTTRQENTLPAWQYRIERRIAEARTLIGKLMSFRSGNTRPRVMRFVKRAFLGTTISPQEYMSCVTERIDFLKQKVYAWANRIRRYRKRVDRYNQNRMFLRNEKWVYRKWENLSPCMSDGQVPDENATNSFWRNMWSVPVTHTEGDWYRDVECSCESLLPMEPISIDEEDVSCAVRSLPNWKAPGPDGLHNFWLKWFRSSHACLASQFQTALDSGSLPQFLTTGITHLLYKSGDAMDPKNFRPITCLPTLYKLLTSILRLKITTHINHNSILSISQNGCRSGTRGTKELLIIDMTISQQVRRNRKSLATCWIDYKKAFDSVPHTWLLKVLELYKIDTTLCTFLKVCMGQWRTALRYPGCRQSAMNDVLIKIERGIFQGDSLSPLWFCLALNPLSTLLEGSGLGYRLQKDDRVISHLFYMDDLKLLAPTKLPLTALLKVTENFSNSIKMEFGVDKCAVMYVKKGEIVESEGIELSDSTKLRSLSATETYKYLGFSQSLGMPESDMKQTLRERFFSRLKKVLKSLLSGGNKVRACNGWVMPVLMYSFGVLRWTQTELDAIDRRVRTLLTAFRMHHPRSSVMRLYIPRRLGGRGLLNIKTLHNREVYNLREYFLQTDVGVHRSVVTVDTVLTPLALAKENWRKPVVLSTNDRREVWKGKVLHGRFYRALNGPDIDFKASTSWLRYSDLFGETEGFVCAIMDEVIMTNNYRRYILKDGTVDICRACHRPGESIRHIISGCSRLANGEYLHRHNQVARIVHQQLALKYHFVNSEVPYYRYVPDPVLENGRATLYWDRSIITDRTIVANKPDIVVMDRLERRAIIIDIAVPHDENLVKVEKEKQIKYLDLSHEIVDMWNVDSVIIVPIVVSAHGLIAKSLDQHLKRLTLEGWIKGLIQKAVLLDTARIVRRFLSLEP

SEQ ID NO: 10505 - protein, 1199 aa, Spilarctia lutea
MLTRARRRAQLSPPDSSLRSALPSPEEAIEVPAGAEASSSSSSDEFFSPPTSPIPVRRQGRGRPPTSLGSRGPLTSNRAPAAGGDVRRMKWTHSINENVMRAYFRATELGTNLTAYRVRLVSLFQELEPAVNVSAQRLSDQVRAIQRCHLLDDAALERIRSDIRNSLTVPSSSHVLNVVTNSTPQVPQNDDISELVDSEIISVSTQYNDRIRSTLEDAIREYRYVNLNNRPRLSRLPIHKRNLALVSALDSLLPKYFSNSEDLSDTHSILYCAAIAVCRVAGVKFAEYTTTTRQENTLPAWQYRIERRIAEARTLIGKLMSFRSGNTRPRVMRFVKRAFLGTTISPQEYMSCVTERIDFLKQKVYAWANRIRRYRKRVDRYNQNRMFQRNEKWVYRKWENLSPCMSDGQVPDENATNSFWRNMWSVPVTHTEGDWYRDVERSCESLLPMEPISIDEEDVSCAVRSLPNWKAPGPDGLHNFWLKWFRSSHACLASQFQTALDSGSLPQFLTTGITHLLYKSGDAMDPKNFRPITCLPTLYKLLTSILRLKITTHINHNSILSISQNGCRSGTRGTKELLIIDMTISQQVRRNRKSLATCWIDYKKAFDSVPHTWLLRVLELYKIDTTLCTFLKVCMGQWRTALRYPGCRQSAMNDVLIKIERGIFQGDSLSPLWFCLALNPLSTLLEGSGLGYRLQKDDRVISHLFYMDDLKLLAPTKLQLTALLKVTENFSNSIKMEFGVDKCAVMYVKKGEIVESEGIELSDSTKLRSLSATETYKYLGFSQSLGMPESDMKQTLRERFFSRLKKVLKSLLSGGNKVRACNGWVMPVLMYSFGVLRWTQTELDAIDRRVRTLLTAFRMHHPRSSVMRLYIPRRLGGRGLLNIKTLHNREVYNLREYFLQTDVGVHRSVVTVDTGLTPLALAKENWRKPVVLGTNDRREVWKGKELHGRFYRALHGPDIDFKTSTSWLRYGDLFGETEGFVCAIMDEVIMTNNYRKYILKDGTVDICRACHRPGESIRHIISGCSRLANGEYLHRHNQVARIVHQQLALKYHLVNSEVPYYRYVPDPVLENGRATLYWDRSIITDRTIVANKPDIVVIDRLERRAIIIDIAVPHDENLVKVEKEKQIKYLDLSHEIVDMWNVDSVIIVPIVVSAHGLIAKSLDQHLKRLTLEGWIKGLIQKAVLLDTARIVRRFLSLEP

SEQ ID NO: 10506 - protein, 1199 aa, Spilarctia lutea
MLTRARLRAQLSPPDSSLRSTLPSPEAITEVPVDAEASSSSSSDEFFSPPTSPIPVRRQGRGRPPTSLGSRGPLTSNRAPATGGDVRRMKWTHSINENVMRAYFRATELGANLTAYRVRLVSLFQELEPSVNVSAQRLSDQVRAIQRCHLLDNAVLERIRSDIRNILIVPSSSHAVDLVPINTPQLPHDHYVDELVESEDISVSTQCNNKIRSALEDAIQEYRYVNWNNRPRLPRLPIHKRNLALVSALDSLLSDYFDNSEDLSDTHSILYCAAVAVCRVANVKFRENMTYVRPKNTIPAWQCRIERRIAETRTLIGKLVSFRSGNTRPRVMRFVKHAFSGTTISPGQYMSCVTERIDFLKQKVYAWANRIRRYRKRVDRYNQNRMFQRNEKWVYRKWEEPSPCVSDGQFPDDNATNTFWRSIWSVPVTHTEGDWCRDVERSCESILPMEPLTIGKDDVSCAVRLLPNWKSPGPDGLHNFWLKWFRSSHACLASQFQAAVDSSSLPQFLTTGITHLLYKSGSAVDPKNFRPITCLPTVYKLLTSILRLKISTHINNNSIISVSQNGCRSGTRGTKELLIMDMTISQQVRRNRKSLATCWIDYKKAYDSVPHTWLLRVLELYKIDTILCTFLKSCMGQWRTVLRYPGCRQSAMTDVLIKIERGIFQGDSLSPLWFCLALNPLSTLLEGSELGYRLRKDDRAISHLLYMDDLKLLAPTKLQLTELLKVTENFSNSIKMEFGVDKCAVMYVKKGLIVESEGIELSDSIKLRSLSATESYKYLGFSQSLGIPESDVKQALRERFFGRLKKVLKSLLSGGNRVRAYNGWVMPVLMYSFGVLRWTQTELDALDRRVRTLLTAFRMHHPRSSVMRLYIPRKFGGRGLLNIKTLHNREIYNLREYFLHTDVGMHRSVVAVDSGLTPLALAKENWRKPVVLSTNDRREVWRGKELHGRFYRALHGPDIDFKTSTSWLRYGDLFGETEGFVCAIMDEVIMTNNYRKYILKDGTVDICRACHRPGESIRHIISGCSRLANGEYLHRHNQVARIVHQQLALKYHLVNSEVPYYRYVPDPVLENGRATLYWDRSIITDRTIVANKPDIVVIDRLERRAIIIDIAVPHDENLVKVEKEKQIKYLDLSHEIVDMWNVDSVIIVPIVVSAHGLVAKSLDQHLKRLTLEGWIKGLIQKAVLLDTARIVRRFLSLES

SEQ ID NO: 10507 - protein, 1023 aa, Spilarctia lutea
MIYVYTIILIIIIMNNSELVDGEIISVSTQYNDRIRSTLEDAIREYRYVNLNNRPRLSRLPMHKRNLALVSALDSLLPKYFSNSEDLSDTHSILYCAAIAVCRVAGVKFAEYTTTTRQENTLPAWQCRIERRIAEARTLIGKLMSFRSGNTRPRVMRFVKRAFLGTTISPQEYMSCVTERIDFLKQKVYAWANRIRRYRKRVDRYNQSRMFQRNEKWVYRKWENLSPCMSDGQVPDENATNSFWHNIWSVPVTHTEGDWYRDVERSCESLLPMEPISIDEEDVSCAVRSLPNWKAPGPDGLHNFWLKWFRSSHACLASQFQTALDSGSLPQFLTTGITQLLYKSGDAMDPKNFRPITCLPTLYKLLTSILRLKITTHINHNSILSISQNGCRSGTRGTKELLIIDMTISQQVRRNRKSLATCWIDYKKAFDSVPHTWLLKVLELYKIDTTLCTFLKVCMGQWRTALRYPGCRQSAMNDVLIKIERGIFQGDSLSPLWFCLALNPLSTLLEGSGLGYRLQKDDRVISHLFYMDDLKLLAPTKLQLTALLKVTENFSNSIKMEFGVDKCAVMYVKKGEIVESEGIELSDSTKLRSLSATETYKYLGFSQSLGMPESDMKQTLRERFFSRLKKVLKSLLSGGNKVRACNDWVMPVLMYSFGVLRWTQTELDAIDRRVRTLLTVFRMHHPSSSVMRLYIPRRLGGRGLLNIKTLHNREVYNLREYFLQTDVGVHRSVVTVDTGLTPLALAKENWRKPVVLSTNDRREVWKGKVLHGRFYRALNGPDIDFKASTSWLRYSDLFGETEGFVCAIMDEVIMTNNYRKYILKDGTVDICRACHRPGESIRHIISGCSRLANGEYLHRHNQVARIVHQQLALKYNLVISEVPYYRYVPDPVLENGRATLYWDRSIITDRTIVANKPDIVVIDRLERRAMIVDIAVPHDENLVKVEKEKQIKYLDLSHEIVDMWNVDSVIIVPIVVSAHGLIAKSLDQHLKRLTLGGWIKALIQKAVLLDTARIVRRFLSLEP

SEQ ID NO: 10508 - protein, 1198 aa, Xestia c-nigrum
MLTRAAARRARLPPPDPSLSSASPPPEPSPIVSAVTPAVAVASSSSDEYFSPPTTPPPARRRGGRRPPDGLGPRGPPASDRVPAPGGSVQRMRWTQSNNENVMRAYYGATEGGNNLTAYRVRMLSLFQVLEPAVNVSAQRLSDQVRVIQRNRMLDDTVLDRLRTEMHSSHVIATPPSQAVVLPQSTTITYRDDDVSSDMITNVGTQYSEDMRSALEGAIREYRFMTPELRPRLPRLPMHNKNRMLVAVLDSQLSNYFDNCEDLTDVHSILYCAAVAACRVARVKFSDDRATRPKPAVPAWQYRIEQRIGGARALIGKLICFREGNTRPRVMRFVRRAFLGTDINPRDYMSRVTERIDFLKQKVYAWASRIRRYKRRVDRYTQNRTFQRDERWVYRAWERPDQGVADTRLPDDDAMCSFWRSIWSVPVSHAEGEWTRVIERACDPVPEMGAITISPQDVACAVRPLPNWKSPGPDGLHNFWIKWFTRSHARLATLFQSALESGSLPEFLTTGITHLLHKSGSTAEPKNYRPITCLPTVYKVLTSILRTKICKHVDDNSVMSASQNGCRNGSRGTKELLLIDMAISQQVRRSRKDLSTCWIDYKKAYDSVPHTWLMRVLELYKVDATLRTFLMSCMGQWRTVLRYPGCRQIQRNSEPIRIERGIFQGDSLSPLWFCLALNPLSTLLEDSGLGYQLRKDGRVISHLLYMDDLKLFAPNDLQLMELLKVTETFSSAIRMEFGVDKCAVMHVKRGEIVESVGTQLPDSINLRSLSATETYKYLGMSEALGINVADMKQSLKERFFGRLKKVFNSLLSGGNKVRAFNGWVMPVLMYSFGILKWTQTELDALDTKVRKLLTAFRMHHPRSSVMRLYIPRKCGGRGFLNAKTLHNREICSLRDYFLEADVGMHRDVVAMDKGLTPLSLAKENWRKPIILTTDDRRKEWQGKELHGRFYRALHGPDVDFLASVSWLRSGDLFGETEGFVCAIMDEVMMTNNYRRFIVKDGTVDICRACHRPGESIRHIISGCSRLANGEYLHRHNLVARIIHQQLALKYNLVESEVPYYRYVPDPVLVNGSITLYWDQSIITDRTVIANRPDIVVMDRSERRAMIVDITVPHDENLVKAEKDKQIKYLDLAREVVDMWEVDSAIIVPIVVSAHGLIAKSLDQHLRRLSLGSWIKGLIQKAVLLDTARIVRRFLSLEP

SEQ ID NO: 10509 - protein, 1000 aa, Xestia c-nigrum
MVTNVSTQCSEDMRSALEGAIREYRFMTPELRPRLPRLPMHNKNKMLMAVLDSQLSNYFDSCEDLTDIHSILYCAAVAACRVAHVKFSDDRATRPKPAVPAWQYRIEQRIGGARALIGKLICFREGNTRPRVMRFVRRAFSGTDISPRDYMFRVTERIDFLKQKVYAWASRIRRYKRRVDRYTQNRTFQRDERWVYRAWERPDQGVADTRLPDDDAMCSFWRSIWSVPVSHAEGEWTRVVERACDPVPEMGAITISPQDVACAVRPLPNWKSPGPDGLHNFWIKWFTRSHARLATLFQSALESGSLPEFLTTGITHLLHKSGSTAEPKNYRPITCLPTVYKVLTSILRAKITKHIDENSVMSASQNGCRNGSRGTKELLLIDMAISQQVRRSRKDLSTCWIDYKKAYDSVPHTWLRRVLELYKVDATLRTFLMSCMGQWRTVLRYPGCRQIQRNSEPIRIERGIFQGDSLSPLWFCLALNPLSTLLEDSGLGYRLRKDGRVISHLLYMDDLKLFAPNDFQLMELLKVTETFSSAIRMEFGVDKCAVMHVKRGGIVESVGTQLSDSINLRSLSATETYKYLGMSEALGISVADMKQSLKERFFGRLKKVFNSLLSGGNKVRAFNGWVMPVLMYSFGILKWTQTELDALDTKVRKLLTAYRMHHPRSSVMRLYIPRKCGGRGFLNAKTLHNREICSLREYFLAADVGMHRDVVAMDKGLTPLSLAKENWRIPVVFTTDDRRKEWQSKELHGRFYRALHGPDVDFQASVSWLRSGDLFGETEGFVCAIMDEVMMTNNYRRFIVKDGTVDICRACHRPGESIRHIISGCSRLANGEYLHRHNLVARIIHQQLALKYNLVESEVPYYRYVPDPVLVNGSITLYWDQSIITDRTVIANRPDIVVMDRSERRAMIVDITVPHDENLVKAEKDKQIKYLDLAREVVDMWEVDSAIIVPIVVSAHGLIAKSLDQHLRRLSLGSWIKGLIQKAVLLDTARIVRRFLSLEP

SEQ ID NO: 10510 - protein, 1047 aa, Xestia c-nigrum
MLDDTVLDRLRTEVQSSRVTATPPSQAVVPPQSTVTTPYCDGDVSSDMVTNVSTQCSEDMRSALEGAIREYRFMKPELRPRLPRLPMHNKNKMLMAVLDSQLSNYFDSCEDLTDIHSILYCAAVAACRVAHVKFSDDRATRPKPAVPAWQYRIEQRIGGARALIGKLICFREGNTRPRVMRFVRRAFSGTDISPRDYMFRVTERIDFLKQKVYAWASRIRRYKRRVDRYTQNRTFQRDERWVYRAWERPDQGVADTRLPDDDAMCSFWRSIWSVPVSHAEGEWTRVVERACDPVPEMGAITISPQDVACAVRPLPNWKSPGPDGLHNFWIKWFTRSHARLATLFQSALESGSLPEFLTTGITHLLHKSGSTAEPKNYRPITCLPTVYKVLTSILRAKITKHIDENSVMSASQNGCRNGSRGTKELLLIDMAISQQVRRSRKDLSTCWIDYKKAYDSVPHTWLRRVLELYKVDATLRTFLMSCMGQWRTVLRYPGCRQIQRNSEPIRIERGIFQGDSLSPLWFCLALNPLSTLLEDSGLGYQLRKDGRVISHLLYMDDLKLFAPNDLQLMELLKVTETFSSAIRMEFGVDKCAVMHVKRGGIVESVGTQLSDSINLRSLSATETYKYLGMSEALGISVADMKQLLKERFFGRLKKVFNSLLSGGNKVRAFNGWVMPVLMYSFGILKWTQTELDALDTKVRKLLTAYRMHHPRSSVMRLYIPRKCGGRGFLNAKTLHNREICSLREYFLAADVGMHRDVVAMDKGLTPLSLAKENWRIPVVFTTDDRRKEWQSKELHGRFYRALHGPDVDFQASVSWLRSWDLFGETEGFVCAIMDEVMMTNNYRRFIVKDGTVDICRACHRPGESIRHIISGCSRLANGEYLHRHNLVARIIHQQLALKYNLVESEVPYYRYVPDPVLNSGSITLYWDQSIITDRTVIANRPDIVVMDRSERRAMIVDITVPHDENLVKAEKDKQIKYIDLAREVVDMWEVDSAIIVPIVVSAHGLIAKSLDQYLRRLSLGSWIKGLIQKAVLLDTARIVRRFLSLEP

SEQ ID NO: 10511 - protein, 1199 aa, Xestia c-nigrum
MLTRAAARRARLSPPDPSLSSASPPPEPSPIVSAVTPAVAVASSSSDEYFSPPTTPPPARRRGGRRPPDGLGPRGPPASDRVPAPGGSVQRMRWTQSNNENVMRAYYGATEGGINLTAYRVRMLSLFQVLEPAVNVSAQRLSDQVRVIQRNRMLDDTVLDRLRTEVQSSRVTATRPSQAVVPPQSTVTTPFCDGDVSSDMVTNVSTQCSEDMRSALEGAIREYRFMTPELRPRLPRLPMHNKNKMLMAVLDSQLSNYFDSCEDLTDIHSILYCAAVAACRVAHVKFSDDRATRPKPAVPAWQYRIEQRIGGARKLIGKLICFREGNTRPRVMRFVRRAFSGTDISPRDYMFRVTERIDFLKQKVYAWASRIRRYKRRVDRYTQNRTFQRDERWVYRAWERPDQGVADTRLPDDDAMCSFWRSIWSVPVSHAEGEWTRVVERACDPVPEMGAITISPQDVACAVRPLPNWKSPGPDGLHNFWMKWFTRSHARLATLFQSALESGSLPEFLTTGITHLLHKSGSTAEPKNYRPITCLPTVYKVLTSILRAKITKYIDENSVMSASQNGCRNGSRGTKELLLIDMAISQQVRRSRKDLSTCWIDYKKAYDSVPHTWLRRVLELYKVDATLRTFLMSCMGQWRTVLGYPGCRQIQRNSEPIRIERGIFQGDSLSPLWFCLALNPLSTLLEDSGLGYRLRKDGRVISHLFYMDDLKLFAPNDLQLMELLKVTETFSSAIRMEFGVDKCAVMHVKRGGIVESVGTQLSDSINLRSLSATETYKYLGMSEALGISVADMKQSLKERFFGRLKKVFNSLLSGGNKVRAFNGWVMPVLMYSFGILKWTQTELDALDTKVRKLLTAYRMHHPRSSVMRLYIPRKCGGRGFLNAKTLHNREICSLREYFLAADVGMHRDVVAMDKGLTPLSLAKENWRIPVVFTTDDRRKEWQSKELHGRFYRALHGPDVDFQASVSWLRSGDLFGETEGFVCAIMDEVMMTNNYRRFIVKDGTVDICRACRRPGESIRHIISGCSRLANGEYLHRHNLVARIIHQQLALKYNLVESEVPYYRYVPDPVVVNGSITLYWDQSIITDRTVIANRPDIVVMDRSERRAMIVDITVPHDENLVKAEKDKQIKYLDLAREVVDMWEVDSAIIVPIVVSAHGLIAKSLDQHLRRLSLGSWIKGLIQKAVLLDTARIVRRFFSLEP

SEQ ID NO: 10512 - protein, 1199 aa, Xestia c-nigrum
MLTRAAARRARLPPPDPSLSSASPPPEPSPIVSAVTPAVAVASSSSDEYFSPPTTPPPARRRGGRRPPDGLGPRGPPASDRVPAPGGSVQRMRWTQSNNENVMRAYYGATEGGNNLTAYRVRMLSLFQVLEPAVNVSAQRLSDQVRVIQRNRMLDDTVLYRLRTEVQSSRVTATPPSQAVVPPQSTVTTPYCDGDVSSDMVTNVSTQCSEDMRSALEGAIREYRFMTPELRPRLPRLPMHNKNKMLMAVLDSQLSNYFDSCEDLTDIHSILYCAAVAACRVAHVKFSDDRATRPKPAVPAWQYRIEQRIGGARALIGKLICFREGNTRPRVMRFVRRAFSGTDISPRDYMFRVTERIDFLKQKVYAWASRIRRYKRRVDRYTQNRTFQRDERWVYRAWERPDQGVADTRLPDDDAMCSFWRSIWSVPVSHAEGEWTRVVERACDPVPEMGAITISPQDVACAVRPLPNWKSPGPDGLHNFWIKWFTRSHARLATLFQSALESGSLPEFLTTGITHLLHKSGSTAEPKNYRPITCLPTVYKVLTSILRAKITKHIDENSVMSASQNGCRNGSRGTKELLLIDMAISQQVRRSRKDLSTCWIDYKKAYDSVPHTWLRRVLELYKVDATLRTFLMSCMGQWRTVLRYPGCRQIQRNSEPIRIERGIFQGDSLSPLWFCLALNPLSTLLEDSGLGYRLRKDGRVISHLLYMDDLKLFAPNDFQLMELLKVTETFSSAIRMEFGVDKCAVMHVKRGGIVESVGTQLSDSINLRSLSATETYKYLGMSEALGISVADMKQSLKERFFGRLKKVFNSLLSGGNKVRAFNGWVMPVLMYSFGILKWTQTELDALDTKVRKLLTAYRMHHPRSSVMRLYIPRKCGGRGFLNAKTLHNREICSLREYFLAADVGMHRDVVAMDKGLTPLSLAKENWRIPVVFTTDDRRKEWQSKELHGRFYRALHGPDVDFQASVSWLRSGDLFGETEGFVCAIMDEVMMTNNYRRFIVKDGTVDICRACHRPGESIRHIISGCSRLANGEYLHRHNLVARIIHQQLALKYNLVESEVPYYRYVPDPVLVNGSITLYWDQSIITDRTVIANRPDIVVMDRSERRAMIVDITVPHDENLVKAEKDKQIKYLDLAREVVDMWEVDSAIIVPIVVSAHGLIAKSLDQHLRRLSLGSWIKGLIQKAVLLDTARIVRRFLSLEP

SEQ ID NO: 10513 - protein, 972 aa, Griposia aprilina
MQSSHVIAPPSQTVVVLPQPNTSQADEESDDRATNVSTQCNDELRSTLEDAIREYRFISPELRPRLPRLPMHNKNRALVAALETQLSNYFDDCVDLTDTHSILYCAAVAACRVAHVKFANDSRATRPKPAVPAWQSSIERLIGGARALIGKLICFREGNTRPRVMRFVRRAFAGTDISPQDYMSCVTERIDFLKQKVYAWANRIRRYKRRVERYTQNRTFQRDERSVYRGWERPDQGVADTCLPDDDAMCSFWRNIWSVPVSHTEGDWTREVERACDPIPEMGAITICPQDVTRAVRPLPNWKSPGPDGLHNFWIKWFGRSHARLAAQYQVALESGSLPQFLTTGVTHLLHKSGSTAEPKNYRPITCLPTVYKVLTSILRDKINKHIDTNYIMSPSQNGCRNGSRGTKELLLIDMAIRQQVRRSRKDLSTCWIDYKKAYDSVPHAWLMRVLELYKVDATRRTFLRSCMGQRRTVLHYPGCRNVQRNNEPIRIERGIFQGDSLSPLWFCLALNPLSTLLEVSGLGYRLRRGGQVISHLLYMDDLKLFAPNNSQLMDLLKVTETFSSAIRMEFGVDKCAVMHVKRGEIVESVGTQLSDSINLRALSASETYKYLGMSEALGINGTDMKQSLKERFFGRLKKVFNSLLSGGNKVRAINGWVMPVLMYSFGILKWTQTELDALDRNVRTLLTANRMHHPRSSVMRLYIPRKCGGRGFLNAKTLHNREICSLREYFLEADVGMHRDVVTVDKGLTPLFLAKENWRKPVVLDTNDCMEVWQSKELHGRFFRALHGPDVDQLASGAWLRFGDLFGETEGFVCAIMDEVMMTNNYRRFIVKDGTVDICRACHRQGESIRHIISGCSRLANEEYLHRHNLVARIIHQQLALKYSLVESEVPYYRYVPDPVLENGHITLYWDRSIITDRTIVANKLDIVLVDRLEWRAMIVDITVPHDGNLVKAEKDKQIQYLDLAREVVDM

SEQ ID NO: 10514 - protein, 868 aa, Griposia aprilina
MRFVRRAFAGTDVSPQDYISCVTERIDFLKQKVYAWASRIRRYKRRVERYTQNRTFQCDERWVYRDWERPDQGVADTYLPDDDAMCSFWHNIWSVPVSHTEGEWTREVERACEPIPEMGAITICPQDVARAVRPLPNWKSPGPDGLHNFWIKWFGRSHARLAAQYQVALESGSLPQFLTTGVTHLLHKSGSTAEPKNYRPITCLPTVYKVLTSILRAKINKHIDTNSIMSPSQNGCRNGSRGTKELLLIDMAISQQVRRSRKDLSTCWIDYKKAYDSVPHTWLVRVLELYKVDATLRTFLKSCMGQWRTVLHYPGCRNIQRNNEPIRIERGIFQGDSLSPLWFCLALNPLSTLLEDSGLGYRLRRGGQVISHLLYMDDLKLFAPNNLQLMELLKVTETFSSAIRMEFGVDKCAVMHVKRGEIVESVGTQLSDSINLRALSAFETYKYLGMSEALGINGTDMKQLLKERFFGRLKKIFNSLLSDGNKVRAFNGWVMPVLMYSFGILKWTQTELDALDRKVRTLLTANRMHHPRSSVMRLCIPRKCGGRGFLNAKTLHNREICSLREYFLEADVGMHRDVITVDKGLTPLSLAKENWRKPVVLDTNDRMEVWQSKELHGRFFRALHGPDVDQLASVAWLRFGDLFGETEGFVCAIMDEVILTNNYRRHIMKDGTVDVCRACHRPGESIRHIISGCSRLANEEYLHRHNLVARIIHQQLALKYSLVESEVPYYRYVPDPVLENGHITLYWDRSIITDRTIVANKPDIVMVDRLERRAMIVDITVPHDGNLVKAEKDKQIKYLDLAREVVDMWDVDSAIIVPIVVTANGLIAKSLDQHLRRLSLGSWIKGLIQKAVLLDTARIVRRFLSLEP

SEQ ID NO: 10515 - protein, 1199 aa, Griposia aprilina
MMLTRSAKRRAHPPPPDSSLSSASPPPVSSPTVSAVTTPAAVVASSSSDEYFSPPTTPPPVRRRGGHRPPDGLGPRGPTASDRVPAPGGSVQRMRWTRSINENVMRSYYGATEGGNNLTAYRVRMLSLFQVLEPVVNVSAQRLSDQVRVIQRNHMLDDTVLDRLRNEMQSSHVIAPPSQTVVVLPQSNTSQADEESDDRATNVSTQCNDELRSALEDAIREYRFISPELRPRLPRLPMHNKNRVLVAALDAQLSNYFDDCVDLTDTHSILYCAAVAACRVAHIKFANDSRPTRPKPAVPAWQCRIERRIGGARALIGKLICFREGNTRPRVMRFVRRAFAGTNISPQDYMSCVTERIDFLKQKVYAWANRIRRYKRRVERYTQNRTFQRDERWVYRGWERPDQGVADTCLPDDDAMCSFWRNIWSVPVSHTEGDWGREVERACDPIPEMGAISICPQDVTRAVRPLPNWKSPGPDGLQNFWIKWFGRSHARLAAQYQVAIESGSLPQFLTTGVTHLLHKSGSTAEPKNYRPITCLPTVYKVLTSILRAKINKHIDTNSIMSPSQNGCRNGSRGTKELLLIDMAISQQVRHSRKDLSTCWIDYKKAYDSVPHTWLVRVLELYKVDATLRTFLKLCMGQWRTILHYPGCRNIQRDNEPIRIERGIFQGDSLSPLWFCLALNPLSTLLEDSGLGYRLRRGGQVISHLLNMDDLKLFAPNNLQLMELLKVTETFSSAIRMEFGVDKCAVMHVKRGEIVESVGTQLSYSINLRALSASDTYKYLGMSEALGINGTDMKQSFKERFFGRLKKVFNSLLSGGNKVRAFNGWVMPVLMYSFGILKWTQTELDALDRKVRTLLTANRMHHPRSSVMRLYIPRKCGGRGFLNAKTLHNREICSLREYFLEADVGMHTDVVKVDKGLTPLSLAKENWRKPVVLDTNDRMEVWQSKELHGRFFRALHEPDVDQLASVAWLRFGDLFGETEGFVCAIMDEVILTNNYRRHIMKDGTVDVCRACHRPGESIRHIISGCSRLANEEYLHRHNLVARIIHQQLALKYSLVESEVPYYRYVPDPVLENGHITLYWDRSIITDRTIVANKPDIVVVDRLERRAMIVDITVPHDGNLVKPEKDKQIKYLDLAREVVDMWDVDSAIIVPIVVTANGLIAKSLDQHLRRLSLGSWIKGLIQKAVLLDTARIVRRFLSLEP

SEQ ID NO: 10516 - protein, 1198 aa, Griposia aprilina
MLTRSAARRARPPPPDSSLSSASLPPVSSPTVSAVTTPAAVVASSSSDEYFSPPTTPPPVRRRGGHRPPDGLGPRGPPASDRVPAPGGSVQRMRWTRSINENVMRSYYGATEGGNNLTAYRVRMLSLFQVLEPAVNVSAQRLSDQVRVIQRNHMLDDTVLDRLRNEMQSSHVIAPPLQTVVVLPQSNTSQADEESDDRATNVSTQCNDELRSALEDAIREYRFISPELRPRLPRLPMHNKNRVLVAALDAQLSNYFDDCVDLTDTHSILYCAAVAACRVAHVKFANDSRATRPKPAVPAWQCRIERRIGEARALIGKLICFREGNTRPRVMRFVRRAFAGTNISPQDYMSCVTERIDFLKQKVYAWANRIRRYKRRVERYTQNRTFQRDERWVYRGWERPDQGVADTCLPDDDAMCSFWRNIWSVPVSHTEGDWTREVERACDPIPEMGAITICPQDVTRAVRPLPNWKSPGPDGLHNFWIKWFGRSHARLAAQYQVALESGSLPQFLTTGVTHLLHKSGSTAEPKNYRPIACLPTVYKVLTSILRDKINKHIDTNYIMSPSQNGCRNGSRGTKELLLIDMAISQQVRRSRKDLSTCWIDYKKAYDSVPHTWLMRVLELYKVEATLRTFLMSCMGQWRTVLHYPACRNTQRNSEPIRIERGIFQGDSLSPLWFCLALNPLSTLLEDSGLGYRLRRGGQVISHLLYMDDLKLFAPNNSQLMDLLKVTETFSSAIRMEFGVDKCAVMHVKRGEIVESVGTQLSDSINLRALSASETYKYLGMSEALGINGTDMKQSLKDRFFGRLKKVFNSLLSGGNKVRAFNGWVMPVLMYSFGILKWTQTELDALDRKVRTLLTANRMHHPRSSVMRLYIPRKCGGRGFLNAKTLHNREICSLREYFLEADVGMHRDVVTVDKGLTPLSLAKENWRKPVVLDTNDRMEVWQSKELHGRFFRALHGPDVDQLASVAWLRFGDLFGETEGFVCAIMDEVMMTNNYRRFIVKDGTVDICRACHRPGESIRHIISGCSRLANEEYLHRHNLVARIIHQQLALKYSLVESEVPYYRYVPDPVLENGHITLYWDRSIITDRTIVANKPDIVMVDRLERRAMIVDITVPHDGNLVKAEKDKQIKYLDLAREVVDMWDVDSAIIVPIVVTANGLIAKSLDQHLRRLSLGSWIKGLIQKAVLLDTARIVRRFLSLEP

SEQ ID NO: 10517 - protein, 962 aa, Griposia aprilina
MHNKNRVLVAALDAQLSNYFDDCVDLTDTHSILYCAAVEACRVAHVKFANDSRATRPKPVVPAWQRRIERRIGGARALIGKLICFREGNTRPRVMRFVRRAFAGTNISPQDYMSCVTERIDFLKQKVYAWANRIRRYKRRVERYTQNRTFQRDERWVYRGWERPDQGVADTCLPDDDAMCSFWRNIWSVPVSHTEGDWTREVERACDPIPEMGAITICPQDVTRAVRPLPNWKSPGPDGLHNFWIKWFGRSHARLAAQYQVALESGSLPQFLTTGVTHLLHKSGSTAKPKTYRPIACLPTVYKVLTSILRDKINKHIDTNYIMSPSQNGCRNGSRGTKELLLIDMAISQQVRRSRKDLSTCWIDYKKAYDSVPHTWLMRVLELYKVEATLRTFLMSCMGQWRTVLHYPACRNTQRNSEPIRIERGIFQGDSLSPLWFCLALNPLSTLLEDSGLGYRLRRGGQVISHLLYMDDLKLFAPNNSQLMDLLKVTETFSSAIRMEFGVDKCAVMHVKRGEIVESVGTQLSDSINLRVLSASETYKYLGMSEALGINGTDMKQSLTDRFFGRLKKVFNSLLSGGNKVRAFNGWVMPVLMYSFGILKWTQTELDALDRKVRTLLTANRMHHPRSSVMRLYIPRKCGGRGFLNAKTLHNREICSLREYFLEADVGMHRDVVTVDKGLTPLSLAKENWRKPVVLDTNDRMEVWQSKELHGRFFRALHGPHVDQLASVAWLRFGDLFGETEGFVCAIMDEVMMTNNYRRFIVKDGTVDICRACHRPGESIRHIISGCSRLANEEYLHRHNLVARIIHQQLALKYSLVESEVPYYRYVPDPVLENGHITLYWDRSIITDRTIVANKPDIVMVDRLERRAMIVDITVPHDGNLVKTEKDKQIKYLDLAREVVDMWDVDSAIIVPIVVTANGLIAKSLDQHLRRLSLGSWIKGLIQKAVLLDTARIVRRFLSLEP

SEQ ID NO: 10518 - protein, 1198 aa, Griposia aprilina
MLTRSAARRARPPPPDSSLSSASLPPVSSPTVSAVTTPAAVVASSSSDEYFSPPTTPPPVRRRGGHRPPDGLGPRGPSASDRVPAPGGSVQRMRWTRSINENVMRSYYGATEGGNNLTAYRVRMLSLFQVLEPAVNVSAQRLSDQVRVIQRNHMLDDTVLDRLRNEMQSSHVIAPPSQTVVVLPQSNTSQADEESDDRATNVSTQCNDELRSALEDAIREYRFISPELRPRLPRLPMHNKNRVLVAALDAQLSNYFDDCVDLTDTHSILYCAAVAACRVAHVKFANDSRATRPKPAVPAWQCRIERRIGGARALIGKLICFREGNTCPRVMRFVRRAFAGTNISPRDYMSCVTERIDFLKQKVYAWANRIRRYKRRVERYTQNRTFQRDERWVYRGWERPDQGVADTCLPDDDAMCSFWRNIWSVPVSHTEGDWTREVERACDPIPEMGAITICPQDVTRAVRPLPNWKSPGPDGLHNFWIKWFGRSHARLAAQYQVALESGSLPQFLTTGVTHLLHKSGSTAEPKNYRPIACLPTVYKVLTSILRDKINKHIDTNYIMSPSQNGCRNGSRGTKELLLIDMAISQQVRRSRKDLSTCWIDYKKAYDSVPHTWLMRVLELYKVEATLRTFLMSCMGQWRTVLHYPACRNTQRNSEPIRIERGIFQGDSLSPLWFCLALNPLSTLLEDSGLGYRLRRGGQVISHLLYMDDLKLFAPNNSQLMDLLKVTETFSSAIRMEFGVDKCAVMHVKRGEIVESVGTQLSDSINLRALSASETYKYLGMSEALGINGTDMKQSLKERFFGRLKKVFNSLLSGGNKVRAFNGWVMPVLMYSFGILKWTQTELDALDRKVRTLLTANRMHHPRSSVMRLYIPRKCGGRGFLNAKTLHNREICSLREYFLEADVGMHRDVVTVDKGLTPLSLAKENWRKPVVLDTNDRMEVWQSKELHGRFFRALHGPDVDQLASVAWLRFGDLFGETEGFVCAIMDEVMMTNNYRRFIVKDGTVDICRACHRPGESIRHIISGCSRLANEEYLHRHNLVARIIHQQLALKYSLVESEVPYYRYVPDPVLENGHITLYWDRSIITDRTIVANKPDIVMVDRLERRAMIVDITVPHDGNLVKAEKDKQIKYLDLAREVVDMWDVDSAIIVPIVVTANGLIAKSLDQHLRRLSLGSWIKGLIQKAVLLDTARIVRRFLSLEP

SEQ ID NO: 10519 - protein, 1198 aa, Griposia aprilina
MLTRSAKRRARPPPPDSSLSSASPPPVSSPIVSAVTTPAAVVASSSSDEYFSPPTTPPPARRRGGHRPPDGLGPRGPPASDRVPAPGGSVQRMRWTRSINENVMRSYYGATEGGNNLTAYRVRMLSLFQGLEPAVNVSAQRLSDQVRVIQRNHMLDDTVLDRLRNEMQSSHVIAPPSQTVIVLPQCNTTQADEESDDRATNVSTQCNEELRSALEDAIREYRFISPELRPRLPRLPMHNKNRALVAALDTQLSNYFDDCVDLTDTHSILYCAAVAACRVAHVKFANDSRATRPKPVVPAWQCRIERRIGGARALIGKLICFREGNTRPRVMRFVRRAFAGTDISPQDYMSCVTERIDFLKQKVYAWANRIRRYKRRVERYTQNRTFQRDERWVYRGWERPDQGVADTYLPDDDAMCSFWRNIWSMPVSHSEGDWTREVERACEPLPEMGAITICPQDVTRAVRPLPNWKSPGPDGLHNFWIKWFLRSHARLAAQFQVALESGLLPQFLTTGVTHLLHKSGSTAEPKNYRPITCLPTVYKVLTSILRAKINNHIDTNSIMSPSQNGCRNGSRGTKELLLIDMTISQQVRRSRKDLSTCWIDYKKAYDSVPHTWLMRVLELYKVDSTLRTFLKSCMGQWRTVLHYPGCRNVQRNSEPIRIERGIFQGDSLSPLWFCLALNPLSTLLENSGLGYRLRTGGQVISHLLYMDDLKLFAPNNLQLMELLKVTETFSSAIRMEFGVDKCAVMHVKRGEIVESVGTELSDSINLRALSASETYKYLGISEVLGINGTDMKQSLKERFFGRLKKVFNSLLSGGNKVRAFNGWVMPVLMYSFGILKWTQTELDALDKKVRSLLTANRMHHPRSSVMRLYIPRKCGGRGFLNAKTLHNREICSLREYFLEADVGMHRDVVTVDKGLTPLSLAKENWRKPVVLDTNDRMEVWQSKELHGRFFRALHGPDVDQLASVAWLRFGDLFGETEGFVCAIMDEVMMTKNYRRFIVKDGTVDICRACHRPGESIRHIISGCSRLANEEYLHRHNFVARIIHQQLALKYSLVESEVPYYRYVPDPVLENGHITLYWDRSIITDRTIVANKPDIVVVDRIERRAVIVDITIPHDGNLVKAEKDKQIKYLDLAREVVDMWDVDSAIIVPIVVTANGLIAKSLDQHLRRLSLGSWIKGLIQKAVLLDTARIVRRFLSLEP

SEQ ID NO: 10520 - protein, 954 aa, Omphaloscelis lunosa
MCTLDSLLSNCFDGSKDLADTHSILYCAAVAACRVAHVKFPNSDRAPRPKPAVPAWQCRIERRIGEARVLIGKLICFREGNTRPRVMRFVKRAFSGTDISFQDYLTRVTERIDFLKQKIYAWANRIRRYRRRVERYTQNRTFQSDERWVYRAWERLDQGVIDTHLPDDDAMCSFWRSIWSAPVSHTEGDWTREIERACEQIPEMEALTISPQDIARAVRPLPNWKSPGPDGLHNFWIKWFQRSHARLASQFQSALESGSLPQFLTTGITHLLHKSGSTAEPKNYRPITCLPTVYKVFTSILRTKINKHIDTNSIMSASQNGCRNGSRGTKELLLIDMAINQQVRRSRRDLSTCWIDYKKAYDSVPHTWLMRVLELYKVNATLRTFLMSCMGQWRTVLRYPGCRQILRNSEPIRIERGIFQGDSLSPLWFCLALNPLSTLLEDSGLGYRLRRGGQVISHLLYMDDLKPFAPNNLQLLELLKVTETFSSAIRMEFGVDKCAVMHVKRGEIVESVGTQLSDSIQLRSLSSIETYNYLGMSEALGVNAADMKQSLKERFFNRLNKVLNSLLSGGNKVRAFNGWVMPVLMYSFGILKWTQTELDALDRRVRTLLTANRMHHPRSSVMRLYIPRKCGGRGFLNAKTLHNREVCSLREYFLEANVEMHRDVVTVDKGLTPLSLANENWRKPIVLDTNDRREVWQSKELHGRFYRALHGPDVDLLASVSWLRFGDLFGETEGFVFAIMDEVMMTNNYRKYIVKDGTVDICRACHRPGESIRHIISGCSRLDNGDYLHRHNLVARIIHQQLALKYSLVESEVPYYRYVPDPVLENGNITLYWDRSIITDRTIVANKPDIVVIDRLERRTMIIDIAVPHDENLVKAEKDKQIKYLDLAREVVDMWDVDTAIIVPIVVTANGIIAKSLDQHLKRLSLGSWIKGLIQKAVLLDTARIVRRFLSQEP

SEQ ID NO: 10521 - protein, 1198 aa, Omphaloscelis lunosa
MLTRSAARRARLPPPDSPLSSASSPPVLSPTVNAVMTPAAAVASSSSDEYFSPPTTPPPARRRGRRRPPDGLGPRGPPASDRVPAPGGSVQRMRWTRSINENVMRSYYGATEGGNNLTAYRVRMLSLFQVLEPAVNVSAQRLSDQVRVIQRNHMLDDTVLDRLRSEMQSSHVIAPPVRSVIVPSQIITSQADERIDDRATNVSTQCNEELRSALEGAIHEYRFMSPELRPRLPRLPMHNKNRALVAALDSQLSNYFDDCEDLTDTHSILYCAAVVVCRVAHVKFSNDSRATRPKPAVPAWQCRIERRICGARTLIGKLICFREGNTRPRVMRFVRRAFLGTDISPQDYMTRVTERIDFLKQKVYAWANRIRRYKRRVERYTQNRTFQSDERWVYRAWERPNQGVTDTHLPDEDAMCSFWRSIWSVPVSHTEGDWTREVERACDSIPEMGAITICPQDVARAVRPLPNWKSPGPDGLHNFWIKWFVRSHARLAAQYQTALESGSLPQFLTTGVTHLLHKSGSTAEPKNYRPITCLPTVYKVLTSVLRAKINKHIDTNSIMSASQNGCRNGSRGTKELLLIDMAISQQVRRSRKDLSTCWIDYKKAYDSVPHTWLMRVLELYKVDITLRTFLMSCMGQWRTVLRYPGCRNIQRNSEPIRIERGIFQGDSLSPLWFCLALNPLSTLLEDSGLGYRLRRGGQVISHLLYMDDLKLFAPNNLQLMELLKVTETFSSAIRMEFGVDKCAVMHVKRGKIMESVGTQLSDSINLRALSASETYKYLGMSEALGINVTDMKQSLKERFFGRLKKVLNSLLSGGNKVRAFNGWVMPVLMYSFGILKWSQTELDALDRRVRTLLTAYRMHHPRSSVMRLYIPRKCGGRGFLNAKTLHNREICSLREYFLEADVGMHRDVVVVDKGLTPLSLAKENWRKPVVLDTKNRMEIWQSKELHGRYFRALHGPDVDLPASVAWLRCGDLFGETEGFVCAIMDEVMMTNNYRRFIVKDGTVDICRACHRPGESIRHIISGCSRLAYEEYLHRHNLVARIIHQQLALKYSLVESEVPYYRYVPDPVLENGNITLYWDRSIITDRTIVANKPDIVVVDRGERSAMIIDITVPHDENLVKAEKDKQIKYLDLAREVVDMWDVDSAIIVPIVVTANGLIAKSLDQHLRRLSLGSWIKGLVQRAVLLDTARIVRRFLSLEP

SEQ ID NO: 10522 - protein, 1198 aa, Omphaloscelis lunosa
MLTRSAARRARLPSPDSPLSSASSPPVLSPTVNAVMTPAAAVASSSSDEYFSPPTTPPPARRRGGRRPPDGLGPRGPPASDRVPASGGSVQRMRWTRSINENVMRSYYGATEGGINLTAYRVRMLSLFQVLEPAVNVSAQRLSDQVRVIQRNHMLDDTVLDRLRSEMQSSHVIAPPVRSVIIPSQIITSQADERIDDRATNVSTQCNEELRSALEGAIQEYRFMSPELRPRLPRLPMHNKNKALVAVLDSQLSNYFDDCEDLTDTHSILYCAAVAACRVAHVKFANDSRATRPKPAAPAWQCRIERRIGGARTLIGKLICFREGNTRPRVMRFVRRAFLGTDISPQDYLTCVTERIDFLKQKVYAWANRIRRYKRRVERYTQNRTFQSDERWVYRAWERPDQGVADTHRPDDDAMCSFWRSIWSVPVNHTEGDWTREVERACDPIPEMGAITICPQDVARAVRPLPNWKSPGPDGLHNFWIKWFLRSHARLAAQYQTALESGSLPQFLTTGVTHLLHKSGSTAEPKNYRPITCLPTVYKVLTSILRAKINKHIDTNSIMSASQNGCRNGSRGTKELLLIDMAINQQVRRSRKDLSTCWIDYKKAYDSVPHTWLMRVLELYKVHTTLRTFLMSCMGQWRTVLRYPGCRNIQRNSEPIRIERGIFQGDSLSPLWFCLALNPLSTLLEASGLGYRLRRGGQVISHLLSMDDLKLFAPNNLQLMELLKVTETFSNAIRMEFGVDKCAVMHVKRGEIVESVGTQLSDSINLRALSASETYKYLGMSEALGINVTDMKQSLKERFFGRLKKVLNSLLSGGHKVRAFNGWVMPVLIYSFGILKWTQTELDALDRRVRTLLTAYRMHHPRSSVMRLYIPRKCGGRGFLNAKTLHNREICSLREYFLGVDVGMHRDVVVVDKGLTPLSLAKENWRKPVVLDTKDRMEIWQSKELHGRYFRALHGPDVDLPASVTWLRFGDLFGETEGFVCAIMDEVMMTNNYRRFIVKDGTVDICRACHRPGESIRHIISGCSRLANEEYLHRHNLVARIIHQQLALKYSLVESEVPYYRYVPDPVLENGNITLYWDRSIITDRTIVANKPDIVVVDRGERRTMIIDITVPHDENLVKAEKDKQIKYLDLAREVVDMWDVDSAIIVPIVVTANGLIAKSLDQHLRRLSLGSWIKGLIQRAVLLDTARIVRRFLSLEP

SEQ ID NO: 10523 - protein, 1204 aa, Omphaloscelis lunosa
MLTRSATRRAHPPPPDSSLSSASPPSIPNPTVNVVTTPTAAVASSSSDEYFSPPTSPTPVRRQGRGRPPAGLGPRGQQAPNRAPAAGGYVSRIRWTQSMNENVMRAYYGATEGGINLTVYRSRMLSLFQVLEPTINVSAQRLSDQVRVIQHNHRLDNATLDRLRLEMQNSFASNPPPSQNVMQAPAAVPLQANQHEEEEDGRAISADNLCNVELRSALEDAIREYRFTSPDLRPRLPRLPMNKRNRALVCALDALLPNFIGSSTNLCDTHSILYCTAVAACRIARVKFPNTDRSVRPKPVAPAWQCRIECRINEARVLIGKLICFREGNTRPRVMRFVRRAFSGTSISPREYVSHVTERIDFLKQKVYAWANRIRRYRRRVDRYTQNRMFQNDERWVYRTWERPTPNQGVTDTRLPNSDAMKAFWQSIWSVPVSHTEGDWMRVVEQACDPIPHMEAISITPLDVARAVRPLPNWKSPGPDGLHNFWLKWLQRSHTCLATQFQSSLDTGSLPLFFTTGVTHLLHKSGSTAEPKNYRPITCLPTIYKVLTSILRAKISHHINNNLIMSVSQNGCKNGSRGTKELLLIDMTISQQVRKSRKDLSTCWIDYKKAYDSVPHTWLMRVLELYKIDATLRTFLMSCMRQWRTVLLYPGCRQIRGIDEPIRIERGIFQGDSLSPLWFCLALNPLSTMLEDSGLGYRLRRGGQVISHLLYMDDLKLFAPNNLRLMELLKITETFSSAIRMEFGVDKCAVMHVKRGEIMESVGTQLADSIHLRSLSSTETYKYLGMSEALGINVTDMKQSLKERFFGRLNKVLNSLLSGGNKVRAFNGWVMPVLMYSFGILKWTQTELDALDRKVRTLLTANRMHHPRSSVMRLYIPRKCGGRGFLNAKTLHNREIYSLREYFLQTNAGMHRDVVAVDKGLTPLSLAKENWRKPTVLDTNDRKEIWQGKELHGRFFRALHGPDVDFLTSVSWLRFGDLFGETEGFVCAIMDEVIMTNNYRKYIVKDGTVDICRACHQPGESIRHIVSGCSRLANGEYLHRHNLVARIIHQQLALQYNLIESEVPYYRYVPDPVLENGHTTLYWDRSIITDRTIVANKPDIVVIDRRERRAMIVDIAVPHDENLVKAEKDKKIKYLDLAHEVVDMWDVDSAIIVPIIVTVNGLIAKSLDQHLRRLSLRGWIKGLIQKAVLLDTARIVRRFLSLEP

SEQ ID NO: 10524 - protein, 1038 aa, Omphaloscelis lunosa
MQNSFASNPPPSQNVVQAPAAVPLQESQHEEEEDGRAISADNLCNVELRSALEDAIHEYRFTSPDLRPRLPRLPMNKRNRALVCALDALLPNFIESSANLCDTHSILYCTAVAACRIARVKFPNTDRSVRPKPVAPAWQCRIECRINEARVLIGKLICFREGNTRPRVMRFVRRAFSGTSISPQEYVSHVTERIDFLKQKVYAWANRIRRYRRRVDRYTQNRMFQNDERWVYRTWERPTPNQGVTDTRLPDSDAMKAFWQSIWSVPVRHTEGDWMRVIEQACDPIPHMEAISITPLDVARAVRPLPNWKSPGPDGLHNFWIKWLQRSHARLASQFQSALESGSLPQFLTTGITHLLHKSGSTAEPKNYRPITCLPTVYKVFTSILRAKINKHIDTNSIMSASQNGCRNGSRGTKELLLIDMAISQQVRRSRRDLSTCWIDYKKAYDLVPHTWLMRVLELYKVDQTLRTFLMSCMRQWRTVLRYPGCRHILRNSEPIRIERGIFQGDSLSPLWFCLALNPLSTLLENSGLGYRLRRGGQVISHLLYMDDLKLFAPNNLQLLELLKVTETFSSAIRMEFGVDKCAVMHVKRGEIVESVETHLSDSIHLRSLSSNETYKYLGMSEALGINAADMKQSLRERFFSRLNKVLNSLLSGGNKVRAFNGWVMPVLMYSFGILKWTQTELDALDRRVRTLLTANRMHHPRSSVMRLYIPRKCGGRGFLNAKTLHNHEVCSLREYFLGADMGMHRDVVSVDKGLTPLSLANENWRKPIVLDTNDRREVWQSKELHGRYYRALHGPDVDLLASVSWLRFGDLFGETKGFVFAIMDEVIMTNNYRKYIVKDGTDDICRACHRPGESIRHIISGCSRLANGDYLHRHNLVARIIHQQLALKYNLVESEVPYYRYVPDPVLENGNITLYWDRSIITDRTIVANKPDIVVIDRLDRRTMIIDIAVPHDENLVKAEKDKQIKYLDLAREVVDMWDVDTAIIVPIVVTANGIIAKSLDQHLRRLSLGSWIKGLIQKAVLLDTARIVRRFLSQEP

SEQ ID NO: 10525 - protein, 1198 aa, Omphaloscelis lunosa
MLTRSAARRARLPPPDSPLSSASSPPVLSPTVNAVMTPAAAVASSSSDEYFSPPTTPPPARRRGRRRPPDGLGPRGPPASDRVPAPGGSVQRMRWTRSINENVMRSYYGATEGGNNLTAYRVRMLSLFQVLEPAVNVSAQRLSDQVRVIQRNHMLDDTVLDRLRSEMQSSHVIAPPVRSVIVPSQIITSQADERIDDRATNVSTQCNEELRSALEGATHEYRFMSPELRPRLPRLPMHNKNRALVAALDSQLSNYFDDCEDLTDTHSILYCAAVAVCRVAHVKFSNDSRATLPKPAVPAWQCRIERRIDGARTLIGKLICFREGNTRPRVMRFVRRAFLGTDISPQDYMTRVTERIDFLKQKVYAWANRIRRYKRRVERYTQNRTFQSDERWVYRAWERPNQGVTDTHLPDEDAMCSFWRSIWSVPVSHTEGDWTREVERACDSIPEMGAITICPQDVARAVRPLPNWKSPGPDGLHNFWIKWFVRSHARLAAQYQTALESGSLPQFLTTGVTHLLHKSGSTAEPKNYRPITCLPTVYKVLTSVLRAKINKHIDTNSIMSASQNGCRNGSRGTKELLLIDMAISQQVRRSRKDLSTCWIDYKKAYDSVPHTWLMRVLELYKVDITLRTFLMSCMGQWRTVLRYPGCRNIQRNSEPIRIERGIFQGDSLSPLWFCLGLNPLSTLLEDSGLGYRLRRGGQVISHLLYMDDLKLFAPNNLQLMELLKVTETFSSAIRMEFGVDKCAVMHVKRGKIMESVGTQLSDSINLRALSASETYKYLGMSEALGINVTDMKQSLKERFFGRLKKVLNSLLSGGNKVRAFNGWVMPVLMYSFGILKWSQTELDALDRRVRTLLTAYRMHHPRSSVMRLYIPRKCGGRGFLNAKTLHNREICSLREYFLEADVGMHRDVVVVDKGLTPLSLAKENWRKPVVLDTKNRMEIWQSKELHGRYFRALHGPDVDLPASVAWLRCGDLFGETEGFVCAIMDEVMMTNNYRRFIVKDGTVDICRACHRPGESIRHIISGCSRLANEEYLHRHNLVARIIHQQLALKYSLVELEVPYYRYVPDPVLENGNITLYWDRSIITDRTIVANKPDIVVVDRGERSAMIIDITVPHDENLVKAEKDKQIKYLDLAREVVDMWDVDSAIIVPIVVTANGLIAKSLDQHLRRLSLGSWIKGLVQKAVLLDTARIVRRFLSLEP

SEQ ID NO: 10526 - protein, 1198 aa, Omphaloscelis lunosa
MLTRSAARRARLPPPDSPLSSASSPPVLSPTVNAVMTPAAAVASSSSDEYFSPPTTPPPARRRGGRRPPDSLGTRGPPASDRVPAPGGSVQRMRWTRSINENVMRSYYGATEGGINLTAYRVRMLSLFQVLEPAVNVSAQRLSDQVRVIQRNHMLDDTVLDRLRSEMQSSHVIAPPVRSVIIPTQIITSQADERIDDRATNVSTQCNEELRSALEGAIQEYRFMSPELRPRLPRLPMHNKNKALVAVLDSQLSNYFDDCEDLTDTHSILYCAAVAACRVAHVKFANDSRATRPKPAAPAWQCRIERRIGGARTLIGKLICFREGNTRPRVMRFVRRAFLGTDISPQDYLTRVTERIDFLKQKVYAWANRIRRYKRRVERYTQNRTFQSDERWVYRAWERPDQGVADTHRPDDDAMCSFWRSIWSVPVNHTEGDWTREVERACDPIPEMGAITICPQDVARAVRPLPNWKSPGPDGLHNFWIKWFLRSHARLAAQYQTALESGSLPQFLTTGVTHLLHKSGSTAEPKNYRPITCLPTVYKVLTSILRAKINKHIDTNSIMSASQNGCRNGSRGTKELLLIDMAINQQVRRSRKDLSTCWIDYKKAYDSVQHTWLMRVLELYKVDTTLRTFLMSCMGQWRTVLRYPGCRNIQRNSEPIRIERGIFQGDSLSPLRFCLALNPLSTLLEASGLGYRLRRGGQVISHLLYMDDLKLFAPNNLQLMELLKVTETFSNAIRKEFGVDKCAVMHVKRGEIVESVGTQLSDSINLRALSASETYKYLGMSEALGINVTDMKQSLKERFFGRLKKVLNSLLSGGHKVRVFNGWVMPVLIYSFGILKWTQTELDALDRRVRTLLTAYRMHHPRSSVMRLYIPRKCGGRGFLNAKTLHNREICSLREYFLGVDVGMHRDVVVVDKGLTPLSLAKENWRKPVVLDTNDRMEIWQSKELHGRYFRALHGPDVDLPASVTWLRFGDLFGETEGFVCAIMDEVMMTNNYRRFIVKDGTVDICRACHRPGESIRHIISGCSRLANEEYLHRHNLVARIIHQQLALKYSLVESEVPYYRYVPDPVLENGNITLYWDRSIITDRTIVANKPDIVVVDRGERRTMIIDITVPHDENLVKAEKDKQIKYLDLAREVVDMWDVDSAIIVPIVVTANGLIAKSLDQHLRRLSLGSWIKGLIQRAVLLDTARIVRRFLSLEP

SEQ ID NO: 10527 - protein, 1197 aa, Sesamia nonagrioides
MLTRSAARRARPPSPDSLLGSASPPPVSSATASAVTTPAAAVASSSSDEYFSPPTTPPPARRRGGRRPPDRLGPRGPSASDRVPAPGGSVQRMRWTQSINENVMRSYYGATEGGNNLTAYRVRMLSLFQVLEPAVNVSAQRLSDQVRVIQRNHMLDDTVLDRLRNEMQISRIIAHQSQTAEIPPQPTNYADEGSNDRATNVSTQCNEELINALEAAIREYRSTSAELRPRLPRLPMHNRNRALMAALDAQLSNYFDTCEDLTDTHSILYCAAVAACRVAHVKFPSDSRATRPRPVVPAWQHRIERRIGGARALIGKLICFREGNTRPRVMRFVRRAFAGTNISPQNYMARVTERIDFLKQKVYAWANRIRRYKRRVERYTQNRTFQSNERWVYRAWERSDQGVTDTCLPDDDATCSFWRNIWSVPVSHTEGSWTRVVERACDPVPEMGAITICPQDVARAVRPLPNWKSPGPDGLHNFWIKWFSRSHARLASQFQTALESGSLPQFLTTGVTHLLHKSGSTAEPKNYRPITCLPTVYKVLTSILKSKINTHIDSNSIMSASQNGCRSGSRGTKELLLIDMAISQQVRRSRKDLSTCWIDYKKAYDSVPHTWLMRVLELYKVDATLRTFLMTCMRTWRTVLRYPGCRNIQRNSEPIRIERGIFQGDSLSPLWFCLALNPLSTLLEDSGLGYRLRRGGQVISHLLYMDDLKLFAHTDSQLKELLKITETFSSSIRMEFGVDKCAVMHVKRGEIMESVGTQLTSSINLRALSASETYKYLGMSEALGINVTDMKQSLKERFFGRLKKVLNSLLSGGNKVRAFNGWVMPVLMYSFGILKWTQTELDALDQRVRTLLTANRLHHPRSSVMRLYIPRKCGGRGFLNAKTLHNREVCSLREYFLETDVGMHRDVVAADKGLTPLSLAKENWRKPVVLDTNDRLEVWKSKELHGRFFRALHGPDVDFQASVAWLRFGDLFGETEGFVFAIMDEVMMTNNYRRFIVKDGTVDICRACHRPGESIRHIISGCSRLANGEYLHRHNLVARIIHQQLALKYNLVESEVPYYRYMPDPVLENGHITLYWDRSIITDRTIVANKPDIVLVDRSERRAMIVDITIPHDENLVKAEKDKQIKYLDLAHEVVDMWEVDSAIIVPIVVTANGLIAKSLDQHLRRLSLGSWIKGLIQKAVLLDTARIVRKFLSLEP

SEQ ID NO: 10528 - protein, 1200 aa, Sesamia nonagrioides
MLTRSAARRARPPSPDSSLSSASPPPVSSPTVNAVMTPAAVVASGSSDEYFSPPTTPPPARRRGGRRPPDRLGPRGPSASDRVPAPGGSVQRMRWTQSINENVMRSYYGATEGGNNLTAYRVRMLSLFQVLEPAVNVSAQRLSDQVRVIQRNHMLDDVVLDRLRLESRNSHVTPATSLVAVQLNSVSPRPNHVDEEDDDRAISVSPQCNEKLRSALEDAFREYRSIPPELRPRLPRLPMHKKNKALVCALDSQLSNYLKDSKDLNDTHSILYCGAVAICRVAHVKFPDNDRATRPKSAVPAWQCRIERRIGETRALIGKLVSFREGNTRPRVMRFVRRAFSGTDTSTRDYLFRVTERIDFFKQKIYAWANRIRRYKRRVERYSQNRNFQSDERRVYRAWERSDQGVTDTCLPDDDATCSFWRNIWSGPVSHTEGSWTRVVERACDPVPEMGAITICPQDVARAVRPLPNWKSPGPDGLHNFWIKWFSGSHARLASQFQTALESGSLPQFLTTGVTHLLHKSGSTAEPRNYRPITCLPTVYKVLTSILKSKINTHIDSNSIMSASQNGCRSGSRGTKELLLIDMAISQQVRRSRKDLSTCWIDYKKAYDSVPHTWLMQVLELYKVDATLRTFLMTCMRTWRTVLRYPGCRNIQRNSEPIRIERGIFQGDSLSPLWFCLALNPLSTLLEDSGLGYRLRRGGQVISHLLYMDDLKLFAHTDSQLKELLKITETFSSSIRMEFGVDKCAVMHVKRGEIMESVGTQLTSSINLRALSASETYKYLGMSEALGINVTDMKQSLKERFFGRLKKVLNSLLSGGNKVRAFNGWVMPVLMYSFGILKWTQTELDALDRRVRTLLTANRLHHPRSSVMRLYIPRKCEGRGFLNAKTLHNREICSLREYFLTTDVGMHRDVVAVDKGLTSLSLAKENWRKPVVLDTNDRMEVWKSKELHGRFFKALHGPDVDLQASVAWLRFGDLFGETEGFVCAITDEVMMTNNYRRFIVKDGTVDICRACHRPGESIRHIISGCSRLANGEYLHRHNLVARIIHQQLALKYNLVESEVPYYRYTPDPVLENDHITLYWDRSIITDRTIIANKPDIVLVDRSERRAMIVDITIPHDENLVKAEKDKQIKYLDLAHEVIDMWEVDSAIIVPIVVTANGLIAKSLDQHLRRLSLGSWIKGLIQKAVLLDTARIVRKFLSLEP

SEQ ID NO: 10529 - protein, 1201 aa, Sesamia nonagrioides
MLTRSAARKRARPPSPDSLLSSASPPPVSSPTVSVVTTPAAAVASSSSDEYFSPPTTPPPVRRRGGRRPPDRLGPRGPSASDRVLAPGGSVQRMRWTQSINENVMRSYYGATEGGNNLTAYRVRMLSLFQVLEPAVNVSAQRLSDQVRVIQRNHMLDDVVLDRLRLESRNSHVTPASSLVAVQLNSVSPRPNRVDEEDDDRAISVSPQCIEKLRSALKDAFCEYRSTPPELRPRLPRLPMHKKNKALVCALDSQLSYYLKDSKDLTDTHSILYCGAVAICRVAHVKFPDSDRATRPKSAVPAWQCRIERRIGETRALIGKLTSFREGNTRPRVMRFVRRAFSGTDTSTRDYLFRVTERIDFFKQKIYAWANRIRRYKRRVERYSQNRNFQSDERRVYRAWERSDQGVTDTCLPDDDAMCSFWRNIWSVPVSHTEGSWTRVVERACDPVPEMGAITICPQDVARAVRPLPNWKSPGPDGLHNFWIKWFSGSHARLASQFQTALESGSLPQFLTTGVTHLLHKSGSTAEPKNYRPITCLPTVYKVLTSILKSKINTHIDSNSIMSASQNGCRSGSRGTKELLLIDMAISQQVRRSRKDLSTCWIDYKKAYDSVPHTWLMRVLELYKVDATLRTFLMTCMRTWRTVLRYPGCRNIQRNSEPIRIERGIFQGDSLSPLWFCLALNPLSTLLEDSGLGYRLRRGGQVISHLLYMDDLKLFAHTDSQLKELLKITETFSSSIRMEFGVDKCAVMHVKRGEIMESVGTQLTSSINLRALSASETYKYLGMSEALGINVTDMKQSLKERFFGRLKKVLNSLLSGGNKVRAFNGWVMPVLMYSFGILKWTQTELDALDQRVRTLLTANRLHHPRSSVMRLYIPRKCGGRGFLNAKTLHNREVCSLREYFLETDVGMHRDVVAADKGLTPLSLAKENWRKPVVLDTNDRLEVWKSKELHGRFFRALHGHDVDFRASVAWLRFGDLFGETEGFVFAIMDEVMMTNNYRRFIVKDGTVDICRACHRPGESIRHIISGCSRLANGEYLHRHNLVARIIHQQLALKYNLVESEVPYYRYMPDPVLENGHITLYWDRSIITDRTIIANKPDIVLVDRSERRAIIVDITIPHDENLVKAEKDKQIKYLDLAHEVVDMWEVDSAIIVPIVVTANGLIARSLDQHLRRLSLGSWIKGLIQKAVLLDTARIVRKFLSLEP

SEQ ID NO: 10530 - protein, 1189 aa, Sesamia nonagrioides
MLTRSAARCARPPPPDSSLSSASPPPVSSPTVNAVMTPAAVVASSSSDEYFSPPTTPPPARRRGGRRPPDRLGPRGPSASDRVPAPGGSVQRMRWTQSINENVMRSYYGATEGGNNLTAYRVRMLSLFQVLEPAVNVSAQRLSDQVRVIQRNHMLDDVVLDRLRLESRNGHVTPVSSLVAVQLNSVSPRPNHVDEEDDDRAISVSPQCNEKLRSALEDAFPEYRSIPPELRPCLPRLPMHKKNKALVCALDSQLSNHLKDSKDLNDTHSILYCGAVAICRVAHVKFPDNDRATRPKSAVPAWQCRIERRIGETRALIGKLISFREGNTRPRVMRFVRRAFSGTDTSTRDYLFRVTERIDFFKQKIYAWANRIRRYRRRVERYSQNRNFQSDERRVYRAWERSDQGVTDTCLPDDDATCSFWRNIWSVPVSHTEGSWTRVVERACDPVPEMGAITICPQDVARAVRPLPNWKSPGPDGLHNFWIKWFSGSHARLASQFQTALESGSLPQFLTTGVTHLLHKSGSTAEPKNYRPITCLPTVYKVLTSILKSKINTHIDSNSIMSASQNGCRSGSRGTKELLLIDMAINQQVRRSRKDLSTCWIDYKKAYDSVPHTWLMRVLELYKVDATLSTFLMTCMRTWRTVLRYPGCRNIQRNSEPIRIERGIFQVDSLSPLWFCLALNPLSTLLEDSGLGYRLRRGGQVISHLLYMDDLKLFAHTDSQLKELLKITETFSSSIRMEFGVDKCAVMHVKRGEIMESVGTQLTSSINLRALSASETYKYLGMSEALGINVTDMKQSLKERFFGRLKKVLNSLLSGGNKVRAFNGWVMPVLMYSFGILKWTQTELDALDRRVRTLLTANRLHHPRSSVMRLYIPRKCGGRGFLNAKTLHNREICSLREYFLTTDVGMHRDVVAVDKGLTPLSLAKENWRKPVVLDTNDRMEVWKSKELHGRFFKALHGPDVDLQASVAWLRFGDLFGETEGFVCAITDEVMMTNNYRRFIVKDGTVDICRACHRPGESIRHIISGCSPLANGEYLHRHNLVARIIHQQLALKYNLLESEVPYYRYTPDPVLENDHITLYWDRSIITDRTNNANKPDIVLVDRSERRAMIVDITIPHDENLVKAEKDKQIKYLDLAHEVVDMWEVDSAIIVPIVVTRVVTELRLRLRYCGSSARNRIFASASASAQFYAEL

SEQ ID NO: 10531 - protein, 983 aa, Sesamia nonagrioides
MLSVSTALLRLNLDHVYLDCPCIKKNKALVCALDSQLSNYLKDSKDLADTHSILYCGAVAICRVAHVKFPDSDRATRPKPAVPAWQCRIERRIGETRALIGKLISFREGNTRPRVMRFVRRAFSGTDVSTRDYLLRVTERIDFLKQKIYAWANRIRRYRRRVERYSQNRNFQSDERWVYRAWERSDQGVTDTCLPDDDATRSFWRNIWSVPVSHTEGGWTRDVERACDPVPEMGAITICPQDVARAVRPLPNWKSPGPDGLHNFWIKWFSGSHACLASQFQTALESGSLPQFLTTGITHLLHKSGSTAEPKNYRPITCLPTVYKVLTSILKAKINTHIDSNSIMSASQNGCRNGSRGTKELLLIDMAISQQVRRSRKDLSTCWIDYKKAYDSVPHTWLMRVLELYKVDATLRTFLMTCMSQWRTVLRYPGCRNIQRNSEPIRIERGIFQGDSLSPLWFCLALNPLSTLLEDSGLGYRLRRGGQVISHLLYMDDLKLFAHTNSQLKELLKITETFSSAIRMEFGVDKCAVMHVQRGEIVESVGTQLTGSINLRSLSASETYKYLGMSEALGINVTDMKQSLKERFFGRLKKVLNSLLSGGNKVRAFNGWVMPVLMYSFGILKWTQTELDALDQRVRTLLTANRLHHPRSSVMRLYIPRKCGGRGFLNAKTLHNREVCSLREYFLKTDVGMHRDVVAVDKGLTPLSLAKENWRKPVVLETNDRMEVWQSKELHGRFFRALRGPDVDFQASVAWLRYGDLFGETEGFVCAIMDEVMMTNNYRKFIVKDGTVDICRACHRPGESIRHIISGCSRLANGEYLHRHNLVARIIHQQLALKYNLVESEVPYYRYMPDPVLENGHITLYWDRSIITDRTIVANKPDIVMVDRSERRAMIVDITIPHDENLVKAEKDKQIKYLDLAHEVVDMWEVDSAIIVPIVVTANGLIAKSLDQHLRRLSLGGWIKGLIQKAVLLDTARIVRKFLSLEP

SEQ ID NO: 10532 - protein, 1197 aa, Sesamia nonagrioides
MLTRSAARRARPPSPDSLLSSASPPPVSSPTVSAVTTPAATVASSSSDEYFSPPTTPPPVRRRGGRRPPDCLGPRGPSASDRVPAPGGSVQRMRWTQSINENVMRSYYGATEGGTNLTAYRVRMLSLFQVLEPAVNVSAQRLSDQVRVIQRNHMLDDTVLDRLRNEMQSSRVITHQSQSADIPPQPTNYADEGSNDRATNVSTQCNEELRNALEAAIREYRSISAELRPRLPRLPMHNRNRALMAALDAQLSNYFDTCEDLTDTHSILYCAAVAACRVAHVKFPSDSRATRPKPVVPAWQRRIERRIGGARALIGKLICFREGNTRPRVMRFVRRAFSGTNTSPQNYMARVTERIDFLKQKVYAWANRIRRYKRRVERYTQNRTFQSNERRVYRDWERSEQGVTDTCLPDDDAMCSFWRSIWSVPVSHTEGDWARDVERACDPIPEMGAITICPQDVACAVRPLPNWKSPGPDGLHNFWIKWFPRSHARLASQFQTALVSGSLPQFLTTGITHLLHKSGSTAEPKNYRPITCLPTVYKVLTSILKTKINKHIDSNSILSASQNGCRSGSRGTKELLLIDMAISQQVRRSRKDLSTCWIDYKKAYDSVPHTWLMRVLELYKVDATLRTFLMTCMRTWRTVLRYPGCRNIQRNSEPIRIERGIFQGDSLSPLWFCLALNPLSTLLEDSGLGYRLRRGGQVISHLLYMDDLKLFAPNNSQLNELLKITEIFSSSIRMEFGVDKCAVMHVKRGEIMEPVGTQLTSSINLRALSASETYKYLGMSEALGINVTDMKQSLKERFFGRLKKVLNSLLSGGNKVRAFNGWVMPVLMYSFGILKWTQTELDALDQRVRTLLTANRLHHPRSSVMRLYIPRKCGGRGFLNAKTLHNREICSLRDYFLETDVGMQRDVVAADKGLTPLSLANENWRKPVVLDTNDRMEVWKSKELHGRFFRALHGPDVDFQASVAWLRFGDLFGETEGFVFAIMDEVMMTNNYRRFIVKDGTVDICRACHRPGESIRHIISGCSRLANGEYLHRHNLVARIIHQQLALKYKLVESEVPYYRYMPDPVLENGHITLYWDRSIITDRTIIANKPDIVLVDRSERRAMIVDITIPHDENLVKAEKDKQTKYLDLAHEVVDMWEVDSAIIVPIVVTANGLIAKSLDQHLRRLSLGSWIKGLIQKAVLLDTARIVRKFLSLEP

SEQ ID NO: 10533 - protein, 1200 aa, Sesamia nonagrioides
MLTRSAARCARPPPPDSSLSSASPPPVSSPTVKAVMTPAAVVASSSSDEYFSPPTTPPPARRRGGRRPPDRLGPRGPSASDRVPAPGGSVQRMRWTQPINENVMRSYYGATEGGNNPTAYRVRMLSLFQMLEPAVNVSAQRLSDQVRVIQRNHMLDDVVLDRLRLESRNSHVTPASSLVAVQLNSVSPRPNHVDEEDDDRAISVSPQCNEKLRSALEDAFREYRSIPPELRPRLPRLPMNKKNKALVCALDSQLSNYLKDSKDLNDTHSILYCGAVAICRVAHVKFPDSDRATRPKSAVPAWQCRIERRIGETRALIGKLISFREGNTRPRVMRFVRRAFSGTDISTRDYLFRVTERIDFLKQKIYAWANRIRRYKRRVERYSQNRNFHSDERRVYRAWERSDQGVTDTCLPDDDATCSFWRNIWSVPVSHTEGVWTRDVERACDPIPEMGAITICPQDVARAVRPLPNWKSPGPDGLHNFWIKWFSRSHALLASQFQTALESGLLPQFLSTGVTHLLHKSGSTAEPKNYRPITCLPTVYKVLTSILKSKINTHIDSNSIMSASQNGCRSGSRGTKELLLIDMAISQQVRRSRKDLSTCWIDYKKAYDSVPHTWLMRVLELYKVDATLRTFLMTCMRTWRTVLRYPGCRNIQRNSEPIRIERGIFQGDSLSPLWFCLALNPLSTLLEDSGLGYRLRRGGQVISHLLYMDDLKLFAHTDSQLKELLKITETFSSSIRMDFGVDKCAVMHVKRGEIMESVGTQLTSSINLRALSASETYKYLGMSEALGINVTDMKQSLKERFFGRLKKVLNSLLSGGNKVRAFNGWVMPVLMYSFGILKWTQTELDALDRRVRTLLTANRLHHPRSSVMRLYIPRKCGGRGFLNAKTLHNREVCSLREYFLETDVGMHRDVVAADKGLTPLSLAKENWRKPVVLDTNDRLEVWKSKELHGRFFRALHGPDVDFQASVAWLRFGDLFGETEGFVFAIMDEVMMTNNYRRFIVKDGTVDICRACHRPGESIRHIVSGCSRLANGEYLHRHNLVARIIHQQLALKYNLVESEVPYYRYMPDPVLENGHITLYWDRSIITDRTIVANKPDIVLVDRSERRAMIVDITIPHDENLVKAEKDKQIKYLDLAHEVVDMWEVDSAIIVPIVVTANGLIAKSLDQHLRRLSLGSWIKGLIQKAVLLDTARIVRKFLSLEP

SEQ ID NO: 10534 - protein, 1200 aa, Sesamia nonagrioides
MLTRSAARCARPPPPDSSLSSASPPPVSSPNVNAVMTPAAVVASSSSDEYFSPPTTPPPARRRGGRRPPDRLGPRGPSASDRVPAPGGSVQRMRWTQSINENVMRSYYGATEGGNNLTAYRVRMLSLFQVLEPAVNVSAQRLSDQVRVIQRNHMLDDVVLDRLRLESRNSHVTPASSLVAVQLNSVSPRPNHVDEEDDDRAISVSPQCNEKLRSALEDAFREYRSIPPEFRPRLPRLPMHKKNKALVCALDSQLSNYLKDSNDLNDTHSILYCGAVAICRVAHVKFPDSDRATRPKSAVPAWQCRIERRIGETRALIGKLISFREGNTRPRVMRFVRRAFSGTDTSTRDYLFRVTERIDFFKQKIYAWANRIRRYRRRVERYSQNRNFQSDERRVYRAWERSDQGVTDTCLPDDDATCSFWRNIWSVPLSHTEGSWTRVVERACDPVPEMGAITICPQDVARAVRPLPNWKSPGPDGLHNFWIKWFSGSHARLASQFQTALESGSLPQFLTTGVTHLLHKSGSTAEPKNYRPITCLPTVYKVLTSILKSKINTHIDSNSIMSASQNGCRSGSRGTKELLLIDMAISQQVRRSRKDLSTCWIDYKKAYDSVPHTWLMRVLELYKVDATLRTFLMTCMRTWRTVLRYPGCRNIQRNSEPIRIERGIFQGDSLSPLWFCLALNPLSTLLEDSGLGYRLRRGGQVISHLLYMDDLKLFAHTDSQLKELLKITETFSSSIRMEFGVDKCAVMHVKRGEIMESVGTQLTSSINLRALSASETYKYLGMSEALGINVTDMKQSLKERFFGRLKKVLNSLLSGGNKVRAFNGWVMPVLMYSFGILKWTQTELDALDRRVRTLLTANRLHHPRSSVMRLYIPRKCGGRGFLNAKTLHNREICSLRQYFLTTDVGMHRDVVAVDKGLTPLSLAKENWRKPVVLDTNDRMEVWKSKELHGRFFKAQHGPDVDLQASVAWLRFGDLFGETEGFVCAITDEVMMTNNYRRFIVKDGTVDICRACHRPGESIRHIISGCSRLANGEYLHRHNLVARIIHQQLALKYNLVESEVPYYRYTPDPVLENDHITLYWDRSIITDRTIVANKPDIVLVDRSERRAMIVDITIPHDENLVKAEKDKQIKYLDLAHEVVDMWEVDSAIIVPIVVTANGLIAKSLDQHLRRLSLGSWIKGLIQKAVLLDTARIVRKFLSLEP

SEQ ID NO: 10535 - protein, 1197 aa, Sesamia nonagrioides
MLTRSAARRARPPSPDSLLSSASPPPASSATVSAVTTPAAAVASSSSDEYFSPPTTPPPARRRGGRRPPDRLGPRGPSASDRVPAPGGSVQRMRWTQSINENVMRSYYGATEGGNNLTAYRVRMLSLFQVLEPAVNVSAQQLSDQVRVIQRNHMLDDTVLDRLRNEMQSSRIIAHQSQTAEIPPQPTNYADEGSNDRATNVSTQCNEELLNALEAAIREYRFTPAELRPRLPRLPIHNRNRALMAALDAQLSDYFDTCEDLTDTHSILYCAAVAACRVAHVKFPSDSRATRPKPVVPAWQHRIERRIGGARALIGKLICFREGNTRPRVMRFVRRAFAGTNISPQNYMARVTERIDFLKQKVYAWANRIRRYKRRVERYTQNRTFQSNERWVYRDWERPEQGVTDTCLPDDDAMCSFWRSIWSVPVSHTEGDWARDVERACDPIPEMGAITICPQDVACAVRPLPNWKSPGPDGLHNFWIKWFPRSHARLASQFQTALVSGSLPQFLTTGITHLLHKSGSTAEPKNYRPITCLPTVYKVLTSILKTKINKHIDSNSIMSASQNGCKSGSRGTKELLLIDMAISQQVRRSRKDLSTCWIDYRKAYDSVPHTWLMRVLELYKVDATLRTFLMSCMKTWRTVLRYPGCRNIQRNSEPIRIERGIFQGDSLSPLWFSLALNPLSTLLEDSGLGYRLRRGGQVISHLLYMDDLKLFAPNNSQLRELLKITETFSSSIRMEFGVDKCAVMHVKRGEIMESVGTQLTDSINLRALSASETYKYLGMSEALGINVTDMKQSLKERFFGRLKKGLNSRLSGGNKVRAFNGWVMPVLMYSFGILKWTQTELDALDQRVRTLLTANRLHHPRSSVMRLYIPRKCGGRGFLNAKTLHNREVCSLRDYFLVNDVGMHRDVVAADKGLTPLSLAKENWRKPVVLDTNDRMEVWKSKELHGRFFRALHGPDVDLQASVAWLRFGDLFGETEGFVFAIMDEVMMTNNYRRFIVKDGTVDICRACHRPGESIRHIISGCSRLANGEYLHRHNLVARIIHQQLALKYNLVESEVPYYRYTPDPVLENGYITLYWDRSIITDRTIVANKPDIVMVDRSERRAMIVDITIPHDENLVKAEKDKQIKYLDLAHEVVDMWEVDSAIIVPIVVTANGLIAKSLDQHLRRLSLGSWIKGLIQKAVLLDTARIVRKFLSLEP

SEQ ID NO: 10536 - protein, 1008 aa, Apamea monoglypha
MTTSSGFFLSYQRRARYCALIIIIIIAIREYRFMSPELRPRLPRLPMHNKNRALVAVLDAQLSSHFDACEDLTDTHSILYCAAVAACRVAHVKFDSDSRATRPKPAIPAWQCRIERRIGGARALIGKLICFREGNTRPRVMRFVRRAFLGTDISSQDYLSRVTERIDFLKQKVYAWANRIRRYKRRVERYTQNRTFQSDERWVYRGWERPDQSVADTCLPDDDAMCSFWRSIWSAPVSHTEGDWTGKIERACELIPEMGAITICPQDVARAVRPLPNWKSPGPDGLHNFWIKWFQRSHAPLAAQFQSALESGLLPQFITTGITHLLHKSGSTADPKNYRPITCLPTIYKVLTSILRAKINKHIDSNSIMSVSQNGCRNGSRGTKELLLIDMAISQQVRRSRKDLSTCWIDYKKAYDSVPHTWLMRVLELYKVDTTLRTFLMTCMGQWRTVLRYPGCRNIQRNSEPIRIERGIFQGDSLSPLWFCLALNPLSTLLDDSGLGYRLRRGGQVISHLLYMDDLKLFAPNNLQLMKLLKITETFSSAIRMEFGVDKCAVMHVKRGEIVESVGTQLSDFTNLRALSAAETYKYLGMSEALGINVTDMKQSLKERFFGRLKKVFNSLLSGGNKVRAFNSWVMPVLMYSFGILKWTQTELEALDRRVRTLLTANRMHHPRSSVMRLYIPRKCGGRGFLNAKTLHNREICSLREYFLETDVGIHRDVVAVDKGLTPLSLAKENWRKPVVLDTNDRMEVWQSKELHGRFYRALHGPDVDLLASVAWLRFGDLFGETEGFVCAIMDEVMMTNNYRRYIVKDGTVDICRACHRPGESIRHIISGCSRLANGEYLHRHNLVARIIHQQLALKYSLVESEVPYYRYVPDPVLENGNITLYWDRSIITDRTIVANKPDIVVVDRSERRAMIVDITVPHDENLVKAEKDKQIKYLDLAREVVDMWDVDSAIIVPIVVSANGLIAKSLDQHLRRLSLGSWIKGLIQKAVLLDTARIVRRFLSLEP

SEQ ID NO: 10537 - protein, 975 aa, Apamea monoglypha
MSPELRPRLPRLPMHNKNRALVAVLDAQLSSYFDVCEDLTDTHSILYCAAVAACRVAHVKFASDSRATRPKPAIPPWQCRIERRIGGARALIGKLICFREGNTRPRVMRFVRRAFSGTDISSQDYLSHVTERIDFLKQKVYAWVNLIRRYKRRVDRYTLNRTFQSDERWVYRGWERPDQGVADTCLPDDDAMYSFWRSIWSVPVSHTEGDWAREVERACDLIPEMEAITICAQDVARAVRPLPNWKSPGPDGLHNFWIKWFTRSHARLASQFQIALESGSLPQFLTTGVTHLLHKSASTAEPKNYRPITCLPTVYKVLTSILRAKINKHIDTNSIMSASQNGCKNGSRGTKELLLIDMAISQQVRRSRKDLSTCWIDYKKAYDSVPHTWLMRVLELYKVDTTLRTFLMTCMGQWRTVLRYPGCRNIQRNSEPIRIERGIFQGDSLSPLWFCLALNPLSTLLEDSGLGYRLRRGGQVISHLLYMDDLKLFAPNNLQLMELLKITETFSSAIRMEFGVDKCAVMHVKRGEIVESVGTQLSDSTNLRALSVSETYKYLGMSEALGINVTDMKQSLKERFFGRLKKVLNSLLSGGNKVRAFNSWVMPVLMYSFGILKWTQTELDALDRRVRTLLTANLMHHPRSSVMRLYIPRKCGGRGFLNAKTLHNREICSLREYFLETDVGMHRDVVAVDKGLTPLSLAKENWRKPVVLDTNDRLEVWQSKELHGRFYRALHGPDVDLLASVAWLRFGDLFGETEGFVCAIMDEVMMTNNYRRFIVKDGTVDICRACHRPGESIRHIISGCSRLANGEYLHRHNLVARIIYQQLALKYSLVESEVPYYRYVPDPVLENGHITLYWDRSIITDRTIVANKPDIVVVDRSERRAMIVDITVPHDENLVKAEKDKQIKYLDLAREVVDMWDVDSAIIVPIVVTANGLIAKSLDQHLRRLSLGSWIKGLIQKAVLLDTARIVRRFLSLEP

SEQ ID NO: 10538 - protein, 1194 aa, Furcula furcula
MLTRSKAHLRPPDSSPHSASQPPGPSRDGSLAAVASSESDEYFSPPTSPPPIRRRRGRPPRELGLLEQPAPNRVLAPGGVVRRMRWTLSINENVMRAYYKATEGGTNLTAYRDRMLSLFQALEPAVNVSAQRLSDQVRATQRGHMLDDAVLDRLRSEVQGSRVVPCIPSSQAVAQAVNTAPAPRPAANSGDDRDDMTTDVSTNVSSQLRSTLEDVVREYRTMPQGLRPRLPRLPMHKRNRALVCALDSLLSSYFDSSEDLADAHALLYCAAITACRVARVKFPDAATRPKPAVPAWQCRIERRIGEARVLIGKLTCFREGNMRPRVMRFVRRAFSGTGIDPREYLSRVTERIDFLKQKVCAWANRIRRYRARVDRYSQNNMFQRDQRWVYRSWERPSQIVGEVQRPDDDAMIRFWRNMWSVPVTHSEGDWIGDVEEVCEPLPEMGPITIGPQDVADAVRPLPNWKAPGPDGLHNFWLKCIRSSHICLASLFQSAVESGSLPEFMTTGITHLLHKTDSTTNPKNYRPITCLPTVYKTLTSILRAKINRHVEDNSIMSSSQNGCRSGARGTKELLLIDMAICQQARRNRKDLSTCWIDYKKAFDSVPHTWLMRVLDLYKVNTTLRTFLASCMRQWRTVLLYPGSRQTLGNGDPIRIERGIFQGDSLSPLWFCLALNPLSTLLKSSGLGCRLRRGGQVISHLLYMDDLKLFAPTELRLMGLLKATETFSNSIRMEFGVDKCAVMHVKRGRMVESRSVQLSDSTDLRTLSETETYKYLGMSQALNINDTAMKQSLRERFLGRLRKVLKSLLSGGNKVRAYNGWVMPVLVYSFGILRWTQTELDTLDRTVRTLLTTYRMHHPRSSVMRLYIPRKCGGRGFLNAKALHNREICNLREYFLHCSGEMHTDVVAVDNGLTPLSLAKGNWRKPVVLSTGDREAVWQSKELHGRFYRALHGPDVDFTASVAWLRFGDLFGETEGFVCAIMDEVVMTNNYRRYILRDGTIDICRACRRPGESLRHIISGCSRLANGEYLHRHNQVARIIHQQLALKYRLVTSEVPYYRYAPEPVLEDGHITLYWDRSIITDRTIVANKPDIVLIDRTERRAMIVDITVPHDENLVKAEKDKQCKYLDLAHEVVDMWDIDDAIIVPIVVSAHGLMAKSLDKHLKRLSLDGWIKGQIQKAVLLETARIVRKFLSLEP

SEQ ID NO: 10539 - protein, 999 aa, Furcula furcula
MTTDVSTNVSSQLRSTLEDVVREYRTMPQGLRPRLPRLPMHKRNRALVCALDSLLSSYFDSSEDLADAHALLYCAAITACRVARVKFPDAATRPKTAVPAWQCRIERRIGEARVLIGKLTCFREGNMRPRVMRFVRRAFSGTGIDPREYLSRVTERIDFLKQKVCAWANRIRRYRARVDRYSQNNMFQRDQRWVYRSWERPSQIVGEVQRPDDDAMIRFWRNIWSVPVTHSEGDWIGDVEEVCEPLSEMGPITIGPQDVADAVRPLPNWKAPGPDGLHNFRLKYIRSSHICLASLFQSALESGSLQEFMTTGITHLLHKTDSTTNPKYYRPITCLPIVYKTLTSILRAKIYKHVEDNSIMSSSQNGCRSGARGTKELLLIDMAICQQARRNRKDLSTCWIDYKKAFDSVPHTWLMRVLELYKVNTTLRTFLASCMRQWRTVLLYPGSRQTLGNGDPIRIERGIFQGDSLSPLWFCLALNPLSTLLKSSGLGCRLRRGGQVISHLLYMDDLKLFAPTELQLTGLLKVTETFSNSIRMEFGVDKCAVMHVKRGRMDESRSVQLSDSTDLRTLSATETYKYLGMSQALNINETDMKQSLRERFLGRLRKVLKSLLSGGNRVRAYNGWVMPVLMYSFGILKWTQTELETLDRTVRTLLTTYRMHHPRSSVMRLYIPRKCGGRGFLNANTLHNREICNLREYFLHCGGEMHTDVVAVDNGLTPLSLAKRNWRKPVVLTTGDREAVWQSKELHGRFYRALHGPDVDFIASVAWLRFGDLFGETEGFVCAIMDEVVMTNNYRRYILRDGTIDICRACHRPGESLRHIISGCSRLANGEYLHRHNQVARIIHQQLALKYRLVTSEVPDYRYAPEPVLEDGHITLYWDRSIITDRTIVANKPDIVLIDRTELRAMIVDVTVPHDENLVKAEKDKQCKYLDLAHEVVDMWDIDNAIIVPIDLSAHGLMAKSLDKHLKRLTLDGWIKGQIQKAVLLETARIVRKFLSLEP

SEQ ID NO: 10540 - protein, 1198 aa, Arctia plantaginis
MITRARSKAQLTSPDSSLRSVLPSTETTTEAPAVAEASSSTSSDEFFSPPTSPTPVRRQGRGRPPICLGSRGPLTSNRVPATGGNVRRMKWTNSINENVMRAYYRATEMGTNLTAYRVRLVSLFQELEPAVNVSAQRLSDQVRAIQRCHLLDDAVLERIRSDLRNSLIIHSSSHTVDLVANSTPQLVSHTNDVDELVEGEVISVSTQYNDRIRSALEDAILEYRYVNWNDRPRLSRLPIHKRNLALVGALDSLLPDYLDNSEDLGDTHSILYCAAVAVCRVAGVNIVENVTTTRPKSTVPAWQCRIERRIAETRVLIGKLISFRSGNTRPRVMRFVKQAFLGTTIGPQQYMSCVTERIDFLKQKIYAWANRLRRYKKRIDRYNQNRMFQRNEKWVYRKWEEPDPCVSHGHLPDENVTHTFWRNIWSVPVTHIEGDWLRDVRRSCESITPMELVIIDKDDVSCAVRSLPNWKSPGLDGLHNFWLKWFRSSHACLASQFQAALDSGSLPQFLTTGITHLLHKSGSVMDPKNFRPITCLPTMYKLLTSILRLKITLHINNNSIMSVSQNGCRSGSRGTKDLLIIDRTISQQVRRNRKSLATCWIDYKKAYDSVPHTWLLRVLELYKIDTTLCTFLKSCMGQWRTALRYPGCRQTTVIDAPIKIERGIFQGDSLSPLWFCLALNPLSTLLEGSGLGYRLQKDDQVISHLLYMDDLKLLAPTKLQLSALLKVTENFSNSIKMEFGVDKCAVMYVKKGEIVESEGIELSDSTKLRSLSATETYKYLGISQSLGIPESDMKQTLQERFFGRLKKVLKSLLSGGNKVRACNGWVMPILMYSFGILKWTQTELDALDRRVRTLLTAFRMHHPRSSVMRLYIPRKLGGRGLLNIKTLHNREICNLREYFLHTDVGMHRNVVAVDIGFTPLALAKENWRKPVVFSTNDRREVWKGKELHGRFYRALNGSDIDFKASTTWLRYGDLFGETEGFVCAIMDEVIMTNNYRKYILKDGTVDICRACHRPGESIRHIISGCSRLANGEYLHRHNQVARIVHQQLALKYHLVNLEVPYYRYVPDPVLENGRATLYWDRSIITDRTIVANKPDIVVIDRLERRAMIVDIAVPHDENLVKVEKEKQIKYLDLSHEIVDMWNVDSVIIVPIVVSAHGLIAKSLDQHLKRLTLDGWIKGLIQKAVLLDTARIVRRFLSL
